United States Patent Application Publication US 2026/0234654 A1 - sequence listing, part 2

SEQ ID NO: 11134 - DNA, 203 bp, Artificial sequence
  synthetic
ggcgcgccagtcctggctcctgaggacacaacatcagagggacggcagagaatccttgtgtgtagatctttggtggcagtttgaaaattgcaaggagggactttaagactacttctgagaacagccacgctgctgtgctctgagcaggctgaagtgactggacgagacgcactgttggagaaataaaacgactcggaccgatg

SEQ ID NO: 11135 - DNA, 203 bp, Artificial sequence
  synthetic
ggcgcgccagtcctcgtcgtcgaggacacaacatcagagggacggcagagaatccttgtgtgtagatctttggtggcagtttgaaaattgcaaggagggactttaagactacttctgatttgcaaagattgtctgtgctctgagcaggctgaagtgactggacgagacgcactgcacctaggtccgttcgactcggaccgatg

SEQ ID NO: 11136 - DNA, 203 bp, Artificial sequence
  synthetic
ggcgcgccagtcctccttatctaggacacaacatcagagggacggcaggatgatgcccgcaatagatctttggtggcagtttgaaaattgcaaggagggactttaagactacttctgatttgcaaagattgtctgtgctctgagcaggctgaagtgactggacgagacgcactgttggagaaataaaacgactcggaccgatg

SEQ ID NO: 11137 - DNA, 203 bp, Artificial sequence
  synthetic
ggcgcgccagtcctatccgcgtaggacagtcagaacttccagagctccactgcctccctgcaccatgccctacaacttctgcctgcccagcctgagctgccgcaccagctgctcctcccggccctgtgtgccccccagctgccacggctacaccctgcccggggcctgcaacatccctgccaatgtgacgactcggaccgatg

SEQ ID NO: 11138 - DNA, 203 bp, Artificial sequence
  synthetic
ggcgcgccagtcctgggtagaaaggacgaccgggtcctttccattggatcaaacccgctcaagatacttgttcaaaggcgtgcccccgcaagactgctagccgagtagcgttgggttgcgaaaggccttgtggtactgcctgatagggtgcttgcgagtgccccgggaggtctcgtagaccgtgcaaccgactcggaccgatg

SEQ ID NO: 11139 - DNA, 203 bp, Artificial sequence
  synthetic
ggcgcgccagtcctgaggttcgaggacgaccgggtcctttccattggatcaaacccgctcaatgcctggagatttgaaacgttaaaacgcagactgctagccgagtagcgttgggttgcgaaaggccttgtggtactgcctgatagggtgcttgcgagtgccccgggaggtctcgtagaccgtgcaaccgactcggaccgatg

SEQ ID NO: 11140 - DNA, 203 bp, Artificial sequence
  synthetic
ggcgcgccagtcctgggctgataggacgaccgggtcctttccattggatcaaacccgctcaatgcctggagatttgggcgtgcccccgcaagactgctagccgagtagcgttgggttgcgaaaggccttgtgaatggtgaaccattggtgcttgcgagtgccccgggaggtctcgtagaccgtgcaaccgactcggaccgatg

SEQ ID NO: 11141 - DNA, 203 bp, Artificial sequence
  synthetic
ggcgcgccagtcctaagatcacaggacgaccgggtcctttccattggatcaaacccgctcaatgcctggagatttgggcgtgcccccgcaagactgctagccgagtagcgttgggttggtctgactaaccacgtactgcctgatagggtgcttgcgagtgccccgggaggtctcgtagaccgtgcaaccgactcggaccgatg

SEQ ID NO: 11142 - DNA, 203 bp, Artificial sequence
  synthetic
ggcgcgccagtccttgaccattaggactcactctcgacaaagacagattctttgagggagctaagctcaacgtagttctaacagttttttaattagagagcagatctctgatgaataaccaacggaaaaaggcgaaaaacacgcctttcaatatgctgaaacgcgagagaaaccgcgtgtcgactgtgcgactcggaccgatg

SEQ ID NO: 11143 - DNA, 203 bp, Artificial sequence
  synthetic
ggcgcgccagtcctctcgaattaggaggctgactccccaagtcctgcaaaggggtgcaagcctagttccaaccctgccgggctgaggcatgagtaggggctgtagcctacgcggttgcggcccccaaagcttccactcgctgccttaaaacgccaacccagcctctcagacaatgctgccctcccactcgactcggaccgatg

SEQ ID NO: 11144 - DNA, 203 bp, Artificial sequence
  synthetic
ggcgcgccagtcctttgcgtgtaggaggctgactccccaagtcctgcaaaggggtgcaagcctagttccaaccctgccgggctgaggcatgagtaggggctgtatttgcgtgcaggcgggcccccaaagcttccactcgctgccttaaaacgccaacccaatgctaggcgactagctgccctcccactcgactcggaccgatg

SEQ ID NO: 11145 - DNA, 203 bp, Artificial sequence
  synthetic
ggcgcgccagtcctaggatagaaggaggctgactccccaagtcctgcaaaggggtgcaagcctagttccaaccctgccgggctgaggcatgagtaggggctgtatttgcgtgcaggcgggcccccaaagcttccactcgctgccttaaaacgccaacccagcctctcagacaatgctgccctcccactcgactcggaccgatg

SEQ ID NO: 11146 - DNA, 203 bp, Artificial sequence
  synthetic
ggcgcgccagtcctccttcctaaggaggctgactccccaagtcctgcaaaggggtgcaagcctagttccaaccctgccgggctgaggcatgagtaggggctgtatttgcgtgcaggcgggcccccaaagcttgtcagataacggggaaaacgccaacccagcctctcagacaatgctgccctcccactcgactcggaccgatg

SEQ ID NO: 11147 - DNA, 203 bp, Artificial sequence
  synthetic
ggcgcgccagtcctatatgaacaggaggctgactccccaagtcctgcaaaggggtgcaagcctagttccaaccctgccgggctgaggcatgagtaggggctgtatttgcgtgcaggcgtcttgttcttatagccactcgctgccttaaaacgccaacccagcctctcagacaatgctgccctcccactcgactcggaccgatg

SEQ ID NO: 11148 - DNA, 203 bp, Artificial sequence
  synthetic
ggcgcgccagtcctcgtgacgaaggaggctgactccccaagtcctgcactcccagttggcggtagttccaaccctgccgggctgaggcatgagtaggggctgtatttgcgtgcaggcgggcccccaaagcttccactcgctgccttaaaacgccaacccagcctctcagacaatgctgccctcccactcgactcggaccgatg

SEQ ID NO: 11149 - DNA, 203 bp, Artificial sequence
  synthetic
ggcgcgccagtcctctgtttgaaggaggctgacttgtgcgactactggaaggggtgcaagcctagttccaaccctgccgggctgaggcatgagtaggggctgtatttgcgtgcaggcgggcccccaaagcttccactcgctgccttaaaacgccaacccagcctctcagacaatgctgccctcccactcgactcggaccgatg

SEQ ID NO: 11150 - DNA, 203 bp, Artificial sequence
  synthetic
ggcgcgccagtcctactgtcgcaggatgctctcgcaaaagacaactcacaatctccctaaaacagcaacgacaccatgtcagctttgctcaaatctctctgggagaaacttttgcccacatactaacaacatcacaaccatctcaagaaaagaaactgggcaaaacagcatccaagagacaaatagcacgactcggaccgatg

SEQ ID NO: 11151 - DNA, 203 bp, Artificial sequence
  synthetic
ggcgcgccagtcctgcctaagcaggatggcgcggcacgggccgtgcggggcccgaaccagtaagggaaccgccggctcgcgccctccgttctttcccggagccggcttcacgcagggccgggaacggccgtgcctctgggatccgccttcgctgacgccgggcacctacctggacgcgagcgagcgagcgactcggaccgatg

SEQ ID NO: 11152 - DNA, 203 bp, Artificial sequence
  synthetic
ggcgcgccagtccttcaactggaggcaaaatttgcacagtataaaatcatgggtcgaacggcttgttggaatcaccgtacctatttaggtttacgctccaagatcggtggatagcagccctatcaatatctaggagaactgtgctatgtttagaagattaggtagtctctaaacagaacaatttacctcgactcggaccgatg

SEQ ID NO: 11153 - DNA, 203 bp, Artificial sequence
  synthetic
ggcgcgccagtcctccaaccagaggcaaaatttgcacagtataaaatctgcaagtagtgctattgttggaatcaccgtacctatttaggtttacgctccaagatcggtggatagcagccctatcaatatctaggagaactgtgctatgtttagaagattaaagtcgagggcgcgagaacaatttacctcgactcggaccgatg

SEQ ID NO: 11154 - DNA, 203 bp, Artificial sequence
  synthetic
ggcgcgccagtcctctgtcagtaggcaaaatttgtcttcgtgggccgatgcaagtagtgctattgttggaatcaccgtacctatttaggtttacgctccaagatcggtggatagcagccctatcaatatctaggagaactgtgctatgtttagaagattaggtagtctctaaacagaacaatttacctcgactcggaccgatg

SEQ ID NO: 11155 - DNA, 203 bp, Artificial sequence
  synthetic
ggcgcgccagtcctaagaggataggcgaaggtttctggtgcttagtaaccgactttcctccggactcctgcacgacctgctcctacagccggcgatccactcccggctgttcccccggagggtccagaggcctttcagaaggagaaggcagctctgtttctctgcagaggagtagggtcctttcagcccgactcggaccgatg

SEQ ID NO: 11156 - DNA, 203 bp, Artificial sequence
  synthetic
ggcgcgccagtcctgagcgcacaggcgcaagcgcgcacagactgtagccatccgaggacacccccgcccccccggcgtcatgaacctactccgcgcagaatcgcctccggatcccctgcagtcggcgggagtgttggaggtcggcgccggcccccgccttccgcgccccccacgggaaggaagcaccccgactcggaccgatg

SEQ ID NO: 11157 - DNA, 203 bp, Artificial sequence
  synthetic
ggcgcgccagtcctccaggctaaggcgcaagcgcgcacagactgtagccatccgaggacaccgttaaaaaagactgccacccggagacacccgcgcagaatcgcctccggatcccctgcagtcggcgggagtgttggaggtcggcgccggcccccgccttccgcgccccccacgggaaggaagcaccccgactcggaccgatg

SEQ ID NO: 11158 - DNA, 203 bp, Artificial sequence
  synthetic
ggcgcgccagtcctacgtcaggaggcgcaagcgcgcacagactgtagctgaggccatttttgcccgcccccccggcccacccggagacacccgcgcagaatcgcctccggatcccctgcagtcggcgggagtgttggaggtcggcgccggcccccgccttccgcgccccccacgggaaggaagcaccccgactcggaccgatg

SEQ ID NO: 11159 - DNA, 203 bp, Artificial sequence
  synthetic
ggcgcgccagtcctcgtggaagaggcgccgggaagtcgacggcgccggataggatgctgtagggccactgtctgcagctcccgtgaagatgtccactccagacccacccctgggcggaactcctcggccaggtccttccccgggccctggcccttcccctggagccatgctgggccctagcccgggtccgactcggaccgatg

SEQ ID NO: 11160 - DNA, 203 bp, Artificial sequence
  synthetic
ggcgcgccagtcctctcagctgaggcgccgggaagtcgacggcgccggcggctcctgcaggaggccactgtctgcagctcccgtgaagatgtccactccagacccacccctgggcggaactcctcggccagggttcggagtcaaaactggcccttcccctggagccatgctgggccctagcccgggtccgactcggaccgatg

SEQ ID NO: 11161 - DNA, 203 bp, Artificial sequence
  synthetic
ggcgcgccagtcctgagaccggaggcgccgggaagtcgacggcgccggcggctcctgcaggaggccactgtctgcagctcccgtgaagatgtccactccagacccacccctgggcggaactcctcggccaggtccttccccgggcctacattgaatagaaggagccatgctgggccctagcccgggtccgactcggaccgatg

SEQ ID NO: 11162 - DNA, 203 bp, Artificial sequence
  synthetic
ggcgcgccagtcctggcggctcaggcgtaattgcccggacagcaccccctcccttctccggtagctcctacccctgcctgtgcgggcctcgtccccgcgcccagccctcggtgctgcctccgacagcgccgcgctctctcagccgcccccctgcccctcgggcccccctctctgctgcccctggcgcccgactcggaccgatg

SEQ ID NO: 11163 - DNA, 203 bp, Artificial sequence
  synthetic
ggcgcgccagtcctattcgtagagggaccgtccacaacccggtcacctacccgcgcgactgtgtccacggatggcacgaaagccaagcgagtccccctgccgagctactcgcgtccgcctcctcccaagctgagctctgctccgcccacctgagtccttcgccagttaggaggaaacacagccgcttacgactcggaccgatg

SEQ ID NO: 11164 - DNA, 203 bp, Artificial sequence
  synthetic
ggcgcgccagtcctgtaccgttagggagaatatggatacgttaaaatatataacgtatttttaaaacttaggaaccaagacaaacacttttggtcttggtattgcgagacgcgcgctaatatcatcatgagtgatatctttgaagaggcggctagttttaggagttatcaatctaagttagggagagacgactcggaccgatg

SEQ ID NO: 11165 - DNA, 203 bp, Artificial sequence
  synthetic
ggcgcgccagtcctaaagacgaagggagcaggagagagaggacaagtggatccaacagccttcgctccaggggaatacttttgcatatcacttttctgggaggacactcccttctgatggtgaatgggaactcccttcctcctgcagcagcctgcctgcagctgtcctggtagaacagtgtggacattcgactcggaccgatg

SEQ ID NO: 11166 - DNA, 203 bp, Artificial sequence
  synthetic
ggcgcgccagtcctgctattggagggagcaggagagagaggacaagtggatccaacagccttcgctccaggggaatcagggcatcgcctccttttctgggaggacactcccttctgatacgcctcaaatgagcccttcctcctgcagcagcctgcctgcagctgtcctggtagaacagtgtggacattcgactcggaccgatg

SEQ ID NO: 11167 - DNA, 203 bp, Artificial sequence
  synthetic
ggcgcgccagtcctcgcaagttagggagcaggagagagaggacaagtggatccaacagccttcgctccaggggaatcagggcatcgcctccttttctgggaggacactcccttctgatggtgaatgggaactcccttcctcctgcagcagcctgcctgcacgacgagactgcttacagtgtggacattcgactcggaccgatg

SEQ ID NO: 11168 - DNA, 203 bp, Artificial sequence
  synthetic
ggcgcgccagtcctctgccgggagggagcaggagagagaggacaagtggatccaacagccttcgctccaggggaatcagggcatcgcctccttttctgggaggacactcccttctgatggtgaatgggaactcccttcctcctgcatgctaactatgtatgctgtcctggtagaacagtgtggacattcgactcggaccgatg

SEQ ID NO: 11169 - DNA, 203 bp, Artificial sequence
  synthetic
ggcgcgccagtcctctgctcctagggagcaggagagagaggacaagtggatccaacagccttcgctccaggggaatcagggcatcgcctccttttctgggaggaggtaaaaagaaagcggtgaatgggaactcccttcctcctgcagcagcctgcctgcagctgtcctggtagaacagtgtggacattcgactcggaccgatg

SEQ ID NO: 11170 - DNA, 203 bp, Artificial sequence
  synthetic
ggcgcgccagtccttagctctgagggagcaggagagagaggacaagtggatccaacagccttcgctccaggggaatcagggcatcgcctctaaggaatatgaaccactcccttctgatggtgaatgggaactcccttcctcctgcagcagcctgcctgcagctgtcctggtagaacagtgtggacattcgactcggaccgatg

SEQ ID NO: 11171 - DNA, 203 bp, Artificial sequence
  synthetic
ggcgcgccagtcctccagtggtagggagcaggagagagaggacaagtggatccaacagccttgataatcactcgcgcagggcatcgcctccttttctgggaggacactcccttctgatggtgaatgggaactcccttcctcctgcagcagcctgcctgcagctgtcctggtagaacagtgtggacattcgactcggaccgatg

SEQ ID NO: 11172 - DNA, 203 bp, Artificial sequence
  synthetic
ggcgcgccagtcctcttataccagggagcaggagccttgatgagctacgatccaacagccttcgctccaggggaatcagggcatcgcctccttttctgggaggacactcccttctgatggtgaatgggaactcccttcctcctgcagcagcctgcctgcagctgtcctggtagaacagtgtggacattcgactcggaccgatg

SEQ ID NO: 11173 - DNA, 203 bp, Artificial sequence
  synthetic
ggcgcgccagtccttaacacgtagggaggagctccctccaggctctatttagagccgggtaggggagcgcagcggccagatacctcagcgagctggtcaccggatggatttctctcccgcctgccggcctgcctgccacagccggactccgccactccggtagcctcatggctgcaacctgtgagattcgactcggaccgatg

SEQ ID NO: 11174 - DNA, 203 bp, Artificial sequence
  synthetic
ggcgcgccagtcctagcgtgttagggaggagctccctccaggctctatttagagccgggtaggggagcgcagcggccagatacctcagcgctacctggcggaactggatttctctcccgcctgccggcctgcaaaggcttaaaaagctccgccactccggtagcctcatggctgcaacctgtgagattcgactcggaccgatg

SEQ ID NO: 11175 - DNA, 203 bp, Artificial sequence
  synthetic
ggcgcgccagtccttacaggcaagggaggagctccctccaggctctatttagagccgggtaggggagcgcagcggccagatacctcagcgctacctggcggaactggatttctctcccgcctgccggcctgcctgccacagccggagcttcagcgggttttagcctcatggctgcaacctgtgagattcgactcggaccgatg

SEQ ID NO: 11176 - DNA, 203 bp, Artificial sequence
  synthetic
ggcgcgccagtcctatttatgtagggaggagctccctccaggctctatttagagccgggtaggggagcgcagcggccagatacctcagcgctacctggcggaactggatttctctccctaactttcagtgatctgccacagccggactccgccactccggtagcctcatggctgcaacctgtgagattcgactcggaccgatg

SEQ ID NO: 11177 - DNA, 203 bp, Artificial sequence
  synthetic
ggcgcgccagtcctcacgcctcagggaggagctcgagagcctacaacattagagccgggtaggggagcgcagcggccagatacctcagcgctacctggcggaactggatttctctcccgcctgccggcctgcctgccacagccggactccgccactccggtagcctcatggctgcaacctgtgagattcgactcggaccgatg

SEQ ID NO: 11178 - DNA, 203 bp, Artificial sequence
  synthetic
ggcgcgccagtcctatcggtataggggaccctgtacagctggatgttaatcgcagcgtcggatgttcagagcagcagaagccggcgtcgtcggatgttgtgttgcccgccaccatgagctacacaggctttgtccagggatctgaaaccactttgcagtcgacatactcggataccagcgctcagccccgactcggaccgatg

SEQ ID NO: 11179 - DNA, 203 bp, Artificial sequence
  synthetic
ggcgcgccagtcctattcagggaggggaccctgtggttagcagcagctatcgcagcgtcggatgttcagagcagcaactaattctccttgcggatgttgtgttgcccgccaccatgagctacacaggctttgtccagggatctgaaaccactttgcagtcgacatactcggataccagcgctcagccccgactcggaccgatg

SEQ ID NO: 11180 - DNA, 203 bp, Artificial sequence
  synthetic
ggcgcgccagtcctctcgtgacaggggaccctgtggttagcagcagctatcgcagcgtcggatgttcagagcagcagaagccggcgtcgtcggatgttgtgttgcccgccaccatgagctacacaggctttgtccagggatctgaaaccactttgcagtcaggtccggttcccgccagcgctcagccccgactcggaccgatg

SEQ ID NO: 11181 - DNA, 203 bp, Artificial sequence
  synthetic
ggcgcgccagtcctctgctgaaaggggaccctgtggttagcagcagctatcgcagcgtcggatgttcagagcagcagaagccggcgtcgtcggatgttgtgttgcccgccaccatgagctacacaggctttgtccagggatctgaaaccactttgcagtcgacatactcggataattaaatggtcgggcgactcggaccgatg

SEQ ID NO: 11182 - DNA, 203 bp, Artificial sequence
  synthetic
ggcgcgccagtcctgtaactgcaggggaccctgtggttagcagcagctatcgcagcgtcggatgttcagagcagcagaagccggcgtcgtcggatgttgtgttgcccgccaccatgagctacacaggctttgtccagggatctgaaaccactttgcagtcgacatactcggataccagcgctcagccccgactcggaccgatg

SEQ ID NO: 11183 - DNA, 203 bp, Artificial sequence
  synthetic
ggcgcgccagtcctggttgaccaggggaccctgtggttagcagcagctatcgcagcgtcggatgttcagagcagcagaagccggcgtcgtttacctggagaggccccgccaccatgagctacacaggctttgtccagggatctgaaaccactttgcagtcgacatactcggataccagcgctcagccccgactcggaccgatg

SEQ ID NO: 11184 - DNA, 203 bp, Artificial sequence
  synthetic
ggcgcgccagtcctcgggcgcaaggggaccctgtggttagcagcagcttcattgcaactaattgttcagagcagcagaagccggcgtcgtcggatgttgtgttgcccgccaccatgagctacacaggctttgtccagggatctgaaaccactttgcagtcgacatactcggataccagcgctcagccccgactcggaccgatg

SEQ ID NO: 11185 - DNA, 203 bp, Artificial sequence
  synthetic
ggcgcgccagtccttctagttgagggggtggggcatgtgccctcttttaatgaccggccgtccctgcggtcccgccccctccccgcccccggagccgcggcctcgctgagtgcccagccgcccggcgcccaggcctggggcaccgcgagtgccgaaccttcggctgctccccgcctcaggacaccaagcgactcggaccgatg

SEQ ID NO: 11186 - DNA, 203 bp, Artificial sequence
  synthetic
ggcgcgccagtcctccacaccaagggggtggggctatatgttcggaccaatgaccggccgtccctgcggtcccgccccctccccgcccccggagccgcggcctcgctgagtgcccagctcagatttagtattgcctggggcaccgcgagtgccgaaccttcggctgctccccgcctcaggacaccaagcgactcggaccgatg

SEQ ID NO: 11187 - DNA, 203 bp, Artificial sequence
  synthetic
ggcgcgccagtcctttaaactcagggggtggggctatatgttcggaccaatgaccggccgtccctgcggtcccgcctggcgtagctagtaggagccgcggcctcgctgagtgcccagccgcccggcgcccaggcctggggcaccgcgagtgccgaaccttcggctgctccccgcctcaggacaccaagcgactcggaccgatg

SEQ ID NO: 11188 - DNA, 203 bp, Artificial sequence
  synthetic
ggcgcgccagtcctctttattgaggggttcttgtgccgaaaggcagccacggggccaccaaggcggcgcagcgctgcatgcggcaaggggaaaaatccttcgggtgacccctggtggcaatcccttcccttaggagcatgagtgtggtcgacacattcaccatggcttggctgtggttgctggtttgccgactcggaccgatg

SEQ ID NO: 11189 - DNA, 203 bp, Artificial sequence
  synthetic
ggcgcgccagtcctggtatagcagggtcaagcgattcccctgcctcagcttcctgagtagctaacgacctgatgcttgtgtgctccgggatggagcaggtgtgcagagggtgagaacccagctctgggaccaagtcacttgcttccttacttagcaagactatcgacttgagcaaacttggacctgggcgactcggaccgatg

SEQ ID NO: 11190 - DNA, 203 bp, Artificial sequence
  synthetic
ggcgcgccagtcctgatcttatagggtcaagcgattcccctgcctcagcttcctgagtagctgggattacaggctcacgagttggaatcttggagcaggtgtgcagagggtgagaacccagctctgggaccaagtcacttgcttccttacttagcaagactatcgacttgagcaaacttggacctgggcgactcggaccgatg

SEQ ID NO: 11191 - DNA, 203 bp, Artificial sequence
  synthetic
ggcgcgccagtccttttcgtccagggtcaagcgattcccctgcctcagcttcctgagtagctgggattacaggctctgtgtgctccgggatggagcaggtgtgcagagggtgagaacccagctctgggaccaagtcacttgcttccactgcgtcggcctttatcgacttgagcaaacttggacctgggcgactcggaccgatg

SEQ ID NO: 11192 - DNA, 203 bp, Artificial sequence
  synthetic
ggcgcgccagtcctacgccgacagggtcaagcgattcccctgcctcagcttcctgagtagctgggattacaggctctgtgtgctccgggatggagcaggtgtgcagagggtgagaacccagctctgggaccaagtcacttgcttccttacttagcaagactatcgacttgagcaaacttggacctgggcgactcggaccgatg

SEQ ID NO: 11193 - DNA, 203 bp, Artificial sequence
  synthetic
ggcgcgccagtcctctcaattaaggtaggtgatagaggcttggggtcttcgaaggataatcggcgcccggggccgaacagcgggggcacacggggcgctgccgaagtgcaaggccacggccagagctcgagcccgacgcgctgtctggagtcgtaggaccctgacgtggctgaagcggccccgggagccgactcggaccgatg

SEQ ID NO: 11194 - DNA, 203 bp, Artificial sequence
  synthetic
ggcgcgccagtccttagtttctaggtctcgagataagtacatactaccggcatgcccaaagcacatcttaacctgagcgggggtcgcccaggtaaaagcagttttaaccgactgttacgaatacagcctgatagggtgctgcagaggcccactgtattgctactaaaaatctctgctgtacatggcaccgactcggaccgatg

SEQ ID NO: 11195 - DNA, 203 bp, Artificial sequence
  synthetic
ggcgcgccagtcctggccaaataggtctcgagatgccacgtggacgagctatccgtatcgtgacatcttaacctgagcgggggtcgcccaggtaaaagcagttttaaccgactgttacgaatacagcctgatagggtgctgcagaggcccactgtattgctactaaaaatctctgctgtacatggcaccgactcggaccgatg

SEQ ID NO: 11196 - DNA, 203 bp, Artificial sequence
  synthetic
ggcgcgccagtcctcttgacagaggtctcgagatgccacgtggacgagggcatgcccaaagcacatcttaacctgagcgggggtcgcccaggtaaaagcagttttaaccgactgttacgaatacagcctgatagggtgctgcagaggcccactgtattgcatgcgccgcataacgctgtacatggcaccgactcggaccgatg

SEQ ID NO: 11197 - DNA, 203 bp, Artificial sequence
  synthetic
ggcgcgccagtcctcgagtaacaggtctcgagatgccacgtggacgagggcatgcccaaagcacatcttaacctgagcgggggtcgcccaggtaaaagcagttttaaccgactgttacgaatacagcctgatagggtgctgcagaggcccactgtattgcctagttgctcagtcgctgtacatggcaccgactcggaccgatg

SEQ ID NO: 11198 - DNA, 203 bp, Artificial sequence
  synthetic
ggcgcgccagtccttacgccctaggtctcgagatgccacgtggacgagggcatgcccaaagcacatcttaacctgagcgggggtcgcccaggtaaaagcagttttaaccgactgttacgaatacagcctgatagggtgctgcagaggcccactgtattgctactaaaaatctctcacaggggcatgttcgactcggaccgatg

SEQ ID NO: 11199 - DNA, 203 bp, Artificial sequence
  synthetic
ggcgcgccagtcctcccggaacaggtctcgagatgccacgtggacgagggcatgcccaaagcacatcttaacctgagcgggggtcgcccaggtaaaagcagttttaaccgactgttacgaatacagcctgatcaaaattgtgtatcgcccactgtattgctactaaaaatctctgctgtacatggcaccgactcggaccgatg

SEQ ID NO: 11200 - DNA, 203 bp, Artificial sequence
  synthetic
ggcgcgccagtcctgcgcaacgaggtctcgagatgccacgtggacgagggcatgcccaaagccatagaggtagcacgcgggggtcgcccaggtaaaagcagttttaaccgactgttacgaatacagcctgatagggtgctgcagaggcccactgtattgctactaaaaatctctgctgtacatggcaccgactcggaccgatg

SEQ ID NO: 11201 - DNA, 203 bp, Artificial sequence
  synthetic
ggcgcgccagtcctcaacgaagaggtctcgagatgccacgtggacgagggcatgcccaaagcttcatggctgtaacgcgggggtcgcccaggtaaaagcagttttaaccgactgttacgaatacagcctgatagggtgctgcagaggcccactgtattgctactaaaaatctctgctgtacatggcaccgactcggaccgatg

SEQ ID NO: 11202 - DNA, 203 bp, Artificial sequence
  synthetic
ggcgcgccagtcctattacggaaggtgtatctcgcaccagcccctgatcatttcgcctaaaagagcaaggactagagttcctgacctccaggccagtccctgatccctgacctaatgttatcgcggaatgatgatatatgtatctacgggggcctggggctgggcgggctcctgcttctggcagtggtcgactcggaccgatg

SEQ ID NO: 11203 - DNA, 203 bp, Artificial sequence
  synthetic
ggcgcgccagtcctgtttgtctagtaagaaaattcctagttataatatttttaatactgctacatttttaagacccttagttatttagctttaccgcccaggatggggtgcagcgttcctgcaatatccagggcacctaggtgcagccttgtagttttagcacttcgggtttgcaagaatttcactagcgactcggaccgatg

SEQ ID NO: 11204 - DNA, 203 bp, Artificial sequence
  synthetic
ggcgcgccagtccttgcgttagagtaagtctgtctgatctaggatgtcttgcttaccacccaggtagggggttatacgtcagggatagacctgattccattgtaactcttgccgaaatccgggtgaacggaagtagtctctttaagaactggtatgggcaggcccaagttgtcaaggcttcggaggtacgactcggaccgatg

SEQ ID NO: 11205 - DNA, 203 bp, Artificial sequence
  synthetic
ggcgcgccagtcctcgaggtatagtaagtctgtctgatctaggatgtcttgcttaccacccaggtagggggttatatactcccagcctttctgattccattgtaactcttgccgaaatccgggtgaacggaaaactgaatcacctaaactggtatgggcaggcccaagttgtcaaggcttcggaggtacgactcggaccgatg

SEQ ID NO: 11206 - DNA, 203 bp, Artificial sequence
  synthetic
ggcgcgccagtccttattgtgcagtaagtctgtctgatctaggatgtcttgcttaccacccaggtagggggttatatactcccagcctttctgattccattgtaactcttgccgaaatccgggtgaacggaagtagtctctttaagaactggtatgggcacatgacccccacgcaggcttcggaggtacgactcggaccgatg

SEQ ID NO: 11207 - DNA, 203 bp, Artificial sequence
  synthetic
ggcgcgccagtcctcattgactagtaatgattttgtctcccccaaatttgggcattgtccccgggtcttccaacggactgggcgttgctcccggacactgaggactggccccggggtctcgctcaccttcagcagcgtccaccgcctgccacagagcgttcgatcgctcgctgcctgagctcctggtgcgactcggaccgatg

SEQ ID NO: 11208 - DNA, 203 bp, Artificial sequence
  synthetic
ggcgcgccagtcctagatcgggagtacggtgtgtggagctggagcaccgtgaggaagaagcgctaagagaggcccaagttcagctgcgagatatcaaacaaagaattactctgtacaaagccagaacacatatatcaaagtaatcctgaagtatcagaacaaaataataggctgtaacagaggaggaacgactcggaccgatg

SEQ ID NO: 11209 - DNA, 203 bp, Artificial sequence
  synthetic
ggcgcgccagtcctcgcattacagtaggtcagcccaaatacgaatgtgcagcggtgctggggtcatgatggctcggtgggcagcgaggggccgggccggctggaggagcacagtgcggattctattctgaaagtcaagaagacatcatccggaatattgccaggcacctcgcccaggtcggggacagccgactcggaccgatg

SEQ ID NO: 11210 - DNA, 203 bp, Artificial sequence
  synthetic
ggcgcgccagtccttacgaaagagtagttaggatggctgaaggggagtacattcggctgaaggccgactgtgattcccccggttgatacaaggcgattttgaccccctgagggctgctctagaggactcaggccccgaagctgtcccagggaggtccccgctgcatcccaccacccaagctgtgcctccgactcggaccgatg

SEQ ID NO: 11211 - DNA, 203 bp, Artificial sequence
  synthetic
ggcgcgccagtccttcacccgcagtagttaggatggctgaaggggatactcaccggctgaaggccgactgtgattcccccggttgatacaaggcgattttgaccccctgagggctgctctagaggactcaggccccgaagctgtcccagggaggtccccgctgcatcccaccacccaagctgtgcctccgactcggaccgatg

SEQ ID NO: 11212 - DNA, 203 bp, Artificial sequence
  synthetic
ggcgcgccagtcctcataaataagtagttaggatggctgaaggggatactcaccggctgaaggccgactgtgattccccctacccccacaaggcgattttgaccccctgagggctgctaattttctaagcacccccgaagctgtcccagggaggtccccgctgcatcccaccacccaagctgtgcctccgactcggaccgatg

SEQ ID NO: 11213 - DNA, 203 bp, Artificial sequence
  synthetic
ggcgcgccagtcctgagctagtagtagttaggatggctgaaggggatactcaccggctgaaggccgactgtgattccccctacccccacaaggcgattttgaccccctgagggctgctctagaggactcaggatagctgatcaggacagggaggtccccgctgcatcccaccacccaagctgtgcctccgactcggaccgatg

SEQ ID NO: 11214 - DNA, 203 bp, Artificial sequence
  synthetic
ggcgcgccagtcctacgcgcctagtagttaggatggctgaaggggatactcaccggctgaaggccgactgtgattccccctacccccacaaggcgattttgaccccctgagggctgctctagaggactcaggccccgaagctgtcccagggaggtccccgctgcatcccaccacccaagctgtgcctccgactcggaccgatg

SEQ ID NO: 11215 - DNA, 203 bp, Artificial sequence
  synthetic
ggcgcgccagtcctagagtttaagtagttaggatggctgaaggggatactcaccggctgaagtgtactacgctggacccctacccccacaaggcgattttgaccccctgagggctgctctagaggactcaggccccgaagctgtcccagggaggtccccgctgcatcccaccacccaagctgtgcctccgactcggaccgatg

SEQ ID NO: 11216 - DNA, 203 bp, Artificial sequence
  synthetic
ggcgcgccagtcctaatacccgagtagttaggatggctgaaggggatatcacagtatgcggcgccgactgtgattccccctacccccacaaggcgattttgaccccctgagggctgctctagaggactcaggccccgaagctgtcccagggaggtccccgctgcatcccaccacccaagctgtgcctccgactcggaccgatg

SEQ ID NO: 11217 - DNA, 203 bp, Artificial sequence
  synthetic
ggcgcgccagtccttgaaaccaagtagttaggattctgcctaatagatctcaccggctgaaggccgactgtgattccccctacccccacaaggcgattttgaccccctgagggctgctctagaggactcaggccccgaagctgtcccagggaggtccccgctgcatcccaccacccaagctgtgcctccgactcggaccgatg

SEQ ID NO: 11218 - DNA, 203 bp, Artificial sequence
  synthetic
ggcgcgccagtcctgcccgtgaagtcaataagactgtggtgagagagttcgtcgtcctcggcccgcatattgactacaggctgcagcagctgctctttgttatcttcctgctcctctacctgttcactctgggcaccaatgcaatcatcatttccaccattgtgctggacagagcccttcatactccccgactcggaccgatg

SEQ ID NO: 11219 - DNA, 203 bp, Artificial sequence
  synthetic
ggcgcgccagtcctaaacatacagtcaataagactgtggtgagagagttcgtcgtcctcggcttctcatccctggccaggctgcagcagctgctctttgttatcttcctgctcctctacctgttcactctgggcaccaatgcaatcatcatttccaccattgtgctggacagagcccttcatactccccgactcggaccgatg

SEQ ID NO: 11220 - DNA, 203 bp, Artificial sequence
  synthetic
ggcgcgccagtccttgacgggcagtcaataagactgtggtgagagagttcgtcgtcctcggcttctcatccctggccaggctgcagcagctgctctttgttatcttcctgctcctctacctgttcactctgggcaccaatgcaatcatcatttccaccattgtgctggacagaggaaccgtattggatcgactcggaccgatg

SEQ ID NO: 11221 - DNA, 203 bp, Artificial sequence
  synthetic
ggcgcgccagtcctgacaaaccagtcaataagactgtggtgagagagttcgtcgtcctcggcttctcatccctggccaggctgcagcagctgctctttgttatcttcctgctcctctattgcgaattcgctagcaccaatgcaatcatcatttccaccattgtgctggacagagcccttcatactccccgactcggaccgatg

SEQ ID NO: 11222 - DNA, 203 bp, Artificial sequence
  synthetic
ggcgcgccagtcctctcgttgtagtcaataagactgtggtgagagagttcgtcgtcctcggcttctcatccctggctgacggttcaagcgtgctctttgttatcttcctgctcctctacctgttcactctgggcaccaatgcaatcatcatttccaccattgtgctggacagagcccttcatactccccgactcggaccgatg

SEQ ID NO: 11223 - DNA, 203 bp, Artificial sequence
  synthetic
ggcgcgccagtccttcagaagaagtcaggctattaggaaatctgctcggtccccggcagccgccgcttcccctttgatgttttggtacgccgtgcgcatgcgcctcacattagaattactgcactgggcagactaagttggatctcctctcttcagtgaaaccctcaattccatcaaaaactaaagggcgactcggaccgatg

SEQ ID NO: 11224 - DNA, 203 bp, Artificial sequence
  synthetic
ggcgcgccagtcctgtttggacagtcaggtggagcgaggctagctggcccgatttctcctccgggtgatgcttttcctagattattctctgatttggtcgtattgggcgcctggtcaccagggctgcttttaactctggtaaagtgagggcacagttatccaatgaccccttcattgacctcaactaccgactcggaccgatg

SEQ ID NO: 11225 - DNA, 203 bp, Artificial sequence
  synthetic
ggcgcgccagtcctatggacgcagtcaggtggagcgaggctagctggcccgatttctcctccgggtgatgcttttcctagattattctctgatttggtcgtattgggcgcctggtcaccagggctgcttttaactctggtaaagtggatattgttgccatcaatgaccccttcacatctacgccggtgcgactcggaccgatg

SEQ ID NO: 11226 - DNA, 203 bp, Artificial sequence
  synthetic
ggcgcgccagtcctggctttcaagtcaggtggagcgaggctagctggcccgatttctcctccgggtgatgcttttcctagattattctctgatttggtcgtattgggcgcctggtcaccagggctgcttttaactctggtaaagtggatattgttgccatcaatgaccccttcattgacctcaactaccgactcggaccgatg

SEQ ID NO: 11227 - DNA, 203 bp, Artificial sequence
  synthetic
ggcgcgccagtcctggcggtgtagtcaggtggagcgaggctagctggcccgatttctcctccgggtgatgcttttcctagattattctctgatttggtcgtattgggcgcctggtcaccagggctgcttttaactctggtaaagtgttcggaaacagtcccaatgaccccttcattgacctcaactaccgactcggaccgatg

SEQ ID NO: 11228 - DNA, 203 bp, Artificial sequence
  synthetic
ggcgcgccagtcctgtttccaaagtcaggtggagcgaggctagctggcccgatttctcctccgggtgatgcttttcctagattattctctgatttggtcgtattgggcgcctggtcaccagggctgcttttaggaggctgtctccagatattgttgccatcaatgaccccttcattgacctcaactaccgactcggaccgatg

SEQ ID NO: 11229 - DNA, 203 bp, Artificial sequence
  synthetic
ggcgcgccagtccttgcgtatcagtcaggtggagcgaggctagctggcccgatttctcctccgggtgatgcttttcctagattattctctgatttggtcgtattgggcgcctggtcaccagggctgcttttatgcactaagcttgagatattgttgccatcaatgaccccttcattgacctcaactaccgactcggaccgatg

SEQ ID NO: 11230 - DNA, 203 bp, Artificial sequence
  synthetic
ggcgcgccagtcctttgctttaagtcaggtggagcgaggctagctggcccgatttctcctccgggtgatgcttttcctagattattctctgatttggtcgtattgggcgcctggtcacggtaaagcagccgcactctggtaaagtggatattgttgccatcaatgaccccttcattgacctcaactaccgactcggaccgatg

SEQ ID NO: 11231 - DNA, 203 bp, Artificial sequence
  synthetic
ggcgcgccagtcctactaatcgagtcaggtggagcgaggctagctggcccgatttctcctcctaaacgccggaagtctagattattctctgatttggtcgtattgggcgcctggtcaccagggctgcttttaactctggtaaagtggatattgttgccatcaatgaccccttcattgacctcaactaccgactcggaccgatg

SEQ ID NO: 11232 - DNA, 203 bp, Artificial sequence
  synthetic
ggcgcgccagtccttcggatacagtcagttccaagacgaggtaaacaacaaactcattcgccgagtttctaaacaagacatattcgagtgactcataagaagttgaataacaaaatgccggaaatctacggattgtgtatatccatcatgaaaaaaactaacacccctcctttcgaaccaccccaaaccgactcggaccgatg

SEQ ID NO: 11233 - DNA, 203 bp, Artificial sequence
  synthetic
ggcgcgccagtcctgcgttaccagtcagttccaatcatcaagctcgtccaaactcattcgccgagtttctaaacaaagtcagaatcgtccactcataagaagttgaataacaaaatgccggaaatctacggattgtgtatatccatcatgaaaaaaactaacacccctcctttcgaaccaccccaaaccgactcggaccgatg

SEQ ID NO: 11234 - DNA, 203 bp, Artificial sequence
  synthetic
ggcgcgccagtcctaactatcgagtcagttccaatcatcaagctcgtccaaactcattcgccgagtttctaaacaagacatattcgagtgactcataagaagttcttacgagcctacgcggaaatctacggattgtgtatatccatcatgaaaaaaactaacacccctcctttcgaaccaccccaaaccgactcggaccgatg

SEQ ID NO: 11235 - DNA, 203 bp, Artificial sequence
  synthetic
ggcgcgccagtcctgcctggtcagtcagttccaatcatcaagctcgtccaaactcattcgccgagtttctaaacaagacatattcgagtgactcataagaagttgaataacaaaatgcaatcttgagctctgttgtgtatatccatcatgaaaaaaactaacacccctcctttcgaaccaccccaaaccgactcggaccgatg

SEQ ID NO: 11236 - DNA, 203 bp, Artificial sequence
  synthetic
ggcgcgccagtcctaagtctgaagtcagttccaatcatcaagctcgtccaaactcattcgccgagtttctaaacaagacatattcgagtgactcataagaagttgaataacaaaatgccggaaatctacggattgtgtatatccatatcctggttcctgcacacccctcctttcgaaccaccccaaaccgactcggaccgatg

SEQ ID NO: 11237 - DNA, 203 bp, Artificial sequence
  synthetic
ggcgcgccagtcctatcaagagagtcagttccaatcatcaagctcgtccaaactcattcgccgagtttctaaacaagacatattcgagtgcacgccggatccaagaataacaaaatgccggaaatctacggattgtgtatatccatcatgaaaaaaactaacacccctcctttcgaaccaccccaaaccgactcggaccgatg

SEQ ID NO: 11238 - DNA, 203 bp, Artificial sequence
  synthetic
ggcgcgccagtcctctgcaataagtccgattggggctgcgcgcttcgcttctgcggctcagcctccagcccaggtggcgctgtggaccctgcagccgcggagcgaggcagcggggcggctccgtgaccacggcgggcggagcctagtggacctacgacgtgctgctgtggccgtggctgttcgcgaggcgactcggaccgatg

SEQ ID NO: 11239 - DNA, 203 bp, Artificial sequence
  synthetic
ggcgcgccagtcctacttcgaaagtccgattggggctgcgcgcttcgcttctgcggctcagcgagagtgttcttccgcgctgtggaccctgcagccgcggagcgaggcagcggggcggctccgtgaccacggcgggcggagcctaggactgagggcgatggctgctgtggccgtggctgttcgcgaggcgactcggaccgatg

SEQ ID NO: 11240 - DNA, 203 bp, Artificial sequence
  synthetic
ggcgcgccagtccttcttcacgagtccgtaagttaagctaggccagctcctcccactgcctcccttcctctttctcctcctcttactcctttccagccagaccttggctgtctacaggatgggggacaccctgagccccggacatggcaaccacagagagagcagcccttttctttcccccttggaggcgactcggaccgatg

SEQ ID NO: 11241 - DNA, 203 bp, Artificial sequence
  synthetic
ggcgcgccagtccttgcaggacagtcggagctctatggaggtggcagcaacagagagaactaggctgcagcagcgactcctctgagctgagtttgaggccgtccccgactccttcctcccccttccctcccccttttttttgttttccgttcccctttcccctcccttccctatccccgacgaccggacgactcggaccgatg

SEQ ID NO: 11242 - DNA, 203 bp, Artificial sequence
  synthetic
ggcgcgccagtcctcaatgggtagtcggagctctatggaggtggcagcgggtaccgagtggcggctgcagcagcgaaggtatacgatgctgtttgaggccgtccccgactccttcctcccccttccctcccccttttttttgttttccgttcccctttcccctcccttccctatccccgacgaccggacgactcggaccgatg

SEQ ID NO: 11243 - DNA, 203 bp, Artificial sequence
  synthetic
ggcgcgccagtcctgattcgccagtcggagctctatggaggtggcagcgggtaccgagtggcggctgcagcagcgactcctctgagctgagtttgaggccgtccatagtcagagatggccccttccctcccccttttttttgttttccgttcccctttcccctcccttccctatccccgacgaccggacgactcggaccgatg

SEQ ID NO: 11244 - DNA, 203 bp, Artificial sequence
  synthetic
ggcgcgccagtcctcgatagatagtcggagctctatggaggtggcagcgggtaccgagtggcggctgcagcagcgactcctctgagctgagtttgaggccgtccccgactccttcctcccccttccctcccccttttttttgttttccgttcccctttcccctcccttccctattatgtcaatgtactcgactcggaccgatg

SEQ ID NO: 11245 - DNA, 203 bp, Artificial sequence
  synthetic
ggcgcgccagtcctttcatcgcagtcggagctctatggaggtggcagcgggtaccgagtggcggctgcagcagcgactcctctgagctgagtttgaggccgtccccgactccttcctcccccttccctcccccttttttttgttttggacattgagccaacctcccttccctatccccgacgaccggacgactcggaccgatg

SEQ ID NO: 11246 - DNA, 203 bp, Artificial sequence
  synthetic
ggcgcgccagtcctaccaactgagtcggagctctatggaggtggcagcgggtaccgagtggcggctgcagcagcgactcctctgagctgagtttgaggccgtccccgactccttcctcccccttccctccccgcgggaacgcacacccgttcccctttcccctcccttccctatccccgacgaccggacgactcggaccgatg

SEQ ID NO: 11247 - DNA, 203 bp, Artificial sequence
  synthetic
ggcgcgccagtcctaggtaactagtcggagctctccatgccaccattagggtaccgagtggcggctgcagcagcgactcctctgagctgagtttgaggccgtccccgactccttcctcccccttccctcccccttttttttgttttccgttcccctttcccctcccttccctatccccgacgaccggacgactcggaccgatg

SEQ ID NO: 11248 - DNA, 203 bp, Artificial sequence
  synthetic
ggcgcgccagtcctaatcacttagtctgacagagtgctgtgatatctggggctcctgctgctatagctggatttgcagctttactgcaaactgtgactggtgtgagcgctgttgctcaagtggggtatagattttttagtgactgggatcacaaagtttctactgttggtttatatcaacaaccaggacgactcggaccgatg

SEQ ID NO: 11249 - DNA, 203 bp, Artificial sequence
  synthetic
ggcgcgccagtccttgtttaacagtgacgtcataccggttttacacacgtatccgtggcagcggccgtggcaggctggctgggtaccggctgtcgctgacccaggagaagctgcctgtctacatcagcctgggctgcagcgcgctgccgccgcggggccggcagccatggccaaggacatcctgggtgcgactcggaccgatg

SEQ ID NO: 11250 - DNA, 203 bp, Artificial sequence
  synthetic
ggcgcgccagtccttgaaccacagtgacgtcataggtaaacaggctctgtatccgtggcagcggccgtggcaggctggctgggtaccggctgtcgctgacccaggagaagctgcctgtctacatcagcctggcaaaactttgctctccgccgcggggccggcagccatggccaaggacatcctgggtgcgactcggaccgatg

SEQ ID NO: 11251 - DNA, 203 bp, Artificial sequence
  synthetic
ggcgcgccagtcctttaccacaagtgacgtcataggtaaacaggctctgtatccgtggcagcggccgtggcaggctggctgggtaccggctgtcgctgacccaggagaagctgcctgtctacatcagcctgggctgcagcgcgctgccgccgcggggccggcagccatggccaaaccttattactaaccgactcggaccgatg

SEQ ID NO: 11252 - DNA, 203 bp, Artificial sequence
  synthetic
ggcgcgccagtccttagccgccagtgacgtcataggtaaacaggctctgtatccgtggcagcggccgtggcaggctggctgggtaccggctgtcgctgacccaggagaagctgcctgtctacatcagcctgggctgcagcgcgctgttcggtatactggagcagccatggccaaggacatcctgggtgcgactcggaccgatg

SEQ ID NO: 11253 - DNA, 203 bp, Artificial sequence
  synthetic
ggcgcgccagtcctcttactagagtgacgtcataggtaaacaggctctgtatccgtggcagcggccgtggcaggctggctgggtaccggctgtcgctgacccagtttgtataaagctcctacatcagcctgggctgcagcgcgctgccgccgcggggccggcagccatggccaaggacatcctgggtgcgactcggaccgatg

SEQ ID NO: 11254 - DNA, 203 bp, Artificial sequence
  synthetic
ggcgcgccagtcctagttcctcagtgacgtcataggtaaacaggctctgtatccgtggcagcggccgtggcaggctggctgggtcagcatgtgcgctgacccaggagaagctgcctgtctacatcagcctgggctgcagcgcgctgccgccgcggggccggcagccatggccaaggacatcctgggtgcgactcggaccgatg

SEQ ID NO: 11255 - DNA, 203 bp, Artificial sequence
  synthetic
ggcgcgccagtcctagattcgtagtgacgtcataggtaaacaggctctgtatccgtggctaattgataggcaggctggctgggtaccggctgtcgctgacccaggagaagctgcctgtctacatcagcctgggctgcagcgcgctgccgccgcggggccggcagccatggccaaggacatcctgggtgcgactcggaccgatg

SEQ ID NO: 11256 - DNA, 203 bp, Artificial sequence
  synthetic
ggcgcgccagtcctcataagcgagtgactagctatttcttctgtaaccacaggttcggtggtgagaggaagcctcgcagaatccagcagaatcctcacagaatccagcagcagctctgctggggacatggtccatggtgcaacccacagcaaagccctgacctgacctcctgatgctcaggagaagcccgactcggaccgatg

SEQ ID NO: 11257 - DNA, 203 bp, Artificial sequence
  synthetic
ggcgcgccagtcctcaggtacaagtgactcccgtgccattggactcggccagagcgaacctgtgcggctgcaggcaccggcgcgtcgagtttccggcgtccggaaggaccgagctcttctcgcggatccagtgttccgtttccagcccccaatctcagagcggagccgacagagagcagggaaccggccgactcggaccgatg

SEQ ID NO: 11258 - DNA, 203 bp, Artificial sequence
  synthetic
ggcgcgccagtccttggagtagagtgagcgacacactctgcgtcctcgcctcaccagatggagaggagaaaacctatggtggctgtgaagagatactatggtactatgtcaaattgatatcatctgatggccatgaatttattgtaaaaagagaacatgcattaacatcaggcacgataaaagccatgcgactcggaccgatg

SEQ ID NO: 11259 - DNA, 203 bp, Artificial sequence
  synthetic
ggcgcgccagtcctgtcgtcaaagtgagcgacacactctgcgtcctcgcctcaccagatggagaggagaaaacctatggtggctgtgaaggacctgatgccatgtatgtcaaattgatatcatctgatggccatgaatttattgtaaaaagagaacatgccacgttgaacactgcgataaaagccatgcgactcggaccgatg

SEQ ID NO: 11260 - DNA, 203 bp, Artificial sequence
  synthetic
ggcgcgccagtcctcagacccaagtgagcgacacactctgcgtcctcgcctcaccagatggagaggagaaaacctatggtggctgtgaaggacctgatgccatgtatgtcaaattgatatcatctgatggcctgtctcagtcatcgaaaagagaacatgcattaacatcaggcacgataaaagccatgcgactcggaccgatg

SEQ ID NO: 11261 - DNA, 203 bp, Artificial sequence
  synthetic
ggcgcgccagtcctctactgcgagtgagcgacacactctgcgtcctcgtgcatgtcctgtaggaggagaaaacctatggtggctgtgaaggacctgatgccatgtatgtcaaattgatatcatctgatggccatgaatttattgtaaaaagagaacatgcattaacatcaggcacgataaaagccatgcgactcggaccgatg

SEQ ID NO: 11262 - DNA, 203 bp, Artificial sequence
  synthetic
ggcgcgccagtccttacataacagtgagcgacacctcaaaatgttcttcctcaccagatggagaggagaaaacctatggtggctgtgaaggacctgatgccatgtatgtcaaattgatatcatctgatggccatgaatttattgtaaaaagagaacatgcattaacatcaggcacgataaaagccatgcgactcggaccgatg

SEQ ID NO: 11263 - DNA, 203 bp, Artificial sequence
  synthetic
ggcgcgccagtcctacgcgggaagtggcggcttcgatgacctctggtacagccgcttccctgtgctgtgagtgtttccaccactccaggagacagcattcagagttgaccttgtgagagctggccataatttaattccatctctaggttttctgtcttattgtttcagaggcacatcgagaaccaacccgactcggaccgatg

SEQ ID NO: 11264 - DNA, 203 bp, Artificial sequence
  synthetic
ggcgcgccagtcctccgccatgagtggcggcttctccatgggtccagccagccgcttccctgccacagataaagacccaccactccaggagacagcattcagagttgaccttgtgagagctggccataatttaattccatctctaggttttctgtcttattgtttcagaggcacatcgagaaccaacccgactcggaccgatg

SEQ ID NO: 11265 - DNA, 203 bp, Artificial sequence
  synthetic
ggcgcgccagtcctaatggtcgagtggcggcttctccatgggtccagccagccgcttccctgtgctgtgagtgtttaagggggaggctccgacagcattcagagttgaccttgtgagagctggccataatttaattccatctctaggttttctgtcttattgtttcagaggcacatcgagaaccaacccgactcggaccgatg

SEQ ID NO: 11266 - DNA, 203 bp, Artificial sequence
  synthetic
ggcgcgccagtcctgaatgttaagtggcggcttctccatgggtccagccagccgcttccctgtgctgtgagtgtttccaccactccaggagacagcattcagaggaagaagcagtctcgctggccataatttaattccatctctaggttttctgtcttattgtttcagaggcacatcgagaaccaacccgactcggaccgatg

SEQ ID NO: 11267 - DNA, 203 bp, Artificial sequence
  synthetic
ggcgcgccagtccttgggcaacagtggcggcttctccatgggtccagccagccgcttccctgtgctgtgagtgtttccaccactccaggagacagcattcagagttgaccttgtgagagctggccataatttaattccatctctaggttttctgtcttattgtttcagaggcaccagctcctattgtacgactcggaccgatg

SEQ ID NO: 11268 - DNA, 203 bp, Artificial sequence
  synthetic
ggcgcgccagtccttggtgtccagtggcggcttctccatgggtccagccagccgcttccctgtgctgtgagtgtttccaccactccaggattacattacgtcctttgaccttgtgagagctggccataatttaattccatctctaggttttctgtcttattgtttcagaggcacatcgagaaccaacccgactcggaccgatg

SEQ ID NO: 11269 - DNA, 203 bp, Artificial sequence
  synthetic
ggcgcgccagtcctactccagcagtggcttactcagttacttgacacgttggagctgtgaggtgttcagcattatttaagatcacctatgcatcatctgaagccacagtcccaggtcatcttcatcaccttccccagtggaatgcctcctgtgttaaagcccacaacaacccctgtggaggaacaacccgactcggaccgatg

SEQ ID NO: 11270 - DNA, 203 bp, Artificial sequence
  synthetic
ggcgcgccagtcctgcacgatgagtggcttactcccggtgccaggttcttggagctgtgaggtgttcagcattattagctgcgcttacgacatcatctgaagccacagtcccaggtcatcttcatcaccttccccagtggaatgcctcctgtgttaaagcccacaacaacccctgtggaggaacaacccgactcggaccgatg

SEQ ID NO: 11271 - DNA, 203 bp, Artificial sequence
  synthetic
ggcgcgccagtcctaccacatcagtggcttactcccggtgccaggttcttggagctgtgaggtgttcagcattatttaagatcacctatgcatcatctgaagccacagtcccaggtcatcttcatcaccttccccagtggaatgcctcctgtgttaaagcccacaacaacccctgtggaggaacaacccgactcggaccgatg

SEQ ID NO: 11272 - DNA, 203 bp, Artificial sequence
  synthetic
ggcgcgccagtcctcgtttgttagttcagataggcccgccagctcgcctcggggaacaggacgcgcgtgagctcaggcgtccccgccccagcttttctcggaaccatgaaccccaactgcgcccggtgcggcaagatcgtgtatcccacggagaaggtgaactgtctggataagttctggcataaagccgactcggaccgatg

SEQ ID NO: 11273 - DNA, 203 bp, Artificial sequence
  synthetic
ggcgcgccagtcctaaatggcaagttcagctgagagatataaaagagcagtctttccagcacaccaggcaaagccacggcgggcactgacgggcacttgcaccgtgtggacagactctccggttctggggaaatccagtccctgttactccattttggccagaaattcaaggatactgtcatgaagcacgactcggaccgatg

SEQ ID NO: 11274 - DNA, 203 bp, Artificial sequence
  synthetic
ggcgcgccagtcctactctgttagttcagctgagagatataaaagagcagtctttccagcacctgcaaatccagagcggcgggcactgacgggcacttgcaccggaccccgctggcagccggttctggggaaatccagtccctgttactccattttggccagaaattcaaggatactgtcatgaagcacgactcggaccgatg

SEQ ID NO: 11275 - DNA, 203 bp, Artificial sequence
  synthetic
ggcgcgccagtcctctcttctaagttcagctgagagatataaaagagcagtctttccagcacctgcaaatccagagcggcgggcactgacgggcacttgcaccgtgtggacagactctccgggaagacaaccttccagtccctgttactccattttggccagaaattcaaggatactgtcatgaagcacgactcggaccgatg

SEQ ID NO: 11276 - DNA, 203 bp, Artificial sequence
  synthetic
ggcgcgccagtcctccaattaaagttcagctgagagatataaaagagcagtctttccagcacctgcaaatccagagcggcgggcactgacgggcacttgcaccgtgtggacagactctccggttctggggaaatccagtccctgttactccattttggccttctgcaacgattgactgtcatgaagcacgactcggaccgatg

SEQ ID NO: 11277 - DNA, 203 bp, Artificial sequence
  synthetic
ggcgcgccagtcctaatattctagttcagctgagagatataaaagagcagtctttccagcacctgcaaatccagagcggcgggcactgacgggcacttgcaccgtgtggacagactctgaatccacttcacgatccagtccctgttactccattttggccagaaattcaaggatactgtcatgaagcacgactcggaccgatg

SEQ ID NO: 11278 - DNA, 203 bp, Artificial sequence
  synthetic
ggcgcgccagtcctggcacggaagttcatccacaaacggagctttgtaatctcggattgtaaaaaatttctagacagactttagtgacttctgatctaagaacctccaccagggctgagggagctcaagtttcagcctgaggcatgggccaggaggccatggtgacctgagacccgtggattctgtcccgactcggaccgatg

SEQ ID NO: 11279 - DNA, 203 bp, Artificial sequence
  synthetic
ggcgcgccagtcctactggtttagttcatccacaaacggagctttgtaatctcggattgtaagggccaagcttgtgcctcccgtctggccctgatctaagaacctccaccagggctgagggagctcaagtttcagcctgaggcatgggccaggaggccatggtgacctgagacccgtggattctgtcccgactcggaccgatg

SEQ ID NO: 11280 - DNA, 203 bp, Artificial sequence
  synthetic
ggcgcgccagtccttgtaagagagttcatccacaaacggagctttgtaatctcggattgtaagggccaagcttgtggactttagtgacttctgatctaagaacctccaccagggctgagggagctcaagtttcagcctgaggcatgggccaggaggccataacagtaatgtcttcgtggattctgtcccgactcggaccgatg

SEQ ID NO: 11281 - DNA, 203 bp, Artificial sequence
  synthetic
ggcgcgccagtcctccacccttagttcatccacaaacggagctttgtaatctcggattgtaagggccaagcttgtggactttagtgactttcccctgctaggagtccaccagggctgagggagctcaagtttcagcctgaggcatgggccaggaggccatggtgacctgagacccgtggattctgtcccgactcggaccgatg

SEQ ID NO: 11282 - DNA, 203 bp, Artificial sequence
  synthetic
ggcgcgccagtccttaataggcagttcatccacaaacggagctttgtagcaggacgcctgcggggccaagcttgtggactttagtgacttctgatctaagaacctccaccagggctgagggagctcaagtttcagcctgaggcatgggccaggaggccatggtgacctgagacccgtggattctgtcccgactcggaccgatg

SEQ ID NO: 11283 - DNA, 203 bp, Artificial sequence
  synthetic
ggcgcgccagtcctggtgtacgagttctcggtctagctctagtgcccacaagaaaacagctggtttactggtcactaggcagcggaacccccctcctggtaacaggagcctctgcggccaaaagccacgtggataagatccacctttgtgtgcggtgcaaccccagcaccctggtttcttggtgacaccgactcggaccgatg

SEQ ID NO: 11284 - DNA, 203 bp, Artificial sequence
  synthetic
ggcgcgccagtcctgtggcgatagttctcggtctagctctagtgcccacaagaaaacagctgtagcgaccacacaaaggcagcggaacccccctcctggtaacaggagcctctgcggccaaaagccacgtggataagatccacctttgtgtgcggtgcaaccccagcaccctggagggaatacaggttcgactcggaccgatg

SEQ ID NO: 11285 - DNA, 203 bp, Artificial sequence
  synthetic
ggcgcgccagtcctcgctgtagagttctcggtctagctctagtgcccacaagaaaacagctgtagcgaccacacaataaggtttcccgttccctcctggtaacaggagcctctgcggccaaaagccacgtggataagatccacctttgtgtgcggtgcaaccccagcaccctggtttcttggtgacaccgactcggaccgatg

SEQ ID NO: 11286 - DNA, 203 bp, Artificial sequence
  synthetic
ggcgcgccagtcctacccaagtagttctcggtctgcgcgatcccagaccaagaaaacagctgtagcgaccacacaaaggcagcggaacccccctcctggtaacaggagcctctgcggccaaaagccacgtggataagatccacctttgtgtgcggtgcaaccccagcaccctggtttcttggtgacaccgactcggaccgatg

SEQ ID NO: 11287 - DNA, 203 bp, Artificial sequence
  synthetic
ggcgcgccagtccttatgtactagttgtgaacagacatctcgagtaagattgagctacatgagagtcctccggcccctgaatgcggctaatcctaaccatggagcaggcagctgcaacccagcagccagcctgtcgtaacgcgcaagtccgtggcggaaccgactactttgggtgtccgtgtttccttcgactcggaccgatg

SEQ ID NO: 11288 - DNA, 203 bp, Artificial sequence
  synthetic
ggcgcgccagtcctggaagaacagttgtgaacagggtgtgaagagcctattgagctacatgagagtcctccggcccctgaatgcggctaaaaggtggagatacccaggcagctgcaacccagcagccagcctgtcgtaacgcgcaagtccgtggcggaaccgactactttgggtgtccgtgtttccttcgactcggaccgatg

SEQ ID NO: 11289 - DNA, 203 bp, Artificial sequence
  synthetic
ggcgcgccagtcctagctacaaagttgtgaacagggtgtgaagagcctattgagctacatgagagtcctccggcccctgaatgcggctaatcctaaccatggagcaggcagctgcaacccagcagccagcctagaccctatatggggtccgtggcggaaccgactactttgggtgtccgtgtttccttcgactcggaccgatg

SEQ ID NO: 11290 - DNA, 203 bp, Artificial sequence
  synthetic
ggcgcgccagtcctgaaacataagttgtgaacagggtgtgaagagcctattgagctacatgagagtcctccggcccctgaatgcggctaatcctaaccatggagcaggcagctgcaacccagcagccagcctgtcgtaacgcgcaagtccgtggcggaaccgactactttgggtgtccgtgtttccttcgactcggaccgatg

SEQ ID NO: 11291 - DNA, 203 bp, Artificial sequence
  synthetic
ggcgcgccagtcctacaatacaagttgtgaacagggtgtgaagagccttcgttcggctccccgagtcctccggcccctgaatgcggctaatcctaaccatggagcaggcagctgcaacccagcagccagcctgtcgtaacgcgcaagtccgtggcggaaccgactactttgggtgtccgtgtttccttcgactcggaccgatg

SEQ ID NO: 11292 - DNA, 203 bp, Artificial sequence
  synthetic
ggcgcgccagtcctagtagttcataaaaaacccagtctttgctgaccagacaaagcataccagatctcaccagagagtcctaggggactacagaaggaaaaagaattccaagctcttaatatctgtgtgtcctcccgctgaccacacttcctttagtgacccgattgcctcctcaagtcgcagacactcgactcggaccgatg

SEQ ID NO: 11293 - DNA, 203 bp, Artificial sequence
  synthetic
ggcgcgccagtcctccggtgtaataaaaaacccagtctttgctgaccagacaaagcataccagatctcaccagagagtcctaggggactacagaaggaaaaagacaagaggcagtaggatatctgtgtgtcctcccgctgaccacacttcctttagtgactgagcatatgttagaagtcgcagacactcgactcggaccgatg

SEQ ID NO: 11294 - DNA, 203 bp, Artificial sequence
  synthetic
ggcgcgccagtcctgcgacagcataaactatgtgattccaagtgaagtcctactgactcgcctcttgatcgggctatacaacatctgcagagacttactatccaagaactccccgacccgccgactgatctcccagagtctaacagcaatcagggactggctgagacttaaggcggcccaactgcaatcgactcggaccgatg

SEQ ID NO: 11295 - DNA, 203 bp, Artificial sequence
  synthetic
ggcgcgccagtcctcacggatgataaactatgtgcagttcctgatccacctactgactcgcctcttgatcgggctagttgcagctactccagacttactatccaagaactccccgacccgccgactgatctcccagagtctaacagcaatcagggactggctgagacttaaggcggcccaactgcaatcgactcggaccgatg

SEQ ID NO: 11296 - DNA, 203 bp, Artificial sequence
  synthetic
ggcgcgccagtcctacttgggtataaactatgtgcagttcctgatccacctactgactcgcctcttgatcgggctatacaacatctgcagagacttactatccaagaactccccgacccgccgactgatctcccagagtctaacagcaatcagggactggagtttgggggtacgggcccaactgcaatcgactcggaccgatg

SEQ ID NO: 11297 - DNA, 203 bp, Artificial sequence
  synthetic
ggcgcgccagtcctcgacacagataaactatgtgcagttcctgatccacctactgactcgcctcttgatcgggctatacaacatctgcagagacttactatccaagaactccccgacccgccgactgatctcccagagtctaacagcaatcagggactggctgagacttaaggcaaggggctatgttgcgactcggaccgatg

SEQ ID NO: 11298 - DNA, 203 bp, Artificial sequence
  synthetic
ggcgcgccagtcctcgacatttataaactatgtgcagttcctgatccacctactgactcgcctcttgatcgggctatacaacatctgcagagacttactatccaagaactccccgacccgccgactgatctcccagagtctaacagcaatcagggactggctgagacttaaggcggcccaactgcaatcgactcggaccgatg

SEQ ID NO: 11299 - DNA, 203 bp, Artificial sequence
  synthetic
ggcgcgccagtccttcaccgctataaactatgtgcagttcctgatccagggtaccgtaatattcttgatcgggctatacaacatctgcagagacttactatccaagaactccccgacccgccgactgatctcccagagtctaacagcaatcagggactggctgagacttaaggcggcccaactgcaatcgactcggaccgatg

SEQ ID NO: 11300 - DNA, 203 bp, Artificial sequence
  synthetic
ggcgcgccagtcctcgaacactataaatgccccttggaaaaggtttgggtaagggaggagctaagcgtcatcgcaaggttttgcgcgataacatccagggcatcactaagccagctatccggcgccttgctcgtcgcggcggtgtcaagcgaatttctggccttatctatgaggagactcgtggtgttcgactcggaccgatg

SEQ ID NO: 11301 - DNA, 203 bp, Artificial sequence
  synthetic
ggcgcgccagtcctcaaagtcgataagtaagccgtgccgaaacgttaagtacgtatacagcacgtaacaactgttagtttaattttccaaaatttatttttcacaatttttagttaagattttagcttgccttaagcagtctttatatcttctgtatattattttaaagtttataggagcaaagttcgcgactcggaccgatg

SEQ ID NO: 11302 - DNA, 203 bp, Artificial sequence
  synthetic
ggcgcgccagtcctcgcgtggaataagtaagccgtgccgaaacgttaatcggtcgctagttgcgtaacaactgttagtttaattttccaaaatttatttttcacaatttttagttaagattttagcttgcctgtccactcgacctgatcttctgtatattattttaaagtttataggagcaaagttcgcgactcggaccgatg

SEQ ID NO: 11303 - DNA, 203 bp, Artificial sequence
  synthetic
ggcgcgccagtccttcaggacgataagtaagccgtgccgaaacgttaatcggtcgctagttgcgtaacaactgttagtttaattttccaaaatttatttttcacggccgcccaacggaattttagcttgccttaagcagtctttatatcttctgtatattattttaaagtttataggagcaaagttcgcgactcggaccgatg

SEQ ID NO: 11304 - DNA, 203 bp, Artificial sequence
  synthetic
ggcgcgccagtcctagcctgggataatgggctgtgtgcaatgtaaggataaagaagcaacaaaactgacggaggagagggacggcagcctgaaccagagctctgccaggttaatacaaacagaccccacccctcagcactaccccagcttcggtgtgacctccatccccaactacaacaacttccacgcgactcggaccgatg

SEQ ID NO: 11305 - DNA, 203 bp, Artificial sequence
  synthetic
ggcgcgccagtcctaggagtgtataatgggctgtgtgcaatgtaaggataaagaagcaacaaaactgacggaggagagggacggcagcctgaaccagagctctgggtaccgctatggcacagaccccaccccgtgcactaggatatgcttcggtgtgacctccatccccaactacaacaacttccacgcgactcggaccgatg

SEQ ID NO: 11306 - DNA, 203 bp, Artificial sequence
  synthetic
ggcgcgccagtcctctccaaccataatgggctgtgtgcaatgtaaggataaagaagcaacaaaactgacggaggagagggacggcagcctgaaccagagctctgggtaccgctatggccgttctagtttggttcagcactaccccagcttcggtgtgacctccatccccaactacaacaacttccacgcgactcggaccgatg

SEQ ID NO: 11307 - DNA, 203 bp, Artificial sequence
  synthetic
ggcgcgccagtccttagagcgcataatgggctgtgtgcaatgtaaggataaagaagcaacaatctgagacacatgtagggacggcagcctgaaccagagctctgggtaccgctatggcacagaccccacccctcagcactaccccagcttcggtgtgacctccatccccaactacaacaacttccacgcgactcggaccgatg

SEQ ID NO: 11308 - DNA, 203 bp, Artificial sequence
  synthetic
ggcgcgccagtcctggtccgtgatacacggtttgtcccccccttccccttccccggggtctgggggtgacattgcaccgcgcccctcgtggggtcgcgttgccaccccacgcggactccccagctcgcgcgcccctcccatttgcctgtcctggtcaggcccccaccccccttcccacctgaccagcccgactcggaccgatg

SEQ ID NO: 11309 - DNA, 203 bp, Artificial sequence
  synthetic
ggcgcgccagtccttcacgcatatacttggaaaaacccacatagcattaaaaacaaagtactactgaacaaagtgataaatacattttctccgtcacgatggccctaaccacaggaacatttaaacttacaatagaattcactgaagaatatccaaataaaccacctacagttagatttgtctctaagcgactcggaccgatg

SEQ ID NO: 11310 - DNA, 203 bp, Artificial sequence
  synthetic
ggcgcgccagtcctttagccgaatatcaggctcttgaagagcctattgagctagctggtagtcctccggcccctgaatgcggctaatcctaactgcggagcacatgctcacaaaccagtgggtggtgtgtcgtaacgggcaactctgcagcggaaccgactactttgggtgtccgtgtttccttttatcgactcggaccgatg

SEQ ID NO: 11311 - DNA, 203 bp, Artificial sequence
  synthetic
ggcgcgccagtcctgcgcatgcatattttaggccagaggttaataagaaggaagtagtgctatcttaataattaggttaactatttagttttactgttcaggatgcctattggcagccccataatatccaggacaccctctctgcttcttatatgattaggttgtcatttagaataagaaaataacctcgactcggaccgatg

SEQ ID NO: 11312 - DNA, 203 bp, Artificial sequence
  synthetic
ggcgcgccagtcctaccagttaatcacccctaaatgtattccaaagaataagaacattgttttatacatagcacacttaacaaaatcaagaaatttaacattaatacagtactgttacctaatccgtagtcgattttcaaattttgtcagttgttccaataatgtcctttatatgactttgaggtgttcgactcggaccgatg

SEQ ID NO: 11313 - DNA, 203 bp, Artificial sequence
  synthetic
ggcgcgccagtcctgtgtttagatcacccctaaatgtattccaaagaataagaacattgttttatacatagcacacttaacaaaatcaagaaatttaacattaatacagtactgttacctaatccgtagtcgattttcaaattttgtcagttgttccaatgccaggtggggacgattccccgcccagccgactcggaccgatg

SEQ ID NO: 11314 - DNA, 203 bp, Artificial sequence
  synthetic
ggcgcgccagtcctctcggccaatcacccctaaatgtattccaaagaataagaacattgttttatacatagcacacttaacaaaatcaagtttcgactgtcccttacagtactgttacctaatccgtagtcgattttcaaattttgtcagttgttccaataatgtcctttatatattccccgcccagccgactcggaccgatg

SEQ ID NO: 11315 - DNA, 203 bp, Artificial sequence
  synthetic
ggcgcgccagtccttccaccatatcaggctcaggttctgaggaagaagaggaggaggaggaagaggaggaggaggaagggagcaccagtgaagaatcagaggaggaagaggaagaggaggaggaggagaccggcagcaactctgagagactcatgagaacgtctgccgaagaagtaagtgaggaagaacgactcggaccgatg

SEQ ID NO: 11316 - DNA, 203 bp, Artificial sequence
  synthetic
ggcgcgccagtcctgttaagccatcaggctcaggttctgaggaagaagaggaggaggaggaagaggaggaggaggaagggagcaccagtgaagaatcagaggaggaagaggaagaggaggaggaggagaccggcagcaactctgaggaggcatcagagcatgagcaacgcagcttaagtgaggaagaacgactcggaccgatg

SEQ ID NO: 11317 - DNA, 203 bp, Artificial sequence
  synthetic
ggcgcgccagtccttgaccgaaatcaggctcaggttctgaggaagaagaggaggaggaggaagaggaggaggaggatactgtacttgcacaagaatcagaggaggaagaggaagaggaggaggaggagaccggcagcaactctgaggaggcatcagagcagtctgccgaagaagtaagtgaggaagaacgactcggaccgatg

SEQ ID NO: 11318 - DNA, 203 bp, Artificial sequence
  synthetic
ggcgcgccagtcctggaggcagatcaggctcaggttctgaggaagaaggacttataagactggaggaggaggaggaagggagcaccagtgaagaatcagaggaggaagaggaagaggaggaggaggagaccggcagcaactctgaggaggcatcagagcagtctgccgaagaagtaagtgaggaagaacgactcggaccgatg

SEQ ID NO: 11319 - DNA, 203 bp, Artificial sequence
  synthetic
ggcgcgccagtcctcttccctgatcagttcaatagtttagttattttaaaatatttgagaataggtaagtttctatggcacttcatagcaataggtaataattaacagcttaattatacactccgttccccataaaatcgtaactatttaatttacaaagtaaaaacaaaaatatgggacaagtagttcgactcggaccgatg

SEQ ID NO: 11320 - DNA, 203 bp, Artificial sequence
  synthetic
ggcgcgccagtcctgtgatacgatcattacattgtccgaggacgtggtgaaggagctgaagaaggctctgtgcaatcctcacattcaagctgataggctgcgctaccggaatgtcatccagcgagtgattagatctggctctcctggccatcaatacgctgtgcaaagactgctcagaccccaatccacgactcggaccgatg

SEQ ID NO: 11321 - DNA, 203 bp, Artificial sequence
  synthetic
ggcgcgccagtcctgacggcggatccacaacatccttcaggtctccggcccacccagccagggcagcgccagcactagctcagacgcaaggacggaaccgctggactccaggttccttgcctgggagtaggagaaatccacctgctgggggctgagtgtggcctgagggacaggccctgggtcccgggcgactcggaccgatg

SEQ ID NO: 11322 - DNA, 203 bp, Artificial sequence
  synthetic
ggcgcgccagtcctcaggaaatatccacaacatctccacatcgctgtccccacccagccaggaatataagctatgcagctcagacgcaaggacggaaccgctggactccaggttccttgcctgggagtaggagaaatccacctgctgggggctgagtgtggcctgagggacaggccctgggtcccgggcgactcggaccgatg

SEQ ID NO: 11323 - DNA, 203 bp, Artificial sequence
  synthetic
ggcgcgccagtccttatgcttcatccacaacatctccacatcgctgtccccacccagccagggcagcgccagcactagctcagacgcaaggacggaaccgctggactccaggttccttgcctgggagtaggagaaatccacctgctgggggctgagtgtgcttgcgttagtcttccctgggtcccgggcgactcggaccgatg

SEQ ID NO: 11324 - DNA, 203 bp, Artificial sequence
  synthetic
ggcgcgccagtcctgtgtgctaatccacaacatctccacatcgctgtccccacccagccagggcagcgccagcactagctcagacgcaaggacggaaccgctggactccaggttccttgcctgggagtaggagaaatccacctgctgggggctgagtgtggcctgagggacaggccctgggtcccgggcgactcggaccgatg

SEQ ID NO: 11325 - DNA, 203 bp, Artificial sequence
  synthetic
ggcgcgccagtcctacttaatgatccacaacatctccacatcgctgtccccacccagccagggcagcgccagcactctgcaccgtatcctgacggaaccgctggactccaggttccttgcctgggagtaggagaaatccacctgctgggggctgagtgtggcctgagggacaggccctgggtcccgggcgactcggaccgatg

SEQ ID NO: 11326 - DNA, 203 bp, Artificial sequence
  synthetic
ggcgcgccagtcctaactcctaatccagacaggactcaccgagtatcaaatgataagaactgtcgcgcaacttcctaataatacttgcactgggagcactaagaaaagattgatctctgggctggtgaacataatctctgtcccagtcagaaaaggagagaggaaattagcagagcgattggtggagacgactcggaccgatg

SEQ ID NO: 11327 - DNA, 203 bp, Artificial sequence
  synthetic
ggcgcgccagtccttattaagtatccatgctctcaggctccgatttgtgaataggtttttatattcgaagtaggtagtattgcgcatactattaattccacaatacgtggtcttcgtcttagcaaatttacctttcgtccctatggaaatggctcttcggacctgagtacagtgggacaaccccaacgcgactcggaccgatg

SEQ ID NO: 11328 - DNA, 203 bp, Artificial sequence
  synthetic
ggcgcgccagtcctgccgccacatccgcagtttaggagagaggaagtaagaagacgcctccgggtaagggacgcccgcctttggggaaaaaccaatgcgcgtactgtaaggaggagggacattggaagaagaactgtccaaaactcgtaagcggggcaaccccagtgttggtagaagaattacaatagcgactcggaccgatg

SEQ ID NO: 11329 - DNA, 203 bp, Artificial sequence
  synthetic
ggcgcgccagtcctatgcgcaaatccgcccaggtagccggctcggacccaggtcctgcgcccaggtcctcccctgccccccagcgacggagccggggccgggggtaattttatgaaacggccatgcgggtgagccgcggctgcagaggcctgagcgcctgatcgccgcggacccgagccgagcccacccgactcggaccgatg

SEQ ID NO: 11330 - DNA, 203 bp, Artificial sequence
  synthetic
ggcgcgccagtcctgaaagctgatccggagtaactaagttggctggtactgccgtaataaatttaagagcagaccagattaatgatatggtttattcccttcttgaaaagggtaaactacttattagagatacaaataaagaagttttcgttggtgacagtttggttaatgtaatctaaactttaaaacgactcggaccgatg

SEQ ID NO: 11331 - DNA, 203 bp, Artificial sequence
  synthetic
ggcgcgccagtcctaatcgaacatctagtctcataagtgaccctccctgggctgctttctttcgattatcatcagtagggaaggtttcagtgctcttcccagcacaactccggtgcaaaggcttgggcatcctggtgctttgcctctagcccatgctccacagcgaggagagagaaaaccctgaggcacgactcggaccgatg

SEQ ID NO: 11332 - DNA, 203 bp, Artificial sequence
  synthetic
ggcgcgccagtcctgggaaatcatctagtctcataagtgaccctccctgggctgctttctttcgattatcatcagtgaccctaccccggctgctcttcccagcacaactccggtgcaaaggcttgggcatcctggtgctttgcctctagcccatgctccacagcgaggagagagaaaaccctgaggcacgactcggaccgatg

SEQ ID NO: 11333 - DNA, 203 bp, Artificial sequence
  synthetic
ggcgcgccagtcctcgaagatgatctagtctcataagtgaccctccctgggctgctttctttcgattatcatcagtgaccctaccccggctgctcttcccagcatcgtggaccacaggaggcttgggcatcctggtgctttgcctctagcccatgctccacagcgaggagagagaaaaccctgaggcacgactcggaccgatg

SEQ ID NO: 11334 - DNA, 203 bp, Artificial sequence
  synthetic
ggcgcgccagtccttcctcttaatctagtctcataagtgaccctcccttacagttacaacagcgattatcatcagtgaccctaccccggctgctcttcccagcacaactccggtgcaaaggcttgggcatcctggtgctttgcctctagcccatgctccacagcgaggagagagaaaaccctgaggcacgactcggaccgatg

SEQ ID NO: 11335 - DNA, 203 bp, Artificial sequence
  synthetic
ggcgcgccagtccttgatggcgatctagtctcatcctgcctatagaaagggctgctttctttcgattatcatcagtgaccctaccccggctgctcttcccagcacaactccggtgcaaaggcttgggcatcctggtgctttgcctctagcccatgctccacagcgaggagagagaaaaccctgaggcacgactcggaccgatg

SEQ ID NO: 11336 - DNA, 203 bp, Artificial sequence
  synthetic
ggcgcgccagtcctggcatgtcatctagtttccttaaattccccccgcaccgaaacgcggtctttctctagacgcgtcttgctgggagagtgtccgttgcttcccgtccgtgtcgcggccctgcggttggcggcctcctcgtggagcggagcaaggccaggcggcccctgctcgagtcccgcgtcgcccgactcggaccgatg

SEQ ID NO: 11337 - DNA, 203 bp, Artificial sequence
  synthetic
ggcgcgccagtcctcttcatcaatctatgcactgtcggcctgttgttgtgaatcgccagacctttgtaacacccggaagtctgaagcatgtgtttgatgatctcagaggctcagtatccttgtcctgggttggagatagcactggggtcattctagtcttgactaccttccatgtaccactggtaattcgactcggaccgatg

SEQ ID NO: 11338 - DNA, 203 bp, Artificial sequence
  synthetic
ggcgcgccagtccttgcgagtaatctcagttctaaaggacgcgactctcccgacgcggggaggctattctgcccatttggggacacttccccgccgctgccaggacccgcttctctgaaaggctctccttgcagctgcttagacgctggatttttttcgggtagtggaaaaccagcagcctcccgcgacgactcggaccgatg

SEQ ID NO: 11339 - DNA, 203 bp, Artificial sequence
  synthetic
ggcgcgccagtcctgttgcctcatctctagcagtggcgcccgaacagggacctgaaagcgaattcatggggtctaaagctctctcgacgcaggactcggcttgctgaagcgcgcacggcaagaggcgaggggcggcgactggtgagtacgccaaaaattttgactagcggaggctagaaggagagagacgactcggaccgatg

SEQ ID NO: 11340 - DNA, 203 bp, Artificial sequence
  synthetic
ggcgcgccagtcctcggattcaatctctgtgcaccaaccggctggggtccttgcgcgccgcggctcagggaggagcaccgactgcgccgcgtaagtgccgcctgccctgcgtgggtcgtgccagctcagcgggacaggtcctcgcctcggtccctcggacttagggagcgcggggcagaccctgagagcgactcggaccgatg

SEQ ID NO: 11341 - DNA, 203 bp, Artificial sequence
  synthetic
ggcgcgccagtcctatgcatttatctgagaatagaaccacaatcaagtcatactactagtcactatacaataatcaacaattttagtcaactgattaccaagatgttatcataggtccgaactgatcaatctaacaaaaaaactaaacgttccacaataagctgcacactgctacaaaatattcagcccgactcggaccgatg

SEQ ID NO: 11342 - DNA, 203 bp, Artificial sequence
  synthetic
ggcgcgccagtcctcacagttcatctgagaatagaaccacaatcaagtcatactactagtcactatacaataatcaacaattttagtcaatctggacgtttttagttatcataggtccgaactgatcaatctaacaaaaaaactaaacgttccacaataaatcaacgttcaggccaaaatattcagcccgactcggaccgatg

SEQ ID NO: 11343 - DNA, 203 bp, Artificial sequence
  synthetic
ggcgcgccagtcctatgcttggatctgagaatagtcggggtgctggtacatactactagtcactatacaataatcaacaattttagtcaactgattaccaagatgttatcataggtccgaactgatcaatctaacaaaaaaactaaacgttccacaataaatcaacgttcaggccaaaatattcagcccgactcggaccgatg

SEQ ID NO: 11344 - DNA, 203 bp, Artificial sequence
  synthetic
ggcgcgccagtcctaagaatgcatctgatctcagacgtgttctcgtcactgcaactcttggaacaagataagacagtcatccattagtaatttttaagaaaaaaacgataggaccgaacctagtattgaaagaaccgtctcggtcaatctaggtaatcgagctgataccgtctcggaaagctcaaatccgactcggaccgatg

SEQ ID NO: 11345 - DNA, 203 bp, Artificial sequence
  synthetic
ggcgcgccagtcctcgcagaatatctgatctcagtgagaaaaatcaacctgcaactcttggaacaagataagacagtcatccattagtaaaacccccatcgtcgacgataggaccgaacctagtattgaaagaaccgtctcggtcaatctaggtaatcgagctgataccgtctcggaaagctcaaatccgactcggaccgatg

SEQ ID NO: 11346 - DNA, 203 bp, Artificial sequence
  synthetic
ggcgcgccagtcctgggcgcgtatctgatctcagtgagaaaaatcaacctgcaactcttggaacaagataagacagtcatccattagtaatttttaagaaaaaaacgataggaccgaaagccaatcattgtcaaccgtctcggtcaatctaggtaatcgagctgataccgtctcggaaagctcaaatccgactcggaccgatg

SEQ ID NO: 11347 - DNA, 203 bp, Artificial sequence
  synthetic
ggcgcgccagtccttcatagtgatctgatctcagtgagaaaaatcaacctgcaactcttggaacaagataagacagtcatccattagtaatttttaagaaaaaaacgataggaccgaacctagtattgaaagtcgttggctccgacatctaggtaatcgagctgataccgtctcggaaagctcaaatccgactcggaccgatg

SEQ ID NO: 11348 - DNA, 203 bp, Artificial sequence
  synthetic
ggcgcgccagtccttaacgcccatctgatctcagtgagaaaaatcaacctgcaactcttggaacaagataagacagtcatccattagtaatttttaagaaaaaattctcttatttacccctagtattgaaagaaccgtctcggtcaatctaggtaatcgagctgataccgtctcggaaagctcaaatccgactcggaccgatg

SEQ ID NO: 11349 - DNA, 203 bp, Artificial sequence
  synthetic
ggcgcgccagtcctgaactgctatctgcctacaaactggtttgctactttaccaactggtcccaggaccggcaggaaccaggaaaattcacccctgagaatattgaccccttcctatgctctcatctcatctattcattcgccagcgcgtcgcttgtggtggttatcatcaaggacaagagtgaagtgcgactcggaccgatg

SEQ ID NO: 11350 - DNA, 203 bp, Artificial sequence
  synthetic
ggcgcgccagtccttcctttgcatctggccatccatccgtgggggtctatgggccttcgagatagccgccaggaatttttccagcagctactgcaaggctgtctcctgcctactgcccagcagggccttgaccagatctggctgctccttgccatctgcctcgcctgccgcctcctctggaggctcggcgactcggaccgatg

SEQ ID NO: 11351 - DNA, 203 bp, Artificial sequence
  synthetic
ggcgcgccagtccttttcacaaatctggccatccatccgtgggggtctgcaatggccaccttcctaatgtgttctattttccagcagctactgcaaggctgtctcctgcctactgcccagcagggccttgaccagatctggctgctccttgccatctgcctcgcctgccgcctcctctggaggctcggcgactcggaccgatg

SEQ ID NO: 11352 - DNA, 203 bp, Artificial sequence
  synthetic
ggcgcgccagtcctaattacggatctggccatccatccgtgggggtctgcaatggccacctttagccgccaggaatgcagtattgctaacctgcaaggctgtctcctgcctactgcccagcagggccttgaccagatctggctgctccttgccatctgcctcgcctgccgcctcctctggaggctcggcgactcggaccgatg

SEQ ID NO: 11353 - DNA, 203 bp, Artificial sequence
  synthetic
ggcgcgccagtcctttaggttcatctggccatccatccgtgggggtctgcaatggccacctttagccgccaggaatttttccagcagctactgcaaggctgtctcctgcctactgcccagcagggccttgacatatcaccagccgcccttgccatctgcctcgcctgccgcctcctctggaggctcggcgactcggaccgatg

SEQ ID NO: 11354 - DNA, 203 bp, Artificial sequence
  synthetic
ggcgcgccagtcctaacctcctatctggccatccatccgtgggggtctgcaatggccacctttagccgccaggaatttttccagcagctactgcaaggctgtctcctgcctactgcccagcagggccttgaccagatctggctgctccttgccatctgccggtatcctatgacactctggaggctcggcgactcggaccgatg

SEQ ID NO: 11355 - DNA, 203 bp, Artificial sequence
  synthetic
ggcgcgccagtccttgctgctaatctggccatccatccgtgggggtctgcaatggccacctttagccgccaggaatttttccagcagctactgcaaggctgtctgactggctaaatgaagcagggccttgaccagatctggctgctccttgccatctgcctcgcctgccgcctcctctggaggctcggcgactcggaccgatg

SEQ ID NO: 11356 - DNA, 203 bp, Artificial sequence
  synthetic
ggcgcgccagtcctgctcagctatctggccatccatccgtgggggtctgcaatggccacctttagccgccaggaatttttccagcagctataattgcatccgaacctgcctactgcccagcagggccttgaccagatctggctgctccttgccatctgcctcgcctgccgcctcctctggaggctcggcgactcggaccgatg

SEQ ID NO: 11357 - DNA, 203 bp, Artificial sequence
  synthetic
ggcgcgccagtcctagtaaaccatctggccatcccgtacgaattaggcgcaatggccacctttagccgccaggaatttttccagcagctactgcaaggctgtctcctgcctactgcccagcagggccttgaccagatctggctgctccttgccatctgcctcgcctgccgcctcctctggaggctcggcgactcggaccgatg

SEQ ID NO: 11358 - DNA, 203 bp, Artificial sequence
  synthetic
ggcgcgccagtcctattagcggatcttcctcccggcggttttttggttagtagctcacaatcatctcgtgtttcagcaaagtgtgcataattataaagtgctgggtcatctaagcttttcagtcgagaaaaaaacagtagatcagaagaacaactggcaacacttctcatcctgagacctacttcaagcgactcggaccgatg

SEQ ID NO: 11359 - DNA, 203 bp, Artificial sequence
  synthetic
ggcgcgccagtcctcgaacttaatcttggcgaattaaccttaaccctagagccttatgccacgatccagtggttgtaaggtcgtaatgagcaattccgggacgggaccgactactttgggtgtccgtgtttctcatttttcttcatattgtcttatggtcacagcatatatatacatatactgtgatccgactcggaccgatg

SEQ ID NO: 11360 - DNA, 203 bp, Artificial sequence
  synthetic
ggcgcgccagtcctccggcactatgacagagatcttctagactaggtgcgagaggccgaggaccagaacaacatccgcctaccctccatcattgttataaaaaacttaggaaccaggtccacacagccgccagccaaccaaccatccactcccacgactgaccataggttgtatagagcaggcacgcccgactcggaccgatg

SEQ ID NO: 11361 - DNA, 203 bp, Artificial sequence
  synthetic
ggcgcgccagtcctctatcttcatgacagagatcttctagactaggtgcgagaggccgaggaccagaacaacatccgcctaccctccatcattgttataaaaaacttaggaaccaggtccacacagccgccagccaaccaaccatcgtactgtttcgtgagagccgatggcagaagagcaggcacgcccgactcggaccgatg

SEQ ID NO: 11362 - DNA, 203 bp, Artificial sequence
  synthetic
ggcgcgccagtcctgacatcgaatgacagagatcttctagactaggtggatccacagcgattccagaacaacatccgcctaccctccatcattgttataaaaaacttaggaaccaggtccacacagccgccagccaaccaaccatccactcccacgactggagccgatggcagaagagcaggcacgcccgactcggaccgatg

SEQ ID NO: 11363 - DNA, 203 bp, Artificial sequence
  synthetic
ggcgcgccagtcctcctctccgatgaccaattatatgaatcaattatctgaattacttggatttgatcttaatccataaattataataaagcgacttatcttggtcaatgtcactaacaccattagttaatataaaacttgacagaagataaaaatggggcaaataaatcaattcagccgacccaacccgactcggaccgatg

SEQ ID NO: 11364 - DNA, 203 bp, Artificial sequence
  synthetic
ggcgcgccagtccttcccgaggatgagaagcgaccacccctcgacgacttctccttcacggtcgaacgagtatcatacggccaactctcccccggaatccataacggctcacgcaaatagatttctttccgttcctcctcggagggctctccacatttatctgctcgagacgtggcagctccagaacccgactcggaccgatg

SEQ ID NO: 11365 - DNA, 203 bp, Artificial sequence
  synthetic
ggcgcgccagtcctgtccctatatgagaagcgaccacccctcgacgacttctccttcacggttcccacccaggagcacggccaactctcccccggaatccataacggctcacgcaaatagatttctttccgtaatagacaacctatctctccacatttatctgctcgagacgtggcagctccagaacccgactcggaccgatg

SEQ ID NO: 11366 - DNA, 203 bp, Artificial sequence
  synthetic
ggcgcgccagtcctaaactaggatgagaagcgaccacccctcgacgacttctccttcacggttcccacccaggagcacggccaactctcccccggaatccataacggctcacgcaaatagatttctttccgttcctcctcggagggagtagtcatcccccctgctcgagacgtggcagctccagaacccgactcggaccgatg

SEQ ID NO: 11367 - DNA, 203 bp, Artificial sequence
  synthetic
ggcgcgccagtccttagcaactatgagaagcgaccacccctcgacgacttctccttcacggttcccacccaggagcacggccaactctcccccggaatccataacggctcacgcaaatagatttctttccgttcctcctcggagggctctccacatttatctgctcgagacgtgttgcgatacccctacgactcggaccgatg

SEQ ID NO: 11368 - DNA, 203 bp, Artificial sequence
  synthetic
ggcgcgccagtcctcggcagcgatgagaagcgaccacccctcgacgacttctccttcacggttcccacccaggagcacggccaactctcccccggaatccataattttctcaaatcgaagatttctttccgttcctcctcggagggctctccacatttatctgctcgagacgtggcagctccagaacccgactcggaccgatg

SEQ ID NO: 11369 - DNA, 203 bp, Artificial sequence
  synthetic
ggcgcgccagtcctcaagacttatgagcgcgagcggcgggctcttgggtcttttttagcgccatctgctcgcggcgccgcctcctgctcctcccgctgctgctgccgctgccgccctgagtcactgcctgcgcagctccggccgccaaaggtgtacgttcagtcgccgatatttggagttcttacaaccgactcggaccgatg

SEQ ID NO: 11370 - DNA, 203 bp, Artificial sequence
  synthetic
ggcgcgccagtccttcgtatgtatgagcgcgagcggcgggctcttgggtcttttttagcgccatctgctcgcggcgccgcctcctgctcctcccgctgctgctgccgctgccgccctgagtcactgcctgcgcagctccggccgcctggctccccatactagtcgccgatatttggagttcttacaaccgactcggaccgatg

SEQ ID NO: 11371 - DNA, 203 bp, Artificial sequence
  synthetic
ggcgcgccagtccttgtcaagcatgagcgcgagcggcgggctcttgggtcttttttagcgccatctgctcgcggcgccgcctcctgctcctcccgctgctgctgccgctgccgccctgagtcactgcctgcggccggtgacttatatggctccccatactagtcgccgatatttggagttcttacaaccgactcggaccgatg

SEQ ID NO: 11372 - DNA, 203 bp, Artificial sequence
  synthetic
ggcgcgccagtcctactaacatatgagcgcgagcggcgggctcttgggtcttttttagcgcctaactgagcgtcgtccgcctcctgctcctcccgctgctgctgccgctgccgccctgagtcactgcctgcgcagctccggccgcctggctccccatactagtcgccgatatttggagttcttacaaccgactcggaccgatg

SEQ ID NO: 11373 - DNA, 203 bp, Artificial sequence
  synthetic
ggcgcgccagtcctatgacaacatgatctttgaatattaaatgaaaggagactagaataacaactatgaacaggcgcatgaaggagctttagcaggagcattctttcttggtgtgcaaatcacgcctggcagcccctgcccacagtacccgaagatggcaggccttgttcccttcacctaaattcatacgactcggaccgatg

SEQ ID NO: 11374 - DNA, 203 bp, Artificial sequence
  synthetic
ggcgcgccagtccttgcgtcgtatgatctttgaatattaaatgaaaggagactagaataacagtctcttgactattcatgaaggagctttagcaggagcattctgatccctacgaattatcacgcctggcagcccctgcccacagtacccgaagatggcaggccttgttcccttcacctaaattcatacgactcggaccgatg

SEQ ID NO: 11375 - DNA, 203 bp, Artificial sequence
  synthetic
ggcgcgccagtccttggccctaatgatgatgcttggtttaagctatcgagttgaccccgggtcaattcttggttcttccgacatgtctacaggaaaagttttcatttccgtaaggcttgtcaaaatttagattgtaattgtttggggttttatgaatcttcagttgaagaatattaaactcagtgaaacgactcggaccgatg

SEQ ID NO: 11376 - DNA, 203 bp, Artificial sequence
  synthetic
ggcgcgccagtccttttgagtgatgatgatgcttggtttaagctatcgtaccattatgaaaacaattcttggttcttccgacatgtctacaggaaaagttttcatttccgtaaggcttgtcaaaatttagattgtaattgtttggggttttatgaatcttcagttgaagaatattaaactcagtgaaacgactcggaccgatg

SEQ ID NO: 11377 - DNA, 203 bp, Artificial sequence
  synthetic
ggcgcgccagtccttcgggcttatgatgatgcttggtttaagctatcgtaccattatgaaaacaattcttggttcttccgacatgtctacaggaaaagttttcatttccgtaaggcttgtcaaaatttagattgtaattgtttggggttttatgaatcttttccacgccttagataaactcagtgaaacgactcggaccgatg

SEQ ID NO: 11378 - DNA, 203 bp, Artificial sequence
  synthetic
ggcgcgccagtcctaggatgccatgatgatgcttttgcgccctctgtataccattatgaaaacaattcttggttcttccgacatgtctacaggaaaagttttcatttccgtaaggcttgtcaaaatttagattgtaattgtttggggttttatgaatcttcagttgaagaatattaaactcagtgaaacgactcggaccgatg

SEQ ID NO: 11379 - DNA, 203 bp, Artificial sequence
  synthetic
ggcgcgccagtcctcgttacccatgatgcgaggcgaaatgaatcaagtagattctctgggatataagaggcagccgaagagttcacaagtgtgaagcctggaagccggcgggtgccgctgtgtaggaaagaagctaaagcacttccagagcctgtccggagctcagaggttcggaagacttatcgacccgactcggaccgatg

SEQ ID NO: 11380 - DNA, 203 bp, Artificial sequence
  synthetic
ggcgcgccagtccttggaccctatgcaattaagggcgacggagcggggtgtgaagatggcggacgaagaggccgagcaggagaggttgagttgcggcgaaggcggctgcgtcgcggagctgcagcgcctgggcgagcggctccaggagctggagctacagctgcgggagagccgggtaccggccgtggcgactcggaccgatg

SEQ ID NO: 11381 - DNA, 203 bp, Artificial sequence
  synthetic
ggcgcgccagtcctgacagggtatgcagtggtgtgatcctgcgccagggggtgtgggcctcgctcaccggcggttggttcttcgacccgcaccagagcaccttctccaactgcttccacctctatgtgtggatcttcctgctcatctttcccttcttactgtacatggtcctgcctcccagcttgatgcgactcggaccgatg

SEQ ID NO: 11382 - DNA, 203 bp, Artificial sequence
  synthetic
ggcgcgccagtcctttgcacggatgcatagtatgctacgcgcgcgccaatctccacgacgccgactaacgcccctgtacgtggggcctttaatcttacctactctaaccaggtcatcacccaccgttgtttcgccgcatctggtgggtacccaacttttgccattcgggagagccccagggtgcccgacgactcggaccgatg

SEQ ID NO: 11383 - DNA, 203 bp, Artificial sequence
  synthetic
ggcgcgccagtcctccgtccgcatgcggcggcccaatcggaaggtggaccgaaatcccgcgacagcaagaggcccggtttccagttgacagctaaggaacacagtgctttcaaaagaattggcgtccgctgttcgcctctcctcccgggagtcttctgcctactcccagaagaggagggaagcacagtcgactcggaccgatg

SEQ ID NO: 11384 - DNA, 203 bp, Artificial sequence
  synthetic
ggcgcgccagtcctgtcaccagatgcggcggcccaatcggaaggtggaccgaaatcccgcgacagcaagaggcccgtagcgacccgcggtaaggctagcaggtatgctttcaaaagaattggcgtccgctgttcgcctctcctcccgggagtcttctgcctactcccagaagaggagggaagcacagtcgactcggaccgatg

SEQ ID NO: 11385 - DNA, 203 bp, Artificial sequence
  synthetic
ggcgcgccagtcctgtataagaatgcggcggcccaatcggaaggtggaccgaaatcccgcgacagcaagaggcccgtagcgacccgcggtgctaaggaacacagtgctttcaaaagaattggcgtccgctgttcgcctctcctccctttttcaccacaggtactcccagaagaggagggaagcacagtcgactcggaccgatg

SEQ ID NO: 11386 - DNA, 203 bp, Artificial sequence
  synthetic
ggcgcgccagtcctgctagtatatgctaccagaggtttgtttgttaccttgtgtttgttcgtcacttgtcgacagcgccctgcgaattggtgtacccacaccgcgcggcttgcgaataatactttggagagtcttttgcctccagtgtcttccgtttgtactcgtcctcctctccctctccggccgggcgactcggaccgatg

SEQ ID NO: 11387 - DNA, 203 bp, Artificial sequence
  synthetic
ggcgcgccagtcctataccggcatgctactttatgcgccccgcccttgcgctcagcgccctctcaccgcccggctctgtgtgctccgggatggagcaggtgtgcagagggtgagaacccagctctgggaccaagtcacttgcttccttacttagcaagactatcgacttgagcaaacttggacctgggcgactcggaccgatg

SEQ ID NO: 11388 - DNA, 203 bp, Artificial sequence
  synthetic
ggcgcgccagtcctagtgaattatgctgcaaaagcatatgctgaacaatcgtgttgcgtgtttgtgattaactacagtgtattagacttgacagcagaagaactagaggctatcaaacatcagcttaatccaaaagataatgatgtagagctttgagttaataaaaaaaatggggcaaataaaacatccgactcggaccgatg

SEQ ID NO: 11389 - DNA, 203 bp, Artificial sequence
  synthetic
ggcgcgccagtcctcccttgcaatggagtggtttgctatttagcgtacgtgtaccataggcagccccaaaaacacgtgtgaggagaaagtcccagtcactttgggcaaagtagacagccgcgcttgcgtggtgggacttaattaatgcctgctaacccagagcctcgctgccggtttgatacaacaaccgactcggaccgatg

SEQ ID NO: 11390 - DNA, 203 bp, Artificial sequence
  synthetic
ggcgcgccagtcctttcttactatggagtggtttgctatttagcgtactccggattgctcgcgccccaaaaacacgtgtgaggagaaagtcccagtcactttgggcaaagtagacagccgcgcttgcgtggtgggacttaattaatgcctgctaacccagttgaaattgataattttgatacaacaaccgactcggaccgatg

SEQ ID NO: 11391 - DNA, 203 bp, Artificial sequence
  synthetic
ggcgcgccagtcctaacgatttatggcagggccacgccccagcccatgacaacaatgttggatggcagccttgatcagcgtcagcctctctgggaccttggcaaaccgctgcaagaaggccccagtgaagagctgcacggagtgtgtccgtgtggataaggactgcgcctactgcacagacgagatgtcgactcggaccgatg

SEQ ID NO: 11392 - DNA, 203 bp, Artificial sequence
  synthetic
ggcgcgccagtccttgagtgatatggcagggccacgccccagcccatgggccaggctgctccattgcaatgctcgtagcgtcagcctctctgggaccttggcaaaccgctgcaagaaggccccagtgaagagctgcacggagtgtgtccgtgtggataaggactgcgcctactgcacagacgagatgtcgactcggaccgatg

SEQ ID NO: 11393 - DNA, 203 bp, Artificial sequence
  synthetic
ggcgcgccagtcctaccatcaaatggcagggccacgccccagcccatgggccaggctgctcctggcagccttgatcagcgtcagcctctccacttgtgcctaccaccgctgcaagaaggccccagtgaagagctgcacggagtgtgtccgtgtggataaggactgcgcctactgcacagacgagatgtcgactcggaccgatg

SEQ ID NO: 11394 - DNA, 203 bp, Artificial sequence
  synthetic
ggcgcgccagtcctagctgcggatggcagggccacgccccagcccatgggccaggctgctcctggcagccttgatcagcgtcagcctctctgggaccttggcaaaccgctgcaagaaggccccagtgaagagctgcacggagtgtgtccgtgtggataaggactgcgcctactggtggagatcacgaccgactcggaccgatg

SEQ ID NO: 11395 - DNA, 203 bp, Artificial sequence
  synthetic
ggcgcgccagtccttcccgttcatggcagggccagctatagtgatcatggccaggctgctcctggcagccttgatcagcgtcagcctctctgggaccttggcaaaccgctgcaagaaggccccagtgaagagctgcacggagtgtgtccgtgtggataaggactgcgcctactgcacagacgagatgtcgactcggaccgatg

SEQ ID NO: 11396 - DNA, 203 bp, Artificial sequence
  synthetic
ggcgcgccagtcctcctaaaggatggcatccaacatggtgacaatcatagattgttatcataaagcgagttggattggccatccagtgtgaatcagattaattactcccttgtttgttggatccactcccgaaacgttttactccttaacttattgaaattgtttgaagacaggatttcagtgtcacacgactcggaccgatg

SEQ ID NO: 11397 - DNA, 203 bp, Artificial sequence
  synthetic
ggcgcgccagtcctacggattaatggcggcgcttagttgcatgaaggcggaaactctgtgacttcgggtccgtagtggggcctgcggtgggagtgggaaggaaggcggagggaaccattacgaaacacccccattgcggcgagggtcgcctcgagagacggtttctgagttccttgaactttgtaagacgactcggaccgatg

SEQ ID NO: 11398 - DNA, 203 bp, Artificial sequence
  synthetic
ggcgcgccagtcctagctggatatgtatatttaagcgcctggggcgggacttccggcgcgctggagcgttttccggccgtgcgtttgtggccgtccggcctccctgacatgcagccctctggaccccgaggttggaccctactgtgacacacctaccatgcggacactcttcaacctcctctggcttgcgactcggaccgatg

SEQ ID NO: 11399 - DNA, 203 bp, Artificial sequence
  synthetic
ggcgcgccagtcctcgatgcgcatgtggctaaccttaaccctgcagctagagcacgtaacccaatgtgtatctagttaactcacttgtcggcgggatgggaccaactactttgggtgtccgtgtttcactttttcctttatatttgcttatggtgacaatatatacaatatatatattggcaccatggcgactcggaccgatg

SEQ ID NO: 11400 - DNA, 203 bp, Artificial sequence
  synthetic
ggcgcgccagtcctacaagaatatgttagcttacggacatgtatcagatgctgagacacatgtctccgcccctgggtctggggaagaagtgtccggccagagtggcttacaagcggcttctgcggatggacctgcccgtcgcagatgacaacaccgtccacttcaattccaccctcatggctctgatccgactcggaccgatg

SEQ ID NO: 11401 - DNA, 203 bp, Artificial sequence
  synthetic
ggcgcgccagtcctgactagggatgtttattatttttaaaaaattaggaatgttcagcaccgaatgtcaagatttaccgtatatccctgtttgtttggatacaccagtgacgtccacttctagaagacaaagttatattacttaaacaaccaaagatggagtctcgctcttcgcccaggctggagtgccgactcggaccgatg

SEQ ID NO: 11402 - DNA, 203 bp, Artificial sequence
  synthetic
ggcgcgccagtcctcgtcgtcgatgtttattatttttaaaaaattagggcctggattttgacaatgtcaagatttaccgtatatccctgtttgtttggatacaccagtgacgtccacttctagaagacaaagttatattacttaaacaaccaaagatggagtctcgctcttcgcccaggctggagtgccgactcggaccgatg

SEQ ID NO: 11403 - DNA, 203 bp, Artificial sequence
  synthetic
ggcgcgccagtcctactatgacatgtttattatttttaaaaaattagggcctggattttgacaatgtcaagatttagacgcatgtttgcattgtttggatacaccagtgacgtccacttctagaagacaaagttatattacttaaacaaccaaagatggagtctcgctcttcgcccaggctggagtgccgactcggaccgatg

SEQ ID NO: 11404 - DNA, 203 bp, Artificial sequence
  synthetic
ggcgcgccagtcctccttatctatgtttattatttttaaaaaattagggcctggattttgactggaatttcggaagccgtatatccctgtttgtttggatacaccagtgacgtccacttctagaagacaaagttatattacttaaacaaccaaagatggagtctcgctcttcgcccaggctggagtgccgactcggaccgatg

SEQ ID NO: 11405 - DNA, 203 bp, Artificial sequence
  synthetic
ggcgcgccagtcctatccgcgtattaccgactagctgtgaggcccggacctgccccggggcgaagggtatgtggcgagacagagccctgcacccctaattcccggtggaaaactcctgttgccgtttccctccaccggcctggagtctcccagtcttgtcccggcagtgccgccctccccactaagaccgactcggaccgatg

SEQ ID NO: 11406 - DNA, 203 bp, Artificial sequence
  synthetic
ggcgcgccagtcctcttgcgttattatcaagcgtcaataattaaactaattaagctttgtttcacttgccatatgttttgtaatagaacagtttatggccccattaaaaatgtgtaccacatttaccaatcatatatgcacatagaccctttccctaaacgagttattgatttctaaactaaacgacacgactcggaccgatg

SEQ ID NO: 11407 - DNA, 203 bp, Artificial sequence
  synthetic
ggcgcgccagtcctcgtcagtaattattacagagaagaaggaaactcacttcctgtcgtcgcagagcacagcctagttctgatgcagaggggactgttttcagatggagacactagtaagaagaagaaaaatgtcaccatgcgatccatcaagaccacccctactaagcgaagaacatatcagtacaacgactcggaccgatg

SEQ ID NO: 11408 - DNA, 203 bp, Artificial sequence
  synthetic
ggcgcgccagtcctgtatcgcgattattcttttggtaggtgtcctacatcttctattattaaacatccaatttgtgtttatgattttttgcctattattttacaaggtattttattataacattgcaacacatttgttgtttttctattatttttgttatataacgataaatctcattaaatctaaaccgactcggaccgatg

SEQ ID NO: 11409 - DNA, 203 bp, Artificial sequence
  synthetic
ggcgcgccagtccttttgtataattattcttttggtaggtgtcctacatcttctattattaaacatccaatttgtgtttatgattttttgcctattattttacaaggtattttattatgtttagctttactttttgttgtttttctattatttttgttattatgtcggctcggacattaaatctaaaccgactcggaccgatg

SEQ ID NO: 11410 - DNA, 203 bp, Artificial sequence
  synthetic
ggcgcgccagtccttcggcgtcattcagcaattgtccaatttaggaaacattctgtttaagagttgacaaggtctcaatgaataatggacaagcaacaattacaagaaatggaggaaggttcgaaatcaggtgtcgtcacttggaccgtgactacaccatgccactaccaaatgctactagtaatgatcgactcggaccgatg

SEQ ID NO: 11411 - DNA, 203 bp, Artificial sequence
  synthetic
ggcgcgccagtcctccttcctaattcagcaattgtccaatttaggaaacattctgtttaagagttgacaaggtctcaatgaataatggacaagcaacaattacataggtactccagctgttcgaaatcaggtgtcgtcacttggaccgtgactacaccatgccactaccaaatgctactagtaatgatcgactcggaccgatg

SEQ ID NO: 11412 - DNA, 203 bp, Artificial sequence
  synthetic
ggcgcgccagtcctactgtcgcattccagcccccgatgcgccctctctgggcttttgctcgctcagcacaggatctgatcaggagattcatctctggtgctttacaccagagcatggatttaaaaattgcccaaggcctggcaaacaacctaggggactaggttttctctattttaaaagatgtcaatcgactcggaccgatg

SEQ ID NO: 11413 - DNA, 203 bp, Artificial sequence
  synthetic
ggcgcgccagtcctcgagcccgattccagccccctccttttgaggagggggcttttgctcgctcagcacaggatctctctcaatttagtctctctggtgctttacaccagagcatggatttaaaaattgcccaaggcctggcaaacaacctaggggactaggttttctctattttaaaagatgtcaatcgactcggaccgatg

SEQ ID NO: 11414 - DNA, 203 bp, Artificial sequence
  synthetic
ggcgcgccagtcctgccgtcctattccagccccctccttttgaggagggggcttttgctcgctcagcacaggatctgatcaggagattcacgagcaagcgcccccaccagagcatggatttaaaaattgcccaaggcctggcaaacaacctaggggactaggttttctctattttaaaagatgtcaatcgactcggaccgatg

SEQ ID NO: 11415 - DNA, 203 bp, Artificial sequence
  synthetic
ggcgcgccagtccttccacgtgattccagccccctccttttgaggagggggcttttgctcgctcagcacaggatctgatcaggagattcatctctggtgctttacaccagagcatggatttaaaaattgcccaaggcctggcaaacggggcgtcttctatggttttctctattttaaaagatgtcaatcgactcggaccgatg

SEQ ID NO: 11416 - DNA, 203 bp, Artificial sequence
  synthetic
ggcgcgccagtcctcgtcttgcattcctagggccgcggcgcttcccggcatgctccgctgcaggcccgcgcccgcgcccggactttgccatcggcggggcagtcgcgggatgcgcccgggagccacagcctgtatgccgaaatgaaaggaggatgtgaccgggactgagtcaggagccctctggaagccgactcggaccgatg

SEQ ID NO: 11417 - DNA, 203 bp, Artificial sequence
  synthetic
ggcgcgccagtcctacctatgaattctgctgtttttcccatatgaagcaatccttcaacaccgacttaggttcaattttctcatcatttactgttgtaattcaatcttactaaagttattccgatatttaagcgtcggcccggcggatataatgtaacaatactattaagattatgatataggccagacgactcggaccgatg

SEQ ID NO: 11418 - DNA, 203 bp, Artificial sequence
  synthetic
ggcgcgccagtcctcagattagattgagaagaaaatttttggttgcgcaattcaagtgtcctatttaaaatgggacaaatagtgacattcttccaggaagtgcctcatgtaatagaagaggtgatgaacattgttctcattgcactgtctgtactagcagtgctgaaaggtctgtacaattttgcaaccgactcggaccgatg

SEQ ID NO: 11419 - DNA, 203 bp, Artificial sequence
  synthetic
ggcgcgccagtcctgagaccggattgcatactttgacgaaacaaattttcgttgcatacccaataaaagattattatattgcatacccgtttttaataaaatacattgcataccctctagggcgcgtcggccttgcatacgttgacgaaacaaattttcgttgcatacccaataaaagattattatatcgactcggaccgatg

SEQ ID NO: 11420 - DNA, 203 bp, Artificial sequence
  synthetic
ggcgcgccagtcctgtaccgttattgcatactttgacgaaacaaattttcgttgcatacccatccgtctcagggattattgcatacccgtttttaataaaatacattgcataccctcttttaataaaaaatattgcatacgttgacgaaacaaattttcgttgcatacccaataaaagattattatatcgactcggaccgatg

SEQ ID NO: 11421 - DNA, 203 bp, Artificial sequence
  synthetic
ggcgcgccagtccttgggctcgattgctgtccttggctctagcatgatcctagtgagcatcttcattataatcaagtctggtggacggggaacgggagcacctccagagctgagtggtgtcacaaacaatggcttcataccacacagttagttaattaaaaataaaataaaatttgggacaaatcatacgactcggaccgatg

SEQ ID NO: 11422 - DNA, 203 bp, Artificial sequence
  synthetic
ggcgcgccagtcctctgccgggattgggacatttgatgtaaccggaccctcgcaccgcagaaggttgtcctgtattgttacggtgtatccgtcttggcacactgaaagggtatttttgggtaatcctttcctactgcctgatagggtggcgtgcccggccacgagagattaagggtagcaatttaaaccgactcggaccgatg

SEQ ID NO: 11423 - DNA, 203 bp, Artificial sequence
  synthetic
ggcgcgccagtcctctgctcctattgggacatttgatgtaaccggacctggttcagtatccgcagcagatgtgccagttacggtgtatccgtcttggcacactgaaagggtatttttgggtaatcctttcctactgcctgatagggtggcgtgcccggccacgagagattaagggtagcaatttaaaccgactcggaccgatg

SEQ ID NO: 11424 - DNA, 203 bp, Artificial sequence
  synthetic
ggcgcgccagtccttagctctgattgggacatttgatgtaaccggacctggttcagtatccgggttgtcctgtattacgttaaatgcctggtcttggcacactgaaagggtatttttgggtaatcctttcctactgcctgatagggtggcgtgcccggccacgagagattaagggtagcaatttaaaccgactcggaccgatg

SEQ ID NO: 11425 - DNA, 203 bp, Artificial sequence
  synthetic
ggcgcgccagtcctaagccggtattgggacatttgatgtaaccggacctggttcagtatccgggttgtcctgtattgttacggtgtatccgtcttggcacactgaaagggtatttttgggtaatcctttcctactgcctgatagggcccgaaagtaataaacgagagattaagggtagcaatttaaaccgactcggaccgatg

SEQ ID NO: 11426 - DNA, 203 bp, Artificial sequence
  synthetic
ggcgcgccagtcctcttggtacattgggacatttgatgtaaccggacctggttcagtatccgggttgtcctgtattgttacggtgtatccgtcttggcacactgaaagggtatttttgggtaatcctttcctactgcctgatagggtggcgtgcccggccacgagagattaaggtagtttcagggtctcgactcggaccgatg

SEQ ID NO: 11427 - DNA, 203 bp, Artificial sequence
  synthetic
ggcgcgccagtcctagcgtgttattgggacatttgatgtaaccggacctggttcagtatccgggttgtcctgtattgttacggtgtatccgtcttggcacactgaaagggtatttttgggtaatcctttcctactgcctgatagggtggcgtgcccggcctaatcgctggggcagtagcaatttaaaccgactcggaccgatg

SEQ ID NO: 11428 - DNA, 203 bp, Artificial sequence
  synthetic
ggcgcgccagtccttggttcaaattgggacatttgatgtaaccggacctggttcagtatccgggttgtcctgtattgttacggtgtatccgtcttggcacactggcgtcactcacccaggtaatcctttcctactgcctgatagggtggcgtgcccggccacgagagattaagggtagcaatttaaaccgactcggaccgatg

SEQ ID NO: 11429 - DNA, 203 bp, Artificial sequence
  synthetic
ggcgcgccagtcctcataacgcattgggacattttggtgctttactggtggttcagtatccgggttgtcctgtattgttacggtgtatccgtcttggcacactgaaagggtatttttgggtaatcctttcctactgcctgatagggtggcgtgcccggccacgagagattaagggtagcaatttaaaccgactcggaccgatg

SEQ ID NO: 11430 - DNA, 203 bp, Artificial sequence
  synthetic
ggcgcgccagtcctgtcgcagcatttcagattaactcctccctctccgcgcgcccggcgcgaagcctgcgattcgtgagccgagcgcagagcgcagagccgagtggcgcacgctgggcagtggcctgggcaaccccaaacgcagccagagccctcacccgagtccgctggcccgcgcactcccggacccgactcggaccgatg

SEQ ID NO: 11431 - DNA, 203 bp, Artificial sequence
  synthetic
ggcgcgccagtcctgcacaggaatttcatttggggatagtgtaccgttaagcaagtgctgtgtgtcctagtctaagggtttcgtgttccgtcacgagattccattctacaaacgccttactcgaggttccgtctcgtgtttgtgtggaagcaaagttctgtctttgtggaaaccagtaactgttcctacgactcggaccgatg

SEQ ID NO: 11432 - DNA, 203 bp, Artificial sequence
  synthetic
ggcgcgccagtcctggtacctaatttcatttgggttgcaacagtttggaagcaagtgctgtgtgtcctagtctaagggtttcgtgttccggacgacttgaattgtctacaaacgccttactcgaggttccgtctcgtgtttgtgtggaagcaaagttctgtctttgtggaaaccagtaactgttcctacgactcggaccgatg

SEQ ID NO: 11433 - DNA, 203 bp, Artificial sequence
  synthetic
ggcgcgccagtcctgtccgtcgatttcatttgggttgcaacagtttggaagcaagtgctgtgtgtcctagtctaagggtttcgtgttccgtcacgagattccatgtccttgggtttcgactcgaggttccgtctcgtgtttgtgtggaagcaaagttctgtctttgtggaaaccagtaactgttcctacgactcggaccgatg

SEQ ID NO: 11434 - DNA, 203 bp, Artificial sequence
  synthetic
ggcgcgccagtcctttactgtcatttcatttgggttgcaacagtttggaagcaagtgctgtgtgtcctagtctaagggtttcgtgttccgtcacgagattccattctacaaacgccttactcgaggttccgtctcgtgtttgtgtggaagcaaagttctgatcggtgtacgtgtagtaactgttcctacgactcggaccgatg

SEQ ID NO: 11435 - DNA, 203 bp, Artificial sequence
  synthetic
ggcgcgccagtcctatcggtatatttcatttgggttgcaacagtttggaagcaagtgctgtgtgtcctagtctaagggtttcgtgttccgtcacgagattccattctacaaacgccttactcgaggttccgtctcgtgtttgtgtggaagcaaagttctgtctttgtggaaaccagtaactgttcctacgactcggaccgatg

SEQ ID NO: 11436 - DNA, 203 bp, Artificial sequence
  synthetic
ggcgcgccagtcctgcttaacaatttcatttgggttgcaacagtttggtctgcgacaacagctgtcctagtctaagggtttcgtgttccgtcacgagattccattctacaaacgccttactcgaggttccgtctcgtgtttgtgtggaagcaaagttctgtctttgtggaaaccagtaactgttcctacgactcggaccgatg

SEQ ID NO: 11437 - DNA, 203 bp, Artificial sequence
  synthetic
ggcgcgccagtcctctcgtgacatttgatctttaggttataatgttagagtccgctcccggtgcttaatgcatttagtaatttaaggcttagttatttaactttacttatcaagatggccgttggcagccccacgaaatctagattagtccgaatgtcctattttgattaggtggtcagataggtcagcgactcggaccgatg

SEQ ID NO: 11438 - DNA, 203 bp, Artificial sequence
  synthetic
ggcgcgccagtcctgatcgccgatttggctagcacctgcctgccacagccggactccgccactccggtaggattccccgcctgtcattccctagcccagctcttgggaaactgcagaggggtccagaggatttgcagttctgaacctgcacactccagtctaggatctccgagcaagagcgtagcctccgactcggaccgatg

SEQ ID NO: 11439 - DNA, 203 bp, Artificial sequence
  synthetic
ggcgcgccagtccttgagcgtgatttggtggagcggctgtcggcgcagtagcagcgagcagcagagtccgcacgctccggcgaggggcagaagagcgcgagggagcgcggggcagcagaagcgagagccgagcgcggacccagccaggacccacagccctccccagctgcccaggaagagccccagcccgactcggaccgatg

SEQ ID NO: 11440 - DNA, 203 bp, Artificial sequence
  synthetic
ggcgcgccagtcctccacaccacaaaaattgtctaagcagcagcaggaacgcgggagcgtttcttttccttttgtactgacatgatggcgctagacgtacgccttagagtttgcgagcagactctgctggcaggtgccgttcgcatgatggacaaattcttgcaaaagagaactgtttttgtcccccacgactcggaccgatg

SEQ ID NO: 11441 - DNA, 203 bp, Artificial sequence
  synthetic
ggcgcgccagtcctactcgctccaaaaattgtctaagcagcagcaggaacgcgggagcgtttcttttccttttgtactgacatgatggcggcgtctaaggtgtaagttcccgcaatttagactctgctggcaggtgccgttcgcatgatggacaaattcttgcaaaagagaactgtttttgtcccccacgactcggaccgatg

SEQ ID NO: 11442 - DNA, 203 bp, Artificial sequence
  synthetic
ggcgcgccagtcctttaaactccaaaaattgtctaagcagcagcaggaacgcgggagcgtttcttttccttttgtactgacatgatggcggcgtctaaggtgtatagagtttgcgagcagactctgctggcaggtgccgttcgcatgatggacaaattctccacttctgccgtggtttttgtcccccacgactcggaccgatg

SEQ ID NO: 11443 - DNA, 203 bp, Artificial sequence
  synthetic
ggcgcgccagtcctgggaagctcaaaaattgtctaagcagcagcaggaacgcgggagcgtttcttttccttttgtactgacatgatggcggcgtctaaggtgtatagagtttgcgagcagactctgctggcaggtgccgttcgcattggcatgggcgcaatgcaaaagagaactgtttttgtcccccacgactcggaccgatg

SEQ ID NO: 11444 - DNA, 203 bp, Artificial sequence
  synthetic
ggcgcgccagtcctggtatagccaaaaattgtctaagcagcagcaggaacgcgggagcgtttcttttccttttgtactgacatgatggcggcgtctaaggtgtatagagtttgcgagcccgaaggtagctatggtgccgttcgcatgatggacaaattcttgcaaaagagaactgtttttgtcccccacgactcggaccgatg

SEQ ID NO: 11445 - DNA, 203 bp, Artificial sequence
  synthetic
ggcgcgccagtcctgatcttatcaaaaattgtctaagcagcagcaggaacgcgggagcgttttcccagtcggccccctgacatgatggcggcgtctaaggtgtatagagtttgcgagcagactctgctggcaggtgccgttcgcatgatggacaaattcttgcaaaagagaactgtttttgtcccccacgactcggaccgatg

SEQ ID NO: 11446 - DNA, 203 bp, Artificial sequence
  synthetic
ggcgcgccagtcctaatgtagacaaaccacgacggagtgctcctagaaaggcgcgggccgaggtaccaaaggcggcgtgtggagcgggaggagttacacgacgggggtgaaggtaagtacctacaccaaaaactgtagccagaaaaggcttgttatcctacctttagacaggtagaagattgtgggagcgactcggaccgatg

SEQ ID NO: 11447 - DNA, 203 bp, Artificial sequence
  synthetic
ggcgcgccagtccttagtttctcaaaccacgacggagtgctcctagaaaggcgcgggccgaggtaccaaaggcggcgtgtggagcgggagtgaaagaggcctccgggtgaaggtaagtacctacaccaaaaactgtagccagaaaaggcttgttatcctaggcgggagtctagggaagattgtgggagcgactcggaccgatg

SEQ ID NO: 11448 - DNA, 203 bp, Artificial sequence
  synthetic
ggcgcgccagtccttatggctgcaaaccacgacggagtgctcctagaaaggcgcgggccgaggtaccaaaggcggcgtgtggagcgggagtgaaagaggcctccgggtgaaggtaagtgagaggttatttggctgtagccagaaaaggcttgttatcctacctttagacaggtagaagattgtgggagcgactcggaccgatg

SEQ ID NO: 11449 - DNA, 203 bp, Artificial sequence
  synthetic
ggcgcgccagtcctttctgttgcaaaccacgacggagtgctcctagaattagagattatttagtaccaaaggcggcgtgtggagcgggagtgaaagaggcctccgggtgaaggtaagtacctacaccaaaaactgtagccagaaaaggcttgttatcctacctttagacaggtagaagattgtgggagcgactcggaccgatg

SEQ ID NO: 11450 - DNA, 203 bp, Artificial sequence
  synthetic
ggcgcgccagtcctaccgcacacaaaccgcaaaagacatcagtatcccacagcctctccaagtcccccggtctcctcctcttctcgaaggattgctttctagcttccaccacatccgacgacactcaattccccacccccaaaggagacaccgggaatcccagaatcaagactcatccagtgtccatccgactcggaccgatg

SEQ ID NO: 11451 - DNA, 203 bp, Artificial sequence
  synthetic
ggcgcgccagtcctgaggagttcaaaccgcaaaagacatcagtatcccacagcctctccaagtcccccggtctcctcctcttctcgaagggaccaaaagatcaatccaccacatccgacgacactcaattccccacccccaaaggagacaccgggaatccacctgggccctgggatccagtgtccatccgactcggaccgatg

SEQ ID NO: 11452 - DNA, 203 bp, Artificial sequence
  synthetic
ggcgcgccagtccttgaagagtcaaaccgcaaaagacatcagtatcccacagcctctccaagtcccccggtctcctcctcttctcgaagggaccaaaagatcaatccaccacatccgacgacactcaattccccacccccaaaggagacaccgggaatcccagaatcaagactcatccagtgtccatccgactcggaccgatg

SEQ ID NO: 11453 - DNA, 203 bp, Artificial sequence
  synthetic
ggcgcgccagtcctcttgacagcaaaccgcaaaagacatcagtatcccacagcctctccaagtcccccggtctcctcctcttctcgaagggaccaaaagatcaatccaccacatccgacgacactcaattccccacccccaaaggagacaccgggaatcccagaatcaagactcccttctaacaacgacgactcggaccgatg

SEQ ID NO: 11454 - DNA, 203 bp, Artificial sequence
  synthetic
ggcgcgccagtccttacgccctcaaaccgcaaaagacatcagtatcccacagcctctccaagtcccccggtctcctcctcttctcgaagggaccaaaagatcaatccaccacatccgatagaggcatcaagtccacccccaaaggagacaccgggaatcccagaatcaagactcatccagtgtccatccgactcggaccgatg

SEQ ID NO: 11455 - DNA, 203 bp, Artificial sequence
  synthetic
ggcgcgccagtcctgacctgaacaaaccgcaaaagacatcagtatccctagtaagaaagtgctcccccggtctcctcctcttctcgaagggaccaaaagatcaatccaccacatccgacgacactcaattccccacccccaaaggagacaccgggaatcccagaatcaagactcatccagtgtccatccgactcggaccgatg

SEQ ID NO: 11456 - DNA, 203 bp, Artificial sequence
  synthetic
ggcgcgccagtcctcccggaaccaaagacagaacgatgaagagtatgacaagattcgtggaagatagtctccactttttaatgcactaagcaatcggttgctaggagcccatcctgggtcagaggccgatccgcagaaccagaacgttttcccctcctggactgttagtaacttagtctccctcctcccgactcggaccgatg

SEQ ID NO: 11457 - DNA, 203 bp, Artificial sequence
  synthetic
ggcgcgccagtcctgcgcaacgcaaagacagaacttaacctctgcaagcaagattcgtggaaacatacaagacagatttaatgcactaagcaatcggttgctaggagcccatcctgggtcagaggccgatccgcagaaccagaacgttttcccctcctggactgttagtaacttagtctccctcctcccgactcggaccgatg

SEQ ID NO: 11458 - DNA, 203 bp, Artificial sequence
  synthetic
ggcgcgccagtcctcaacgaagcaaagacagaacttaacctctgcaagcaagattcgtggaagatagtctccacttcagctccacaccctcaatcggttgctaggagcccatcctgggtcagaggccgatccgcagaaccagaacgttttcccctcctggactgttagtaacttagtctccctcctcccgactcggaccgatg

SEQ ID NO: 11459 - DNA, 203 bp, Artificial sequence
  synthetic
ggcgcgccagtccttaggatcacaaagacagaacttaacctctgcaagcaagattcgtggaagatagtctccactttttaatgcactaagcaatcggttgctaggagcccatcctgggcagctacttaccatgcagaaccagaacgttttcccctcctggactgttagtaacttagtctccctcctcccgactcggaccgatg

SEQ ID NO: 11460 - DNA, 203 bp, Artificial sequence
  synthetic
ggcgcgccagtcctcgattccacaaagacagaacttaacctctgcaagcaagattcgtggaagatagtctccactttttaatgcactaaggccagttagcgggagagcccatcctgggtcagaggccgatccgcagaaccagaacgttttcccctcctggactgttagtaacttagtctccctcctcccgactcggaccgatg

SEQ ID NO: 11461 - DNA, 203 bp, Artificial sequence
  synthetic
ggcgcgccagtcctaacactaccaaatcgctatcgccacaaggctagtccaccgctgcctatgggcgaagtcaagccctccaacctaatctccataaacagtgtctaagacgaacctcagcgaaagaaggaagatctctagacctactggaaataacataactctggacctattggaacttatataatcgactcggaccgatg

SEQ ID NO: 11462 - DNA, 203 bp, Artificial sequence
  synthetic
ggcgcgccagtcctcggtcatccaaatcgctatcgccacaaggctagtgataataactaagggggcgaagtcaagccctccaacctaatcaagcacgctgaaacctaagacgaacctcagcgaaagaaggaagatctctagacctactggaaataacataactctggacctattggaacttatataatcgactcggaccgatg

SEQ ID NO: 11463 - DNA, 203 bp, Artificial sequence
  synthetic
ggcgcgccagtcctcgtgcagtcaaatcgctatcgccacaaggctagtgataataactaagggggcgaagtcaagccctccaacctaatctccataaacagtgtctaagacgaacctcagcgaaagaaggaagatctctagacctaggattccgtcatgtactctggacctattggaacttatataatcgactcggaccgatg

SEQ ID NO: 11464 - DNA, 203 bp, Artificial sequence
  synthetic
ggcgcgccagtccttcacccgccaacacccgagcaaggacgcgactctcccgacgcggggaggctattctgcccatttggggacacttccgtaagtgatgagatacccgcttctctgaaaggctctccttgcagctgcttagacgctggatttttttcgggtagtggaaaaccagcagcctcccgcgacgactcggaccgatg

SEQ ID NO: 11465 - DNA, 203 bp, Artificial sequence
  synthetic
ggcgcgccagtcctcataaatacaacacccgagcaaggacgcgactctggatggcaaactccgctattctgcccatttggggacacttccccgccgctgccaggacccgcttctctgaaaggctctccttgcagctgcttagacgctggatttttttcgggtagtggaaaaccagcagcctcccgcgacgactcggaccgatg

SEQ ID NO: 11466 - DNA, 203 bp, Artificial sequence
  synthetic
ggcgcgccagtcctgagctagtcaacacccgagcgccacaagcgtatccccgacgcggggaggctattctgcccatttggggacacttccccgccgctgccaggacccgcttctctgaaaggctctccttgcagctgcttagacgctggatttttttcgggtagtggaaaaccagcagcctcccgcgacgactcggaccgatg

SEQ ID NO: 11467 - DNA, 203 bp, Artificial sequence
  synthetic
ggcgcgccagtcctacattattcaaccaccttagatgaactttcagtagactcatgacgctcgcgtgatgacaagcgccaagcttgacttggatggccctgatgggcgttcatgggttcggtggtggtggcgctttaggcagcctccacgcccaccacctcccagatagagcggcggcactgtagggacgactcggaccgatg

SEQ ID NO: 11468 - DNA, 203 bp, Artificial sequence
  synthetic
ggcgcgccagtcctgaacgagccaaccaccttagtatgtaggcggcgggactcatgacgctcgcgtgatgacaagcgccaagcttgacttggatggccctgatgggcgttcatgggttcggtggtggtggcgctttaggcagcctccacgcccaccacctcccagatagagcggcggcactgtagggacgactcggaccgatg

SEQ ID NO: 11469 - DNA, 203 bp, Artificial sequence
  synthetic
ggcgcgccagtcctaatacccgcaaccaccttagtatgtaggcggcgggactcatgacgctcgcgtgatgacaagcgccaagcttgacttggatggccctgatgtctaaggcacatcccggtggtggtggcgctttaggcagcctccacgcccaccacctcccagatagagcggcggcactgtagggacgactcggaccgatg

SEQ ID NO: 11470 - DNA, 203 bp, Artificial sequence
  synthetic
ggcgcgccagtccttgacgggccaaccagatcaaagaaaaaacagacagcgtcaatggcagagcaaaaatgtaacacctctacaatggatgccgacaagattgtattcaaagtcaataatcaggtggtctctttgaagcctgagattatcgtggatcaatcgcgtcgatgaatacctgccatcaaagacgactcggaccgatg

SEQ ID NO: 11471 - DNA, 203 bp, Artificial sequence
  synthetic
ggcgcgccagtcctatcttagccaaccagcagagagggattgagcttcattgaactcaacagagccaacatttcatagcaccatgttcaactttgaacatccaaggcatggcaatggttagagaccctgctgggcgtgaacaccctctggctacctagggacctgtgggcctaccacctggtgccctccgactcggaccgatg

SEQ ID NO: 11472 - DNA, 203 bp, Artificial sequence
  synthetic
ggcgcgccagtccttggactgacaaccagcagagagggattgagcttcattgaactcaacagagccaacatttcatagcaccatgttcaagaggaggttgaagtggcatggcaatggttagagaccctgctgcctcactgggggtcctggctacctagggacctgtgggcctaccacctggtgccctccgactcggaccgatg

SEQ ID NO: 11473 - DNA, 203 bp, Artificial sequence
  synthetic
ggcgcgccagtcctgcaaggttcaaccagcagagagggattgagcttcattgaactcaacagagccaacatttcatagcaccatgttcaagaggaggttgaagtggcatggcaatggttagagaccctgctgggcgtgaacaccctctggctacctagggacctgtgggcctacattacaacagtactcgactcggaccgatg

SEQ ID NO: 11474 - DNA, 203 bp, Artificial sequence
  synthetic
ggcgcgccagtccttctaacgacaaccagcagagagggattgagcttcattgaactcaacagagccaacatttcatagcaccatgttcaagaggaggttgaagtggcatggcaatggttagagaccctgctgggcgtgaacaccctctggctacctagggacctgtgggcctaccacctggtgccctccgactcggaccgatg

SEQ ID NO: 11475 - DNA, 203 bp, Artificial sequence
  synthetic
ggcgcgccagtcctgcagattccaaccagcagagagggattgagcttcattgaactcaacagagccaacatttcatagcaccatgttcaagaggaggttgaagtggcatggcaatggttagagaccctgctgggcgtgaacacccttgattggagcgataacctgtgggcctaccacctggtgccctccgactcggaccgatg

SEQ ID NO: 11476 - DNA, 203 bp, Artificial sequence
  synthetic
ggcgcgccagtcctggctttcacaaccagcagagagggattgagcttcattgaactcaacagagccaacatttcatgaacgtgctaaagggaggaggttgaagtggcatggcaatggttagagaccctgctgggcgtgaacaccctctggctacctagggacctgtgggcctaccacctggtgccctccgactcggaccgatg

SEQ ID NO: 11477 - DNA, 203 bp, Artificial sequence
  synthetic
ggcgcgccagtcctgctctatacaaccagcagagagggattgagcttcccccctgaatctgcagccaacatttcatagcaccatgttcaagaggaggttgaagtggcatggcaatggttagagaccctgctgggcgtgaacaccctctggctacctagggacctgtgggcctaccacctggtgccctccgactcggaccgatg

SEQ ID NO: 11478 - DNA, 203 bp, Artificial sequence
  synthetic
ggcgcgccagtcctggcggtgtcaaccagcagagccaccagtcctgaaattgaactcaacagagccaacatttcatagcaccatgttcaagaggaggttgaagtggcatggcaatggttagagaccctgctgggcgtgaacaccctctggctacctagggacctgtgggcctaccacctggtgccctccgactcggaccgatg

SEQ ID NO: 11479 - DNA, 203 bp, Artificial sequence
  synthetic
ggcgcgccagtcctggacccatcaacggccacctcttccaagccaagcgctttaacaggagacgtcgaacttcgttgtgcagcgagaggatatggggcctcgcgaggcaaggctacaggtgcatcaactgcaaactgctggtccataagcgctgccacggcctcgtcccgctgacctgcaggaagcatcgactcggaccgatg

SEQ ID NO: 11480 - DNA, 203 bp, Artificial sequence
  synthetic
ggcgcgccagtcctcacgtagccaacggccacctcttccaagccaagcgctttaacaggagagcgtactgcggtcacgtggaacccccagtatggggcctcgcgaggcaaggctacaggtgcatcaactgcaaactgctggtccataagcgctgccacggcctcgtcccgctgacctgcaggaagcatcgactcggaccgatg

SEQ ID NO: 11481 - DNA, 203 bp, Artificial sequence
  synthetic
ggcgcgccagtcctgaccactccaacggccacctcttccaagccaagcgctttaacaggagagcgtactgcggtcagtgcagcgagaggaaccctcctagtaataggcaaggctacaggtgcatcaactgcaaactgctggtccataagcgctgccacggcctcgtcccgctgacctgcaggaagcatcgactcggaccgatg

SEQ ID NO: 11482 - DNA, 203 bp, Artificial sequence
  synthetic
ggcgcgccagtcctgtcattctcaacggccacctcttccaagccaagcgctttaacaggagagcgtactgcggtcagtgcagcgagaggatatggggcctcgcgaggcaaggctacagcacacggccactggaactgctggtccataagcgctgccacggcctcgtcccgctgacctgcaggaagcatcgactcggaccgatg

SEQ ID NO: 11483 - DNA, 203 bp, Artificial sequence
  synthetic
ggcgcgccagtcctctgcaatacaacggccacctcttccaagccaagcgctttaacaggagagcgtactgcggtcagtgcagcgagaggatatggggcctcgcgaggcaaggctacaggtgcatcaactgcaaactgctggtccataagcgctgccacggcctcgtcccgctgacctgcaggaagcatcgactcggaccgatg

SEQ ID NO: 11484 - DNA, 203 bp, Artificial sequence
  synthetic
ggcgcgccagtcctcggatcgccaacggccacctcttccaagccaagcgctttaacaggagagcgtactgcggtcagtgcagcgagaggatatggggcctcgcgaggcaaggctacaggtgcatcaactgcaaactgctggtccataagcgctgccacggtgatacgggagactcctgcaggaagcatcgactcggaccgatg

SEQ ID NO: 11485 - DNA, 203 bp, Artificial sequence
  synthetic
ggcgcgccagtccttgcaggaccaacggccacctcttccaagccaagcttaccgggcacgccgcgtactgcggtcagtgcagcgagaggatatggggcctcgcgaggcaaggctacaggtgcatcaactgcaaactgctggtccataagcgctgccacggcctcgtcccgctgacctgcaggaagcatcgactcggaccgatg

SEQ ID NO: 11486 - DNA, 203 bp, Artificial sequence
  synthetic
ggcgcgccagtcctcaatgggtcaactgctgctcctatgtacagaatacccgctcctttgggggctacctgtactacccaggctcctaccccagcagcctggtctacagcactgccctctgctctcccagcacctgccagctgcgttcctctctctacagggactgtcagaagacctgctgggagccccgactcggaccgatg

SEQ ID NO: 11487 - DNA, 203 bp, Artificial sequence
  synthetic
ggcgcgccagtcctatccttcccaactgctgctctagaaacttcagaggtagctcctttgggggctacctggctgcagcaggctcctaccccagcagcctggtctacagcactgccctctgctctcccagcacctgccagctgcgttcctctctctacagggactgtcagaagacctgctgggagccccgactcggaccgatg

SEQ ID NO: 11488 - DNA, 203 bp, Artificial sequence
  synthetic
ggcgcgccagtcctgattcgcccaactgctgctctagaaacttcagaggtagctcctttgggggctacctgtactacccaggctcctaccccagcagcctggtctacagcactgccctctgctctcccagcacctgccagctgcgttcctctctctacagggactgtcagaagacctgctgggagccccgactcggaccgatg

SEQ ID NO: 11489 - DNA, 203 bp, Artificial sequence
  synthetic
ggcgcgccagtcctggatgggacaactgctgctctagaaacttctcctcccgctcctttgggggctacctggctgcagcaggctcctaccccagcagcctggtctacagcactgccctctgctctcccagcacctgccagctgcgttcctctctctacagggactgtcagaagacctgctgggagccccgactcggaccgatg

SEQ ID NO: 11490 - DNA, 203 bp, Artificial sequence
  synthetic
ggcgcgccagtcctatccactacaactgctgctctagaaacttctcctcccgctcctttgggggctacctgtactacccaggctcctaccccagcagcctggtctacagcactgccctagcggtaatatcgtcctgccagctgcgttcctctctctacagggactgtcagaagacctgctgggagccccgactcggaccgatg

SEQ ID NO: 11491 - DNA, 203 bp, Artificial sequence
  synthetic
ggcgcgccagtcctaccaactgcaactgctgctctagaaacttctcctcccgctcctttgggggctacctgtactacccaggctcctaccccagcagcctggtctacagcactgccctctgctctcccagcacctgccagctgcgttcctctctctacagaagaccggtacttccctgctgggagccccgactcggaccgatg

SEQ ID NO: 11492 - DNA, 203 bp, Artificial sequence
  synthetic
ggcgcgccagtcctagccagcacaactgctgctctagaaacttctcctcccgctcctttgggggctacctgtactacccaggctcctaccccagcagcctggtctacagcactgccctctgctctcccagcacctgccagctgcgttcctctctctacagggactgtcagaagatactgctatccttacgactcggaccgatg

SEQ ID NO: 11493 - DNA, 203 bp, Artificial sequence
  synthetic
ggcgcgccagtcctaggtaactcaactgctgctctagaaacttctcctcccgctcctttgggggctacctgtactacccaggctcctaccccagcagcctggtctacagcactgccctctgctctcccagcagtatatccgcagagtcctctctctacagggactgtcagaagacctgctgggagccccgactcggaccgatg

SEQ ID NO: 11494 - DNA, 203 bp, Artificial sequence
  synthetic
ggcgcgccagtcctaatcacttcaactgctgctctagaaacttctcctcccgctcctttgggttgccatcagcgctcccaggctcctaccccagcagcctggtctacagcactgccctctgctctcccagcacctgccagctgcgttcctctctctacagggactgtcagaagacctgctgggagccccgactcggaccgatg

SEQ ID NO: 11495 - DNA, 203 bp, Artificial sequence
  synthetic
ggcgcgccagtccttaagggttcaactgctgctgtggaaacttcggaatggattcctgtgagggctacctgtgctactcaggcactggaagtggtggctcctcgtaccccagcaacctggtctacagcactgaacctttgatctcccagcacctgccagctgggttcctctctctgcaagggctttcacgactcggaccgatg

SEQ ID NO: 11496 - DNA, 203 bp, Artificial sequence
  synthetic
ggcgcgccagtcctacaagcgccaactgctgctgtggaaacttcggaatggattcctgtgagggctacctgtgctactcaggctactcccgtggtggctcctcgtaccccagcaacctggtctacagcactgaacctttgatctcccagcacctgccagctgggttcctctctctgcaagggctttcacgactcggaccgatg

SEQ ID NO: 11497 - DNA, 203 bp, Artificial sequence
  synthetic
ggcgcgccagtcctttaccacacaactgctgctgtggaaacttctcctcccattcctgtgagactgcagccctggtctcaggctactcccgtggtggctcctcgtaccccagcaacctggtctacagcactgaacctttgatctcccagcacctgccagctgggttcctctctctgcaagggctttcacgactcggaccgatg

SEQ ID NO: 11498 - DNA, 203 bp, Artificial sequence
  synthetic
ggcgcgccagtcctttgtcctgcaactgctgctgtggaaacttctcctcccattcctgtgagggctacctgtgctactcaggcactggaagtggtggctcctcgtaccccagcaacctggtctacagcactgaacctttgatctcccagcacctgccagctgggttcctctctctgcaagggctttcacgactcggaccgatg

SEQ ID NO: 11499 - DNA, 203 bp, Artificial sequence
  synthetic
ggcgcgccagtccttctctgagcaactgctgctgtggaaacttctcctcccattcctgtgagggctacctgtgctactcaggctactcccgtggtggctcctcgagaatttaggtggcggtctacagcactgaacctttgatctcccagcacctgccagctgggttcctctctctgcaagggctttcacgactcggaccgatg

SEQ ID NO: 11500 - DNA, 203 bp, Artificial sequence
  synthetic
ggcgcgccagtcctcttactagcaactgctgctgtggaaacttctcctcccattcctgtgagggctacctgtgctactcaggctactcccgtggtggctcctcgtaccccagcaacctggtctacagcactgaacctttgatctcccagcacctgccagctgggttcctctctccttgttcttggatccgactcggaccgatg

SEQ ID NO: 11501 - DNA, 203 bp, Artificial sequence
  synthetic
ggcgcgccagtcctagttcctccaactgctgctgtggaaacttctcctcccattcctgtgagggctacctgtgctactcaggctactcccgtggtggctcctcgtaccccagcaacctggtctacagcactgaacctttgatctcccagcacctgccagctgggttcctctctctgcaagggctttcacgactcggaccgatg

SEQ ID NO: 11502 - DNA, 203 bp, Artificial sequence
  synthetic
ggcgcgccagtcctcctggacacaactgctgctgtggaaacttctcctcccattcctgtgagggctacctgtgctactcaggctactcccgtggtggctcctcgtaccccagcaacctggtctacagcactgaacctttgatctcctttactggaaagcatgggttcctctctctgcaagggctttcacgactcggaccgatg

SEQ ID NO: 11503 - DNA, 203 bp, Artificial sequence
  synthetic
ggcgcgccagtcctaactgattcaactgctgctgtggaaacttctcctcccattcctgtgagggctacctgtgctactcaggctactcccgtggtggctcctcgtaccccagcaaccttacgactgaggactaacctttgatctcccagcacctgccagctgggttcctctctctgcaagggctttcacgactcggaccgatg

SEQ ID NO: 11504 - DNA, 203 bp, Artificial sequence
  synthetic
ggcgcgccagtcctttacctaccaactgctgctgtggaaacttctcctcccattcctgtgagggctacctgtgctactcaggctactccctcacctttcgaggataccccagcaacctggtctacagcactgaacctttgatctcccagcacctgccagctgggttcctctctctgcaagggctttcacgactcggaccgatg

SEQ ID NO: 11505 - DNA, 203 bp, Artificial sequence
  synthetic
ggcgcgccagtcctcaggtacacaagagacggcccaatctcaagcgcctctgtagggaagccaagaatgtccaggaggtaccccttcctctcggaagggatctgacctggagacacatcacacgtgctttacacctgtgcttgtgtttaaaaattgttacagcttccccgaaccaagtggtcttggttcgactcggaccgatg

SEQ ID NO: 11506 - DNA, 203 bp, Artificial sequence
  synthetic
ggcgcgccagtcctctatacaacaagcggcttctaacaggttggaataccgtcgcagatgacaacaccgtccacttcaattccaccctcatggctctgatccgcacagccctggacatcaagattgccaagggaggagccgacaaacagcagatggacgctgagctgcggaaggagatgatggcgattcgactcggaccgatg

SEQ ID NO: 11507 - DNA, 203 bp, Artificial sequence
  synthetic
ggcgcgccagtcctcccatttgcaagcggcttctgcggatggacctgcccgtcgcagatgacaacaccgtccacttcaattccaccctcatggctctgatccgcacagccctggacatcaagattgccaagggaggagccgacaaacagcagatggacgctgagctgcggaaggagatgatggcgattcgactcggaccgatg

SEQ ID NO: 11508 - DNA, 203 bp, Artificial sequence
  synthetic
ggcgcgccagtcctataatatccaagcggcttctgcggatggacctgcccgtcgcagatgacaacaccgtccacttcaattccaccctcatggctctgatccgcacagccctggacatgcctgcgaatccatgaggagccgacaaacagcagatggacgctgagctgcggaaggagatgatggcgattcgactcggaccgatg

SEQ ID NO: 11509 - DNA, 203 bp, Artificial sequence
  synthetic
ggcgcgccagtcctgggccggccaagcggcttctgcggatggacctgcccgtcgcagatgacaacaccgtccacttcaattccaccctcatggctctgatccgccgttaatactgatacaagattgccaagggaggagccgacaaacagcagatggacgctgagctgcggaaggagatgatggcgattcgactcggaccgatg

SEQ ID NO: 11510 - DNA, 203 bp, Artificial sequence
  synthetic
ggcgcgccagtccttttacgaccaagtacgtaatgacgacagacgttcaactggatgattccctactgcgagaatgaagactattctcagcaatcagactgtcgacattccagaaaatgtcgacattactctgaagggacgcacagttatcgtgaagggccccagaggaaccctgcggagggacttcacgactcggaccgatg

SEQ ID NO: 11511 - DNA, 203 bp, Artificial sequence
  synthetic
ggcgcgccagtcctccgccatgcaagttcagatcaggcaaggaacaaaaaaatctgagtgccacaagaccaaagaagagtacacttaagttgaagacacaacacttgatctgaaacaagaagtttgtgcctactcaacagctttgaaagagcacttcccaacgctgctagtagtctttgttttcttcacgactcggaccgatg

SEQ ID NO: 11512 - DNA, 203 bp, Artificial sequence
  synthetic
ggcgcgccagtcctcccaggcccaagttcagatcaggcaaggaacaaacctcgtaacaactaacaagaccaaagaagagtacacttaagttgaagacacaacacagatgtgtggtgtggaagtttgtgcctactcaacagctttgaaagagcacttcccaacgctgctagtagtctttgttttcttcacgactcggaccgatg

SEQ ID NO: 11513 - DNA, 203 bp, Artificial sequence
  synthetic
ggcgcgccagtcctggtgatatcaagttcagatcaggcaaggaacaaacctcgtaacaactaacaagaccaaagaagagtacacttaagttgaagacacaacacttgatctgaaacaagaagtttgtgcctactcaacagctttgaaagagcacttcccagacagagacaagtgctttgttttcttcacgactcggaccgatg

SEQ ID NO: 11514 - DNA, 203 bp, Artificial sequence
  synthetic
ggcgcgccagtcctgcacgatgcaagttcctggtgcaaaggtggctctgcagcataatttaggcattggaggagctgtggttgtaacactctacaagatgggttttccggaagccgccagttcttttagaaccaggagtgcgattactgttccaaccagctctgcaagtgatggatttaaggcaaatccgactcggaccgatg

SEQ ID NO: 11515 - DNA, 203 bp, Artificial sequence
  synthetic
ggcgcgccagtcctatcccgtgcaagttcctggtgcaaaggtggctctgcagcataatttaggcattggaggagctgtggttgtaacactctacaagatgggttttccggaagccgccagttcttttagaactcatcaaattgaagctgttccaaccagccacttggtcatcatatttaaggcaaatccgactcggaccgatg

SEQ ID NO: 11516 - DNA, 203 bp, Artificial sequence
  synthetic
ggcgcgccagtcctcatatcttcaagttcctggtgcaaaggtggctctgcagcataatttaggcattggaggagctgtggttgtaacactctacaagatgggttttccggaagccgccagttcttttagaactcatcaaattgaagctgttccaaccagctctgcaagtgatggccacttctaggggtcgactcggaccgatg

SEQ ID NO: 11517 - DNA, 203 bp, Artificial sequence
  synthetic
ggcgcgccagtcctatgttccacaagttcctggtgcaaaggtggctctgcagcataatttaggcattggaggagctgtggttgtaacactctacaagatgggttttccggaagccgccttcgtgcacctttttcatcaaattgaagctgttccaaccagctctgcaagtgatggatttaaggcaaatccgactcggaccgatg

SEQ ID NO: 11518 - DNA, 203 bp, Artificial sequence
  synthetic
ggcgcgccagtcctaccacatccaagttcctggtgcaaaggtggctctgcagcataatttaggcattggaggagcttgaccccattgcagctacaagatgggttttccggaagccgccagttcttttagaactcatcaaattgaagctgttccaaccagctctgcaagtgatggatttaaggcaaatccgactcggaccgatg

SEQ ID NO: 11519 - DNA, 203 bp, Artificial sequence
  synthetic
ggcgcgccagtcctaatgctatcaagttcctggtgcaaaggtggctcttttcgtcctaaactgcattggaggagctgtggttgtaacactctacaagatgggttttccggaagccgccagttcttttagaactcatcaaattgaagctgttccaaccagctctgcaagtgatggatttaaggcaaatccgactcggaccgatg

SEQ ID NO: 11520 - DNA, 203 bp, Artificial sequence
  synthetic
ggcgcgccagtcctcgtttgttcaagttcctggttacggccctagctcgcagcataatttaggcattggaggagctgtggttgtaacactctacaagatgggttttccggaagccgccagttcttttagaactcatcaaattgaagctgttccaaccagctctgcaagtgatggatttaaggcaaatccgactcggaccgatg

SEQ ID NO: 11521 - DNA, 203 bp, Artificial sequence
  synthetic
ggcgcgccagtcctctcttctacaataagtctgcttccaccttccagcttactggcttcccactgcctagttcataacatcactggatattcatcccattattggcagcctacatctccatacttcttggcaatggcactcttctctttctcatcaggaatgatcataacctccatgagcccatgtaccgactcggaccgatg

SEQ ID NO: 11522 - DNA, 203 bp, Artificial sequence
  synthetic
ggcgcgccagtcctagacaatacaataagtctgcttccaccttccagcttactggcttcccaggcatggagaaggcacatcactggatatcgcgtgacaagcgagcagcctacatctccatacttcttggcaatggcactcttctctttctcatcaggaatgatcataacctccatgagcccatgtaccgactcggaccgatg

SEQ ID NO: 11523 - DNA, 203 bp, Artificial sequence
  synthetic
ggcgcgccagtcctccacttggcaataagtctgcttccaccttccagcttactggcttcccaggcatggagaaggcacatcactggatattcatcccattattggcagcctacatctccatacttcttggcaatggcactcttctctttctcatcaggaatgatcataacctccatgagcccatgtaccgactcggaccgatg

SEQ ID NO: 11524 - DNA, 203 bp, Artificial sequence
  synthetic
ggcgcgccagtcctgagcattgcaataagtctgcttccaccttccagcttactggcttcccaggcatggagaaggcacatcactggatattcatcccattattggcagcctacatctccatacttcttggcataactgaaacctcgtttctcatcaggaatgatcataacctccatgagcccatgtaccgactcggaccgatg

SEQ ID NO: 11525 - DNA, 203 bp, Artificial sequence
  synthetic
ggcgcgccagtcctacgtcgctcaatcaagaaaccaaaagacaactcacaatctccctaaaacagcaacgacaccatgtcagctttgctcaaatctctctgggagaaacttttgcccaatggtctcttgatacacaaccatctcaagaaaagaaactgggcaaaacagcatccaagagacaaatagcacgactcggaccgatg

SEQ ID NO: 11526 - DNA, 203 bp, Artificial sequence
  synthetic
ggcgcgccagtcctcctagtgacaatcaagaaaccaaaagacaactcacaatctccctaaaacagcaacgacaccatgtcagctttgctcctggaatgtgccacgaaacttttgcccacatactaacaacatcacaaccatctcaagaaaagaaactgggcaaaacagcatccaagagacaaatagcacgactcggaccgatg

SEQ ID NO: 11527 - DNA, 203 bp, Artificial sequence
  synthetic
ggcgcgccagtcctgctgaagtcaatcgggtgtcaattttggatctccccccccccacccccctttggatcttgtcgggctttccacgttagcaccggtgtttcttcttgtaacgtccaaggcaagctccccacgacccgaacacgcccagaggaaccttggggcctctggggacttggctagcaggtcgactcggaccgatg

SEQ ID NO: 11528 - DNA, 203 bp, Artificial sequence
  synthetic
ggcgcgccagtccttaaacgcgcaatcgggtgtcaattttggatctccccccccccacccccctttggatcttgtcgggctttccacgtttcacttaaaaaaaattcttgtaacgtccaaggcaagctccccacgacccgaacacgagttccccgtagcgggggcctctggggacttggctagcaggtcgactcggaccgatg

SEQ ID NO: 11529 - DNA, 203 bp, Artificial sequence
  synthetic
ggcgcgccagtcctgccaagatcaatcgggtgtcaattttggatctccccccccccacccccctttggatcttgtcgggctttccacgtttcacttaaaaaaaattcttgtaacgtcctttcgcttggtttgacgacccgaacacgcccagaggaaccttggggcctctggggacttggctagcaggtcgactcggaccgatg

SEQ ID NO: 11530 - DNA, 203 bp, Artificial sequence
  synthetic
ggcgcgccagtcctacccaagtcaatcgggtgtctccgaactcatatgccccccccacccccctttggatcttgtcgggctttccacgtttcacttaaaaaaaattcttgtaacgtccaaggcaagctccccacgacccgaacacgcccagaggaaccttggggcctctggggacttggctagcaggtcgactcggaccgatg

SEQ ID NO: 11531 - DNA, 203 bp, Artificial sequence
  synthetic
ggcgcgccagtccttatgtactcaatgagcgcgcctgctaaaaactcgcggctggtgcgcgagacgccgccgagaggggcactatggcagacaaagttaggaggcagaggccgaggaggcgagtctgttgggccttggtggctgtgctcttggcagacctgttggcactgagtgatacactggcagtgcgactcggaccgatg

SEQ ID NO: 11532 - DNA, 203 bp, Artificial sequence
  synthetic
ggcgcgccagtcctacgggaaacaatgagcgcgcgccgcgtccggggccggctggtgcgcgagacgccgccgagaggggcactatggcagacaaagttaggaggggttatttagaccagcgagtctgttgggccttggtggctgtgctcttggcagacctgttggcactgagtgatacactggcagtgcgactcggaccgatg

SEQ ID NO: 11533 - DNA, 203 bp, Artificial sequence
  synthetic
ggcgcgccagtcctagtagttccaatgcaggcattagtttctcagttaaaaaacaaggagagacagtagctgatgttaggacactacccaatgcctcaaccgtgcggctctgcgtaagcatctttggaaatgctgttagtcgagaactgatagaaattggatgtgaggataaaaccctagccttcaaacgactcggaccgatg

SEQ ID NO: 11534 - DNA, 203 bp, Artificial sequence
  synthetic
ggcgcgccagtcctgttacaatcaatgcaggcattagtttctcagttaaaaaacaaggagagacagtagctgatgttaggacactacccaatgcctcaaccgtggacaatattcgctccatctttggaaatgaaagggcagagcgtctgatagaaattggatgtgaggataaaaccctagccttcaaacgactcggaccgatg

SEQ ID NO: 11535 - DNA, 203 bp, Artificial sequence
  synthetic
ggcgcgccagtcctgggcatcacaatgcaggcattagtttctcagttaaaaaacaaggagagacagtagctgatgttaggacactacccaatgcctcaaccgtggacaatattcgctctggaagcaattcatctgttagtcgagaactgatagaaattggatgtgaggataaaaccctagccttcaaacgactcggaccgatg

SEQ ID NO: 11536 - DNA, 203 bp, Artificial sequence
  synthetic
ggcgcgccagtccttaccgcagcaatgcaggcattagtttctcagttaaaaaacaaggagagacagtagctgatgttaggacactacccatccttcgctattaagacaatattcgctccatctttggaaatgctgttagtcgagaactgatagaaattggatgtgaggataaaaccctagccttcaaacgactcggaccgatg

SEQ ID NO: 11537 - DNA, 203 bp, Artificial sequence
  synthetic
ggcgcgccagtcctgcgacagccaatgcaggcattagtttctcagttaaaaaacaaggagagcattagaaaatgtctaggacactacccaatgcctcaaccgtggacaatattcgctccatctttggaaatgctgttagtcgagaactgatagaaattggatgtgaggataaaaccctagccttcaaacgactcggaccgatg

SEQ ID NO: 11538 - DNA, 203 bp, Artificial sequence
  synthetic
ggcgcgccagtcctttgacgcacacactaatattatccagattagagagcttaattagctctgtattaataataacactactattccaataactggaatcaccaagagttcgacatggcaaaatgattcaaagaaaacaaatcatattaagactatcctaagcacgaacccatatcgtccttcaaatccgactcggaccgatg

SEQ ID NO: 11539 - DNA, 203 bp, Artificial sequence
  synthetic
ggcgcgccagtccttgcaccggcacactaatattatccagattagagagcttaattagctctgtattaataataacactactattccaataactggaatcaccagcttgatttatctccaaaatgattcaaagaaaacaaatcataagggtggaggagagagcacgaacccatatcgtccttcaaatccgactcggaccgatg

SEQ ID NO: 11540 - DNA, 203 bp, Artificial sequence
  synthetic
ggcgcgccagtcctggttagtccacactaatattatccagattagagagcttaattagctctgtattaataataacactactattccaataactggaatcaccagcttgatttatctccaaaatgattcaaatcgcctgggctcgcttaagactatcctaagcacgaacccatatcgtccttcaaatccgactcggaccgatg

SEQ ID NO: 11541 - DNA, 203 bp, Artificial sequence
  synthetic
ggcgcgccagtcctgatgccagcacagatcagctcaaccagacaccaccagcatacacgaaaccaaccttcacagtggatacctcagcatccaaaactctccttcccgaatggatcaggatgccttcttttttgagagggatcctgaagccgaaggagaggcaccacgaaaacaagaatcactctcagcgactcggaccgatg

SEQ ID NO: 11542 - DNA, 203 bp, Artificial sequence
  synthetic
ggcgcgccagtcctggattatccacagatcagctcaaccagacaccaccagcatacacgaaaccaaccttcacagtggatacctcagcatccaaaactctccttcccgaatggatcaggatgccttcttttttgagagggatcctgaagccgaaggagagtataggacccggagagaatcactctcagcgactcggaccgatg

SEQ ID NO: 11543 - DNA, 203 bp, Artificial sequence
  synthetic
ggcgcgccagtcctgataatcacacatctctctggccacgtggacgagggcatgcccaaagcacatcttaacctgagcgggggtcgcccaggtaaaagcagttttaaccgactgttacgaatacagcctgatagggtgctgcagaggcccactgtattgctactaaaaatctctgctgtacatggcaccgactcggaccgatg

SEQ ID NO: 11544 - DNA, 203 bp, Artificial sequence
  synthetic
ggcgcgccagtcctcggttaatcacccgccatagcaatggagaccccgaaaggacaatgcaataattaatccttcttttttgcttcacaataaaaatagcatggctcttctgattgtaaaaagtgatatacactccttatttaacgaaaaattcaaagaatttgataaatgacaggcgaaaagtcaaacgactcggaccgatg

SEQ ID NO: 11545 - DNA, 203 bp, Artificial sequence
  synthetic
ggcgcgccagtcctggaagtctcacccgccatagcaatggagaccccgcctcctgctacagttaattaatccttcttttttgcttcacaataaaaatagcatggctcttctgattgtaaaaagtgatatacactccttatttaacgaaaaattcaaagaaggctggtgtctcatggcgaaaagtcaaacgactcggaccgatg

SEQ ID NO: 11546 - DNA, 203 bp, Artificial sequence
  synthetic
ggcgcgccagtcctggtccgtgcacccgccatagttgcctcccggtaccctcctgctacagttaattaatccttcttttttgcttcacaataaaaatagcatggctcttctgattgtaaaaagtgatatacactccttatttaacgaaaaattcaaagaatttgataaatgacaggcgaaaagtcaaacgactcggaccgatg

SEQ ID NO: 11547 - DNA, 203 bp, Artificial sequence
  synthetic
ggcgcgccagtcctcggagacccaccgaggatgctctgaatgatatcaagcgagacatcataagaagcgccatatgaactcaccaggaacaccagactcacgggcccgatgcgtgggagaaagccacaatgattccctgtttaataaaaaataagcacgaacacaagtccaatccaaccatagcagcacgactcggaccgatg

SEQ ID NO: 11548 - DNA, 203 bp, Artificial sequence
  synthetic
ggcgcgccagtcctggacaacccaccgggccggttggggccccgctcgccggcgggagccaccggagccccggccaacccatttgtaacacccccgccggccccgccctcccggctgcggcctggccaatcagagcggctcttactggcgggtgggctgagccggcccagctgctcggaggctctggccgactcggaccgatg

SEQ ID NO: 11549 - DNA, 203 bp, Artificial sequence
  synthetic
ggcgcgccagtcctaggaacggcaccgggccggttggggccccgctcgttacgtctggccaccggagccccggccacgaaggggtgcgaccccccgccggccccgccctcccggctgcggcctggccaatcagagcggctcttagaactaccagggctgagccggcccagctgctcggaggctctggccgactcggaccgatg

SEQ ID NO: 11550 - DNA, 203 bp, Artificial sequence
  synthetic
ggcgcgccagtcctagcaatatcacgccttcatgtaaaagaatcagagtgtctcaacccttgacaagaggaccaagtgcctttattccagagaaggaagttgtccaagcaaacacagtggatgaacgtactaactttcttgtggaagaatactctacatccggtcgtctggacaacatcacacaggtccgactcggaccgatg

SEQ ID NO: 11551 - DNA, 203 bp, Artificial sequence
  synthetic
ggcgcgccagtcctatcgggtccacgcgagccgttggtggttgttgtgatgattatactggataccaggagttagtaatcaaaacttcacatgacgactaagttcgtctttgattcattgcactgatctcttgttagatctttttgcaatctagcatttgttaaagttcttaaggccacgccctattacgactcggaccgatg

SEQ ID NO: 11552 - DNA, 203 bp, Artificial sequence
  synthetic
ggcgcgccagtcctcacaagaccacgttggttagtccatcttcccggggccgcgccgcgcgcgcgcgcgggctttgggcgggaccctgcagaggcggcggggctcctcctcccgctcctcctcggcctccccttcgggcgctctcgcgctaactgtgctcctccggggccctccgcctgctcccagcccgactcggaccgatg

SEQ ID NO: 11553 - DNA, 203 bp, Artificial sequence
  synthetic
ggcgcgccagtcctcctggcgtcactggtgacagcggcgtacaataaatcaggtaccccgaggtaacacgcgacactcgggatctgagaaggggactggggcttctataaaagcgctcggtttaaaaagcttctatgcctgaataggtgaccggaggtcggcacctttcctttacaattaatgaccctcgactcggaccgatg

SEQ ID NO: 11554 - DNA, 203 bp, Artificial sequence
  synthetic
ggcgcgccagtcctcattaggacactggtgacaggctaaggatgccctgactacgaggttttgtaacacgcgacactcgggatctgagaaggggactggggcttctataaaagcgctcggtttaaaaagcttctatgcctgaataggtgaccggaggtcggcacctttcctttacaattaatgaccctcgactcggaccgatg

SEQ ID NO: 11555 - DNA, 203 bp, Artificial sequence
  synthetic
ggcgcgccagtcctgttgtaaccactggtgacaggctaaggatgcccttcaggtaccccgaggtaacacgcgacactcgggatctgagaaggggactggggcttctataaaagcgctcccggattgccctgactatgcctgaataggtgaccggaggtcggcacctttcctttacaattaatgaccctcgactcggaccgatg

SEQ ID NO: 11556 - DNA, 203 bp, Artificial sequence
  synthetic
ggcgcgccagtcctgcgcatgccactggtgacaggctaaggatgcccttcaggtaccccgaggtaacacgcgacactcgggatctgagaaggggactggggcttctataaaagcgctcggtttaaaaagcttaagctgagtctactgtgaccggaggtcggcacctttcctttacaattaatgaccctcgactcggaccgatg

SEQ ID NO: 11557 - DNA, 203 bp, Artificial sequence
  synthetic
ggcgcgccagtcctcctgggtccactggtgacaggctaaggatgcccttcaggtaccccgaggtaacacgcgacactcgggatctgagaaggggactggggcttctataaaagcgctcggtttaaaaagcttctatgcctgaatagacctatcttctaatgcacctttcctttacaattaatgaccctcgactcggaccgatg

SEQ ID NO: 11558 - DNA, 203 bp, Artificial sequence
  synthetic
ggcgcgccagtcctatggtgagcactggtgacaggctaaggatgcccttcaggtaccccgaggtaacacgcgacactcgggatctgagaaggggactggggcttctataaaagcgctcggtttaaaaagcttctatgcctgaatagcgacttattctcacgcacctttcctttacaattaatgaccctcgactcggaccgatg

SEQ ID NO: 11559 - DNA, 203 bp, Artificial sequence
  synthetic
ggcgcgccagtcctgggctccccactggtgacaggctaaggatgcccttcaggtaccccgaggtaacacgcgacactcgggatctgagaaggggactggggcttctataaaagcgctcggtttaaaaagcttctatgcctgaataggtgaccggaggtcgcgcttaaagagagtcaattaatgaccctcgactcggaccgatg

SEQ ID NO: 11560 - DNA, 203 bp, Artificial sequence
  synthetic
ggcgcgccagtcctctcccaaacactggtgacaggctaaggatgcccttcaggtaccccgaggtaacacgcgacactcgggatctgagaaggggactggggcttctataaaagcgctcggtttaaaaagcttctatgcctgaataggtgaccggaggtcgtacgggcgggggcccaattaatgaccctcgactcggaccgatg

SEQ ID NO: 11561 - DNA, 203 bp, Artificial sequence
  synthetic
ggcgcgccagtcctgtgtttagcactggtgacaggctaaggatgcccttcaggtaccccgaggtaacacgcgacactcgggatctgagaaggggactggggcttgacacgccataggaggtttaaaaagcttctatgcctgaataggtgaccggaggtcggcacctttcctttacaattaatgaccctcgactcggaccgatg

SEQ ID NO: 11562 - DNA, 203 bp, Artificial sequence
  synthetic
ggcgcgccagtcctctctccaccactggtgacaggctaaggatgcccttcaggtaccccgaggtaacacgcgacactcgggatctgagaaggggactggggcttgccctcgtagtgggggtttaaaaagcttctatgcctgaataggtgaccggaggtcggcacctttcctttacaattaatgaccctcgactcggaccgatg

SEQ ID NO: 11563 - DNA, 203 bp, Artificial sequence
  synthetic
ggcgcgccagtcctttgtagtacactggtgacagttacctatcaagtatcaggtaccccgaggtaacacgcgacactcgggatctgagaaggggactggggcttctataaaagcgctcggtttaaaaagcttctatgcctgaataggtgaccggaggtcggcacctttcctttacaattaatgaccctcgactcggaccgatg

SEQ ID NO: 11564 - DNA, 203 bp, Artificial sequence
  synthetic
ggcgcgccagtcctctcggccacactgtaacgatggccggcgggcagcgtgcggcagtgcggagctcctgagaccggcgggcacacgggggtctgtggcccccgccgtagcagtggctgccgccgtcgcttggttcccgtcggtctgcgggaggcgggttatggcggcggcggcagtgagagctgtgacgactcggaccgatg

SEQ ID NO: 11565 - DNA, 203 bp, Artificial sequence
  synthetic
ggcgcgccagtcctatgagccccacttcctctgtaaagctctcaacccctgggaagcgaatgtctctcctgggaaagagccctcccatgcctagctgctgctcttagggaccctgtggctaggtgcgcggatggaaatccaggatctccgcctggttcggcccgcctgcctccactcctgcctctacccgactcggaccgatg

SEQ ID NO: 11566 - DNA, 203 bp, Artificial sequence
  synthetic
ggcgcgccagtcctatgggctgcacttcctctgtaaagctctcaaccctgtccccttccccctctctcctgggaaaagaaaaagaagcttctagctgctgctcttagggaccctgtggctaggtgcgcggatggaaatccaggatctccgcctggttcggcccgcctgcctccactcctgcctctacccgactcggaccgatg

SEQ ID NO: 11567 - DNA, 203 bp, Artificial sequence
  synthetic
ggcgcgccagtccttccaccatcacttcctctgtaaagctctcaaccctgtccccttccccctctctcctgggaaagagccctcccatgcctagctgctgctctcgtatgaatgtgttctaggtgcgcggatggaaatccaggatctccgcctggttcggcccgcctgcctccactcctgcctctacccgactcggaccgatg

SEQ ID NO: 11568 - DNA, 203 bp, Artificial sequence
  synthetic
ggcgcgccagtccttgcttgtgcacttcctctgtaaagctctcaaccctgtccccttccccctctctcctgggaaagagccctcccatgcctagctgctgctcttagggaccctgtggctaggtgcgcggatggaaatccaggatcataagtatacatctcccgcctgcctccactcctgcctctacccgactcggaccgatg

SEQ ID NO: 11569 - DNA, 203 bp, Artificial sequence
  synthetic
ggcgcgccagtcctcgctgacacacttcctctgtaaagctctcaaccctgtccccttccccctctctcctgggaaagagccctcccatgcctagctgctgctcttagggaccctgtggctaggtgcgcggatggaaatccaggatctccgcctggttcggaataagaaagcgttctcctgcctctacccgactcggaccgatg

SEQ ID NO: 11570 - DNA, 203 bp, Artificial sequence
  synthetic
ggcgcgccagtcctgttaagcccacttcctctgtaaagctctcaaccctgtccccttccccctctctcctgggaaagagccctcccatgcctagctgctgctcttagggaccctgtggctaggtgcgcggatggaaatccaggatctccgcctggttcggcccgcctgcctccaacgagtgagtagtacgactcggaccgatg

SEQ ID NO: 11571 - DNA, 203 bp, Artificial sequence
  synthetic
ggcgcgccagtcctcctaattccacttcctctgtaaagctctcaaccctgtccccttccccctctctcctgggaaagagccctcccatgcctagctgctgctcttagggaccctgtggctaggtgcgcggatggaaatccaggatctccgcctggttcggcccgcctgcctccactcctgcctctacccgactcggaccgatg

SEQ ID NO: 11572 - DNA, 203 bp, Artificial sequence
  synthetic
ggcgcgccagtcctgcccgcttcacttcctctgtaaagctctcaaccctgtccccttccccctctctcctgggaaagagccctcccatgcctagctgctgctcttagggaccctgtggctaggtgcgcggattagttgaattccgttccgcctggttcggcccgcctgcctccactcctgcctctacccgactcggaccgatg

SEQ ID NO: 11573 - DNA, 203 bp, Artificial sequence
  synthetic
ggcgcgccagtccttgaccgaacacttcctctgtaaagctctcaaccctgtccccttccccctctctcctgggaaagagccctcccatgcctagctgctgctcttagggaccctgtggtctaacatatcctcggaaatccaggatctccgcctggttcggcccgcctgcctccactcctgcctctacccgactcggaccgatg

SEQ ID NO: 11574 - DNA, 203 bp, Artificial sequence
  synthetic
ggcgcgccagtcctggaggcagcacttcctctgtaaagctctcaaccctgtccccttccccctctctcctgggaaagagccctcccatgctactacaggttagctagggaccctgtggctaggtgcgcggatggaaatccaggatctccgcctggttcggcccgcctgcctccactcctgcctctacccgactcggaccgatg

SEQ ID NO: 11575 - DNA, 203 bp, Artificial sequence
  synthetic
ggcgcgccagtcctcgcaatcgcacttcctctgtgttagaacgcgtgttgtccccttccccctctctcctgggaaagagccctcccatgcctagctgctgctcttagggaccctgtggctaggtgcgcggatggaaatccaggatctccgcctggttcggcccgcctgcctccactcctgcctctacccgactcggaccgatg

SEQ ID NO: 11576 - DNA, 203 bp, Artificial sequence
  synthetic
ggcgcgccagtcctccgtggtgcagacatgaggttcgcagtgcagtgagttcatgcaccttcttgccaagcctcagtctttgggatctggggaggccgcctggttttcctccctccttctgcacgtctgctggggtctcttcctctccaggccttgccgtccccctggcctctcttcccagctcacaccgactcggaccgatg

SEQ ID NO: 11577 - DNA, 203 bp, Artificial sequence
  synthetic
ggcgcgccagtcctcggcctcccagagagcgcaaggggcaaggatttcatgagcatcctcctctaaacgcgtgtcaagacaaaagatgcttcagctttggaaacttgttctcctgtgcggcgtgctcactgggacctcagagtctcttcttgacaatcttggcaatgacctaagcaatgtcgtggatacgactcggaccgatg

SEQ ID NO: 11578 - DNA, 203 bp, Artificial sequence
  synthetic
ggcgcgccagtcctccgggccccagagatacagctgccactcacacactcatccagacaaatcaaactagactcacatcattcggaaacaattctctcataatttaaagaaaaaatcataggccggacgggttagaaatccggtgcttgttcgtgatcagataacctccacaccagaatcatacaatccgactcggaccgatg

SEQ ID NO: 11579 - DNA, 203 bp, Artificial sequence
  synthetic
ggcgcgccagtcctgacggcggcagagatacagctgccactcacacactcatccagacaaatttcgggctcggatgatcattcggaaacaattctctcataatttaaagaaaaaatcataggccggacgggttagaaatccggtgcttgttcgtgatcagataacctccacaccagaatcatacaatccgactcggaccgatg

SEQ ID NO: 11580 - DNA, 203 bp, Artificial sequence
  synthetic
ggcgcgccagtcctcaggaaatcagagccctgcacccctaattcccggctcgtttgcaaatgtgccgtttccctccaccggcctggagtctcccagtcttgtcccggcagtgccgccctccccactaagacctaggcgcaaaggcttggctcatggttgacagctcagagagagaaagatctgagggacgactcggaccgatg

SEQ ID NO: 11581 - DNA, 203 bp, Artificial sequence
  synthetic
ggcgcgccagtcctgacgtgcccagagccctgcacccctaattcccggtggaaaactcctgttgccgtttccctccaccggcctggagtctcccagtcttgtcccggcagtgccgccctccccactaagacctaggcgcaaaggcttggctcatggttgacagctcagagagagaaagatctgagggacgactcggaccgatg

SEQ ID NO: 11582 - DNA, 203 bp, Artificial sequence
  synthetic
ggcgcgccagtcctatgtagaccagagccctgcagatgagtagtgttctggaaaactcctgttgccgtttccctccaccggcctggagtctcccagtcttgtcccggcagtgccgccctccccactaagacctaggcgcaaaggcttggctcatggttgacagctcagagagagaaagatctgagggacgactcggaccgatg

SEQ ID NO: 11583 - DNA, 203 bp, Artificial sequence
  synthetic
ggcgcgccagtcctgtctgagtcagaggatttatttagtcactggcaaacggaaagatggcgccggtttactggcaaacacaaattgaggtgggtccgggagcaaccaatgccactataaactttgaagcaggaattctggagtgctatgaaaggttttcatggcaaagagcccttgactatcctggtcgactcggaccgatg

SEQ ID NO: 11584 - DNA, 203 bp, Artificial sequence
  synthetic
ggcgcgccagtccttgtcccagcagaggatttatttagtcactggcaaacggaaagatggcggacaacatgaccacaacacaaattgagggccccttctagtacaccaatgccactataaactttgaagcaggaattctggagtgctatgaaaggttttcatggcaaagagcccttgactatcctggtcgactcggaccgatg

SEQ ID NO: 11585 - DNA, 203 bp, Artificial sequence
  synthetic
ggcgcgccagtcctatctaacacagaggatttatttagtcactggcaaacggaaagatggcggacaacatgaccacaacacaaattgaggtgggtccgggagcaaccaatgccactataaactttgaagcaggaattctggagtgctatgaaaggttttcatggcaaagagcccttgactatcctggtcgactcggaccgatg

SEQ ID NO: 11586 - DNA, 203 bp, Artificial sequence
  synthetic
ggcgcgccagtcctgcccttagcagaggatttatttagtcactggcaaacggaaagatggcggacaacatgaccacaacacaaattgaggtgggtccgggagcaaccaatgccactataaactttgaagcagttggcagcagagtgtatgaaaggttttcatggcaaagagcccttgactatcctggtcgactcggaccgatg

SEQ ID NO: 11587 - DNA, 203 bp, Artificial sequence
  synthetic
ggcgcgccagtcctattggacccagagtattgatgaggaaactgaagtttggagcgatcacatcattttcccaaggtaacacaagtggcaagacagccgggaacccctaccccatccccttattcagcacatgaaataaacaaggggcatccaaatcttgcggcaacgcccccgggacatgcatcgtccgactcggaccgatg

SEQ ID NO: 11588 - DNA, 203 bp, Artificial sequence
  synthetic
ggcgcgccagtcctaacattggcagagtattgatgaggaaactgaagtttggagcgatcacatcattttcccaaggtaacacaagtggcaagacagccgggaacccctaccccatccccttattcagcacatttttcccgtgtaatgcatccaaatcttgcggcaacgcccccgggacatgcatcgtccgactcggaccgatg

SEQ ID NO: 11589 - DNA, 203 bp, Artificial sequence
  synthetic
ggcgcgccagtcctggtttcggcagagtattgatgaggaaactgaagtttggagcgatcacatcattttcccaaggtaacacaagtggcaagacagccgggaactttaggtatcgagacttattcagcacatgaaataaacaaggggcatccaaatcttgcggcaacgcccccgggacatgcatcgtccgactcggaccgatg

SEQ ID NO: 11590 - DNA, 203 bp, Artificial sequence
  synthetic
ggcgcgccagtcctcagcgctacagagtctgagccgttcagaggctcatttgataaatagaagatttatttgggcttggtggtaagtgtgattttatgttttctttgattttcttgtagacttgttcctgacgctgctacaggagccctcactctgattccttcatttatttttccaggtaagcaaaccgactcggaccgatg

SEQ ID NO: 11591 - DNA, 203 bp, Artificial sequence
  synthetic
ggcgcgccagtcctctggataacagataagagccccaggccctgcagtcaactctgggaggcaacccagacacacgtcaggctgaacccaccccacatttctccctcgggaatctgattaaggcagtgattcttcattgcctgccctcctgtccacactcctgcctactgccacccacaagggtcatccgactcggaccgatg

SEQ ID NO: 11592 - DNA, 203 bp, Artificial sequence
  synthetic
ggcgcgccagtcctcgttgctgcagataagagccccaggccctgcagtcaactctgggaggccgtgggctggacttgacccaaatggtttccccacatttctccctcgggaatctgattaaggcagtgattcttcattgcctgccctcctgtccacactcctgcctactgccacccacaagggtcatccgactcggaccgatg

SEQ ID NO: 11593 - DNA, 203 bp, Artificial sequence
  synthetic
ggcgcgccagtccttctcagtccagataagagccccaggccctgcagtcaactctgggaggccgtgggctggactttcaggctgaacccaccccacatcatcgtttcgggaatctgattaaggcagtgattcttcattgcctgccctcctgtccacactcctgcccgtatggacccacaagggtcatccgactcggaccgatg

SEQ ID NO: 11594 - DNA, 203 bp, Artificial sequence
  synthetic
ggcgcgccagtccttgatggcgcagataagagccccaggccctgcagtcaactctgggaggccgtgggctggactttcaggctgaacccaccccacatttctccctcgggaatctgattaaggcagtgattcttcattgcctgcccgaaacagtcgtggtctgcctactgccacccacaagggtcatccgactcggaccgatg

SEQ ID NO: 11595 - DNA, 203 bp, Artificial sequence
  synthetic
ggcgcgccagtcctgagcggcacagataagagccccaggccctgcagtcaactctgggaggccgtgggctggactttcaggctgaacccaccccacatttctccctcgggaatctgattaaggcagtgattcttcattgcctgccctcctgtccacactcctgcccgtatggacccacaagggtcatccgactcggaccgatg

SEQ ID NO: 11596 - DNA, 203 bp, Artificial sequence
  synthetic
ggcgcgccagtccttgcgagtacagataagagccccaggccctgcagtcaactctgggaggccgtgggctggactttcaggctgaacccaggtactcaagtgtgctcgggaatctgattaaggcagtgattcttcattgcctgccctcctgtccacactcctgcctactgccacccacaagggtcatccgactcggaccgatg

SEQ ID NO: 11597 - DNA, 203 bp, Artificial sequence
  synthetic
ggcgcgccagtcctggagccgccagataagagccgtgccatgcaacagcaactctgggaggccgtgggctggactttcaggctgaacccaccccacatttctccctcgggaatctgattaaggcagtgattcttcattgcctgccctcctgtccacactcctgcctactgccacccacaagggtcatccgactcggaccgatg

SEQ ID NO: 11598 - DNA, 203 bp, Artificial sequence
  synthetic
ggcgcgccagtccttttgatgacagatcgtgctacggcttgatccgccagaagcggcaggcgcgggagcagcactgggaccggccgtctgccagcaggaggcggagcagccccagcaagaaccgcgggctctgcaacggcaacctggtggatatcttctccaaagtgcgcatcttcggcctcaagaagcgactcggaccgatg

SEQ ID NO: 11599 - DNA, 203 bp, Artificial sequence
  synthetic
ggcgcgccagtcctcggtcgagcagattattcctatgcatcctgccttcctcacccaggactggtctgagagggattcatgatggaagcactcatcgaggcgttcctggttctcgcctaaatgtggtcaacagtgtcagcagttcagaggacatcaagcccttaccagggcttcccgggattggaaaccgactcggaccgatg

SEQ ID NO: 11600 - DNA, 203 bp, Artificial sequence
  synthetic
ggcgcgccagtcctattccttccagattattcctatgcatcctgccttcctcacccaggactggtctgagagggattcatgatggaagcatgttcattctgtgacctggttctcgcctaaatgtggtcaacagtgtcagcagttcagaggacatcaagccagcggtccaatagaccgggattggaaaccgactcggaccgatg

SEQ ID NO: 11601 - DNA, 203 bp, Artificial sequence
  synthetic
ggcgcgccagtcctgttctaggcagattattccttccgtatgcctgaccctcacccaggactggtctgagagggattcatgatggaagcatgttcattctgtgacctggttctcgcctaaatgtggtcaacagtgtcagcagttcagaggacatcaagcccttaccagggcttcccgggattggaaaccgactcggaccgatg

SEQ ID NO: 11602 - DNA, 203 bp, Artificial sequence
  synthetic
ggcgcgccagtcctacatctgccagcagcctgcagccgccgccgggttgtgcctcagactgtcagataaatcggcgggccgggccggcgggtcggtgagcgcggcccgggccggacatggcggcgctctacgcctgcaccaagtgccaccagcgcttccccttcgaggcgctgtgggcacatagaagtcgactcggaccgatg

SEQ ID NO: 11603 - DNA, 203 bp, Artificial sequence
  synthetic
ggcgcgccagtcctaagaatgccagcagcctgcagccgccgccgggttgtgcctcagactgtcagataaatcggcgggccgggccggcggtatttcactgcttacccgggccggacatggcggcgctctacgcctgcaccaagtgccaccagcgcttccccttcgaggcgctgtctcaggggcagcagcgactcggaccgatg

SEQ ID NO: 11604 - DNA, 203 bp, Artificial sequence
  synthetic
ggcgcgccagtcctcgcagaatcagcagcctgcagccgccgccgggttgtgcctcagactgtcagataaatcggcgttggttaagtcaacgtcggtgagcgcggcccgggccggacatggcggcgctctacgcctgcaccaagtgccaccagcgcttccccttcgaggcgctgtctcaggggcagcagcgactcggaccgatg

SEQ ID NO: 11605 - DNA, 203 bp, Artificial sequence
  synthetic
ggcgcgccagtcctaaatcgaccagcatccaccgcgcggcccaggactcgagcatgccctaccgttgcgtgaggcgggtaaatgttcgcggaagcggcaaagacgacacggccttgtgggatggcggagtttaaggagaagcctgaggccccgactgagcagctggatgtcgcgtgcggccaggaaaacgactcggaccgatg

SEQ ID NO: 11606 - DNA, 203 bp, Artificial sequence
  synthetic
ggcgcgccagtccttaacgccccagcatccaccgcgcggcccaggactgtcagggtagtgggcgttgcgtgaggcgggtaaatgttcgcggaagcggcaaagacgacacggccttgtgggatggcggagtttaaggagaagcctgaggccccgactgagcagctggatgtcgcgccatctagaatttgcgactcggaccgatg

SEQ ID NO: 11607 - DNA, 203 bp, Artificial sequence
  synthetic
ggcgcgccagtcctcgtacgatcagcatccaccgcgcggcccaggactgtcagggtagtgggcgttgcgtgaggcgggtaaatgttcgcggaagcggcaaagacgacacggccttgtgggatggcggagtttaaggagaagcctgaggccccgactgagccaaacccaaagatatgcggccaggaaaacgactcggaccgatg

SEQ ID NO: 11608 - DNA, 203 bp, Artificial sequence
  synthetic
ggcgcgccagtcctgcgggtggcagcatccaccgcgcggcccaggactgtcagggtagtgggcgttgcgtgaggcgggtaaatgttcgcggaagcggcaaagacgacacggccttgtgggatggcggagtttaaggagaagcctgataattgcgtccgatagctggatgtcgcgtgcggccaggaaaacgactcggaccgatg

SEQ ID NO: 11609 - DNA, 203 bp, Artificial sequence
  synthetic
ggcgcgccagtcctccatcacacagcatccaccgcgcggcccaggactgtcagggtagtgggcgttgcgtgaggcgtagcgcccacactcgaagcggcaaagacgacacggccttgtgggatggcggagtttaaggagaagcctgaggccccgactgagcagctggatgtcgcgtgcggccaggaaaacgactcggaccgatg

SEQ ID NO: 11610 - DNA, 203 bp, Artificial sequence
  synthetic
ggcgcgccagtcctcagcgtatcagcatccaccgcgcggcccaggactgtcagggtagtggggagacaaactcaacggtaaatgttcgcggaagcggcaaagacgacacggccttgtgggatggcggagtttaaggagaagcctgaggccccgactgagcagctggatgtcgcgtgcggccaggaaaacgactcggaccgatg

SEQ ID NO: 11611 - DNA, 203 bp, Artificial sequence
  synthetic
ggcgcgccagtcctgaactgctcagcatcccagacagacttccagattccttacgtaggggaccaacacgtaggtgtatgggagaccacatcatttcatgacttatgtttgaggaacactaggctgttgtctagacgaggcaagctctggaaagcaacgccgagtctctgagaagagggagcataggccgactcggaccgatg

SEQ ID NO: 11612 - DNA, 203 bp, Artificial sequence
  synthetic
ggcgcgccagtcctcaccaaggcagcatcccagacagacttccagatttgaacatctaccccccaacacgtaggtggtgctctacgtgtgtcatttcatgacttatgtttgaggaacactaggctgttgtctagacgaggcaagctctggaaagcaacgccgagtctctgagaagagggagcataggccgactcggaccgatg

SEQ ID NO: 11613 - DNA, 203 bp, Artificial sequence
  synthetic
ggcgcgccagtcctacgactagcagcatcccagacagacttccagatttgaacatctaccccccaacacgtaggtgtatgggagaccacatcatttcatgacttatgtttgaggaacactaggctgttgtctagacgaggcaagcttcaccctaacggagcgagtctctgagaagagggagcataggccgactcggaccgatg

SEQ ID NO: 11614 - DNA, 203 bp, Artificial sequence
  synthetic
ggcgcgccagtcctaattacggcagcatcccagacagacttccagatttgaacatctaccccccaacacgtaggtgtatgggagaccacatcatttcatgacttgcaacgcgccccgtctaggctgttgtctagacgaggcaagctctggaaagcaacgccgagtctctgagaagagggagcataggccgactcggaccgatg

SEQ ID NO: 11615 - DNA, 203 bp, Artificial sequence
  synthetic
ggcgcgccagtcctaacctcctcagcatcccagatgtggcatatcgaatgaacatctaccccccaacacgtaggtgtatgggagaccacatcatttcatgacttatgtttgaggaacactaggctgttgtctagacgaggcaagctctggaaagcaacgccgagtctctgagaagagggagcataggccgactcggaccgatg

SEQ ID NO: 11616 - DNA, 203 bp, Artificial sequence
  synthetic
ggcgcgccagtccttataacctcagccccgggggcagggagagcctagattacggaagtaccgcgagcaaggagacttaggggatatcgcgtccggagctagctggatcctctaggcaggatggtgatgggaatctttgcaaattgtatcttctgtttgaaagtgaagtacttacctcagcagcagaacgactcggaccgatg

SEQ ID NO: 11617 - DNA, 203 bp, Artificial sequence
  synthetic
ggcgcgccagtcctaagggcgtcagccccgggggcagggagagcctagattacggaagtaccgcgagcaaggagcgcggaatcggggagcgtccggagctagctggatcctctaggcaggatggtgatgggaatctttgcaaattgtatcttctgtttgattccatttagtaagcctcagcagcagaacgactcggaccgatg

SEQ ID NO: 11618 - DNA, 203 bp, Artificial sequence
  synthetic
ggcgcgccagtcctttcagcctcagccccgggggcagggagagcctagattacggaagtaccgcgagcaaggagcgcggaatcggggagctgaaacctggtcaaggatcctctaggcaggatggtgatgggaatctttgcaaattgtatcttctgtttgaaagtgaagtacttacctcagcagcagaacgactcggaccgatg

SEQ ID NO: 11619 - DNA, 203 bp, Artificial sequence
  synthetic
ggcgcgccagtcctttgctaaccagcctagctaatggtggtggcgctttaggcagcctccacgcccaccacctcccagatagagcggcggcactgtagggaagaccggggaccggtcactaccaaggacgcagacctctttttgagtatcacgcctccggaagtagttgggcaagcccacctatatgtcgactcggaccgatg

SEQ ID NO: 11620 - DNA, 203 bp, Artificial sequence
  synthetic
ggcgcgccagtcctttcaaagtcagcgcacgtagtcctagcgtcgagccccctctgagtcaggaaacattttcagacctatggaaactacttcctgaaaacaacgttctgtcccccttgccgtcccaagcaatggatgatttgatgctgtccccggacgatattgaacaatggttcactgaagacccacgactcggaccgatg

SEQ ID NO: 11621 - DNA, 203 bp, Artificial sequence
  synthetic
ggcgcgccagtcctggtaacaccagcgtcatcaggcggacgccatggtaagcgcggacgccatggtaagcgcggacgccatggtaagcgcggacgccatggtaagcgcggacgccatggtaagcgcggacgccatggtaagcgcggacgccatggtaagcgcggacgccatgcacacggaccctgactcgactcggaccgatg

SEQ ID NO: 11622 - DNA, 203 bp, Artificial sequence
  synthetic
ggcgcgccagtccttactattccaggaagtggacggtgagttcgttggatggcttaagccctgagtacagggtagtcgtcagtggttcgacgccttggaataaaggtctcgagatgccacgtggacgagggcatgcccaaagcacatcttaacctgagcgggggtcgcccaggtaaaagcagttttaacgactcggaccgatg

SEQ ID NO: 11623 - DNA, 203 bp, Artificial sequence
  synthetic
ggcgcgccagtcctcgaacttacaggacccagacagagacacacggtcactgcagctgaagccgctgcccctgctaagtccctctgtccagaggctgggagagccaaggatcacgcagcaaggaagaaacagacccaggtgcagactcaggcaccaccaggaccagctgatcattccagcccacagcacgactcggaccgatg

SEQ ID NO: 11624 - DNA, 203 bp, Artificial sequence
  synthetic
ggcgcgccagtcctccggcactcaggacccagacagagacacacggtcactgcagctgaagccgctgcccctgctacagatgaagaaaaggaggctgggagagccaaggatcacgcagcaaggaagaaacagacccaggtgcagacgagacatgacagcagaccagctgatcattccagcccacagcacgactcggaccgatg

SEQ ID NO: 11625 - DNA, 203 bp, Artificial sequence
  synthetic
ggcgcgccagtcctggtcggaacaggacccagacagagacacacggtcactgcagctgaagccgctgcccctgctacagatgaagaaaaggaggctgggagagccaaggatcacgcagcaaggaagaaacagacccaggtgcagactcaggcaccaccagccgagttgagggcctccagcccacagcacgactcggaccgatg

SEQ ID NO: 11626 - DNA, 203 bp, Artificial sequence
  synthetic
ggcgcgccagtcctgaggctgtcaggacccagacagagacacacggtcactgcagctgaagccgctgcccctgctacagatgaagaaaaggaggctgggagagccaaggatcacgcagcaaggaagaaacagacccaggtgcagactcaggcaccaccaggaccagctgatcatattcattacaccttcgactcggaccgatg

SEQ ID NO: 11627 - DNA, 203 bp, Artificial sequence
  synthetic
ggcgcgccagtcctgcaccagtcaggacccagactattcgcggtaccgactgcagctgaagccgctgcccctgctacagatgaagaaaaggaggctgggagagccaaggatcacgcagcaaggaagaaacagacccaggtgcagactcaggcaccaccaggaccagctgatcattccagcccacagcacgactcggaccgatg

SEQ ID NO: 11628 - DNA, 203 bp, Artificial sequence
  synthetic
ggcgcgccagtcctcctctccgcaggaggaggagcccgggcgggcgaggggcggccggagagcgccagggcctgagctgccggagcggcgcctgtgagtgagtgcagaaagcaggcgcccgcgcgctagccggttactttttctgacgcacgccgcgctctctccctgggcgacctgcagtttgcaatcgactcggaccgatg

SEQ ID NO: 11629 - DNA, 203 bp, Artificial sequence
  synthetic
ggcgcgccagtcctcctacgcacaggaggaggagcccgggcgggcgaggggcggccggagagcgccagggcctgagctgccggagcggcgcctgtgagtgagtgcagaaagcaggcgcccgcgcgctagccgtggcaggagcagcccgcacgccgcgctctctccctgggcgacctgcagtttgcaatcgactcggaccgatg

SEQ ID NO: 11630 - DNA, 203 bp, Artificial sequence
  synthetic
ggcgcgccagtccttacttcttcaggaggcttctctgggtataaagcagctgaaatgtggagttcgacattaggagctgagagcgtgtccatgggcccagtgcctggcgtgtcctccctgggagcttgctggacgcatgaccaggattctgggagggcagaggacagaccacaggcacccaggataaccgactcggaccgatg

SEQ ID NO: 11631 - DNA, 203 bp, Artificial sequence
  synthetic
ggcgcgccagtccttcccgaggcaggaggcttctctgggtataaagcagctgaaatgtggagttcgacggtaggagctgagagcgtgtccatgggcccagtgcctggcgtgtcctccctgggagcttgctggacgcatgaccaggattctgggagggcagaggacagaccacaggcacccaggataaccgactcggaccgatg

SEQ ID NO: 11632 - DNA, 203 bp, Artificial sequence
  synthetic
ggcgcgccagtcctaaactaggcaggaggcttctctgggtataaagcagctgaaatgtggagtttcctcccaggagctgagagcgtgtccatgggcccagtgcctggcgtgtcctccccctttcaagcaactacgcatgaccaggattctgggagggcagaggacagaccacaggcacccaggataaccgactcggaccgatg

SEQ ID NO: 11633 - DNA, 203 bp, Artificial sequence
  synthetic
ggcgcgccagtccttagcaactcaggaggcttctctgggtataaagcagctgaaatgtggagtttcctcccaggagctgagagcgtgtccatgggcccagtgcctggcgtgtcctccctgggagcttgctggacgcatgaccaggattctgggagggcagaggacagaccacaggcacccaggataaccgactcggaccgatg

SEQ ID NO: 11634 - DNA, 203 bp, Artificial sequence
  synthetic
ggcgcgccagtcctaatccgagcaggaggcttctctgggtataaagcagctgaaatgtggagtttcctcccaggagctgagagcgtgtccatgggcccagtgcctggcgtgtcctccctgggagcttgctggacgcatgaccaggattctgggagggcagctatggttgtgttagcacccaggataaccgactcggaccgatg

SEQ ID NO: 11635 - DNA, 203 bp, Artificial sequence
  synthetic
ggcgcgccagtcctcggcagcgcaggaggcttctctgggtataaagcagctgaaatgtggagtttcctcccaggagctgagagcgtgtccatgggcccagtgcctggcgtgtcctccctgggagcttgctggttagtgtgttttacttctgggagggcagaggacagaccacaggcacccaggataaccgactcggaccgatg

SEQ ID NO: 11636 - DNA, 203 bp, Artificial sequence
  synthetic
ggcgcgccagtcctgttcataccaggaggcttctctgggtataaagcagctgaaatgtggagtttcctcccaggagtaccagtgcaacaaatgggcccagtgcctggcgtgtcctccctgggagcttgctggacgcatgaccaggattctgggagggcagaggacagaccacaggcacccaggataaccgactcggaccgatg

SEQ ID NO: 11637 - DNA, 203 bp, Artificial sequence
  synthetic
ggcgcgccagtcctcaaccacccaggaggcttctctgggtataaagcattcagctgtctttctttcctcccaggagctgagagcgtgtccatgggcccagtgcctggcgtgtcctccctgggagcttgctggacgcatgaccaggattctgggagggcagaggacagaccacaggcacccaggataaccgactcggaccgatg

SEQ ID NO: 11638 - DNA, 203 bp, Artificial sequence
  synthetic
ggcgcgccagtcctcagagagtcaggaggcttcttaccaacatgcaatgctgaaatgtggagtttcctcccaggagctgagagcgtgtccatgggcccagtgcctggcgtgtcctccctgggagcttgctggacgcatgaccaggattctgggagggcagaggacagaccacaggcacccaggataaccgactcggaccgatg

SEQ ID NO: 11639 - DNA, 203 bp, Artificial sequence
  synthetic
ggcgcgccagtcctgggactatcaggcaagattgaagtgaccctccctgggctgctttctttcgattatcatcagtgaccctaccccggctgctcttcccagcacaactccggtgcaaaggcttgggcatcctggtgctttgcctctagcccatgctccacagcgaggagagagaaaaccctgaggcacgactcggaccgatg

SEQ ID NO: 11640 - DNA, 203 bp, Artificial sequence
  synthetic
ggcgcgccagtcctgaagggaacagggccttgtgattaccctatctaaccgagggcaaggcagtggcggcggccgccccaacggagctgcagacgaaaggcaagaacggcgatggccgccgtaggtcagctaaagatcatcaccctggtaaaactttgccagagaacccagcaggattcaccagcacgcgactcggaccgatg

SEQ ID NO: 11641 - DNA, 203 bp, Artificial sequence
  synthetic
ggcgcgccagtcctggacgttccagggccttgtgcgacatgggctgcgagacatcaggctgggtggcggcggccgccccaacggagctgcagacgaaaggcaagaacggcgatggccgccgtaggtcagctaaagatcatcaccctggtaaaactttgccagagaacccagcaggattcaccagcacgcgactcggaccgatg

SEQ ID NO: 11642 - DNA, 203 bp, Artificial sequence
  synthetic
ggcgcgccagtcctatgacaaccagggccttgtgcgacatgggctgcgccgagggcaaggcatctctccatttaatcccaacggagctgcagacgaaaggcaagaacggcgatggccgccgtaggtcagctaaagatcatcaccctggtaaaactttgccagagaacccagcaggattcaccagcacgcgactcggaccgatg

SEQ ID NO: 11643 - DNA, 203 bp, Artificial sequence
  synthetic
ggcgcgccagtccttgcgtcgtcagggctgagggagctcaagtttcagcctgaggcatgggcacctgaaggtctcggacctgagacccgtggattctgtccagtacaccctgttgctccttctgcctcccctctcctgtattgaaagcgtttgtgttcatcttatcagggacctgaccctaagagaatcgactcggaccgatg

SEQ ID NO: 11644 - DNA, 203 bp, Artificial sequence
  synthetic
ggcgcgccagtcctacgatatgcagggctgagggagctcaagtttcagcctgaggcatgggccaggaggccatggtatggatgtcgttccggattctgtccagtacaccctgttgctccttctgcctcccctctcctgtattgaaagcgtttgtgttcatcttatcagggacctgaccctaagagaatcgactcggaccgatg

SEQ ID NO: 11645 - DNA, 203 bp, Artificial sequence
  synthetic
ggcgcgccagtcctgatttctacagggctgagggagctcaagtttcagcctgaggcatgggccaggaggccatggtgacctgagacccgtggattctgtccagtacaccctgttgctccttctgcctcccctctcctgtattgaaacatcactccgcacgcttatcagggacctgaccctaagagaatcgactcggaccgatg

SEQ ID NO: 11646 - DNA, 203 bp, Artificial sequence
  synthetic
ggcgcgccagtcctatctcaatcagggctgagggagctcaagtttcagcctgaggcatgggccaggaggccatggtgacctgagacccgtggattctgtccagtacaccctgttgctccttctgcctcccctctcctgtattgaaagcgtttgtgttcattgaccatatactaggaccctaagagaatcgactcggaccgatg

SEQ ID NO: 11647 - DNA, 203 bp, Artificial sequence
  synthetic
ggcgcgccagtcctcgctcgcccagggctgagggagctcaagtttcagcctgaggcatgggccaggaggccatggtgacctgagacccgtggattctgtccagtacaccctgttgctccttctgcctcccctgagagcagcgtgctgcgtttgtgttcatcttatcagggacctgaccctaagagaatcgactcggaccgatg

SEQ ID NO: 11648 - DNA, 203 bp, Artificial sequence
  synthetic
ggcgcgccagtcctcactttcccagggctgagggagctcaagtttcagcctgaggcatgggccaggaggccatggtgacctgagacccgtggattctgtccagtcactaaatccttctcttctgcctcccctctcctgtattgaaagcgtttgtgttcatcttatcagggacctgaccctaagagaatcgactcggaccgatg

SEQ ID NO: 11649 - DNA, 203 bp, Artificial sequence
  synthetic
ggcgcgccagtccttggccctacagggctgagggagctcaagtttcagttctgatagctattcaggaggccatggtgacctgagacccgtggattctgtccagtacaccctgttgctccttctgcctcccctctcctgtattgaaagcgtttgtgttcatcttatcagggacctgaccctaagagaatcgactcggaccgatg

SEQ ID NO: 11650 - DNA, 203 bp, Artificial sequence
  synthetic
ggcgcgccagtcctactgtaagcaggggaggcgcaaagcgttggttagcctgccccggggcgaagggtatgtggcgagacagagccctgcacccctaattcccggtggaaaactcctgttgccgtttccctccaccggcctggagtctcccagtcttgtcccggcagtgccgccctccccactaagaccgactcggaccgatg

SEQ ID NO: 11651 - DNA, 203 bp, Artificial sequence
  synthetic
ggcgcgccagtcctgaagaaggcaggggaggcgcctgtgaggcccggacctgccccggggcgaagggtatgtggcgagacagagccctgcacccctaattcccggtggaaaactcctgttgccgtttccctccaccggcctggagtctcccagtcttgtcccggcagtgccgccctccccactaagaccgactcggaccgatg

SEQ ID NO: 11652 - DNA, 203 bp, Artificial sequence
  synthetic
ggcgcgccagtccttgccacaccaggggaggcgcctgtgaggcccggacctgccccggggcgaagggtatgtggcgagacagagccctgcgtaggggtgctaatgtggaaaactcctgttgccgtttccctccaccggcctggagtctcccagtcttgtcccggcagtgccgccctccccactaagaccgactcggaccgatg

SEQ ID NO: 11653 - DNA, 203 bp, Artificial sequence
  synthetic
ggcgcgccagtccttgtattcccaggggaggcgcctgtgaggcccggaggccagggtaaaataagggtatgtggcgagacagagccctgcacccctaattcccggtggaaaactcctgttgccgtttccctccaccggcctggagtctcccagtcttgtcccggcagtgccgccctccccactaagaccgactcggaccgatg

SEQ ID NO: 11654 - DNA, 203 bp, Artificial sequence
  synthetic
ggcgcgccagtccttcggtaggcaggggcgccgccgccggcgctcgcaggccgcggatgaagaagaaaacccggcgccgctcgacccggagcgaggagttgacccggagcgaggagttgaccctgagtgaggaagcgacctggagtgaagaggcgacccacgccctaagaaattcccagggcgaagagcgactcggaccgatg

SEQ ID NO: 11655 - DNA, 203 bp, Artificial sequence
  synthetic
ggcgcgccagtccttcggcccacaggggcgccgccgccggcgctcgcaggccgcggatgaagaagaaaacccggcgccgctcgacccggagcgaggagttgacccggagcgaggagttgaccctgagtgaggaagcgacctggagtgaagaggcgacccagagtgaggaggcgaggacaccgatgagtcgactcggaccgatg

SEQ ID NO: 11656 - DNA, 203 bp, Artificial sequence
  synthetic
ggcgcgccagtcctccctgccgcaggggcgccgccgccggcgctcgcaggccgcggatgaagaagaaaacccggcgccgctcgacccggagcgaggagttgacccggagcgaggagttgaccctgagtgaggaagcgacctggagtgaagaggcgacccatttatcaatctacgcccagggcgaagagcgactcggaccgatg

SEQ ID NO: 11657 - DNA, 203 bp, Artificial sequence
  synthetic
ggcgcgccagtcctgacagggtcaggggcgccgccgccggcgctcgcaggccgcggatgaagaagaaaacccggcgccgctcgacccggagcgaggagttgacccggagcgaggagttgaccctgagtgaggcgagataactacaggaagaggcgacccagagtgaggaggcgacccagggcgaagagcgactcggaccgatg

SEQ ID NO: 11658 - DNA, 203 bp, Artificial sequence
  synthetic
ggcgcgccagtcctgggttgcgcaggggcgccgctagaatgttctcatggccgcggatgaagaagaaaacccggcgccgctcgacccggagcgaggagttgacccggagcgaggagttgaccctgagtgaggaagcgacctggagtgaagaggcgacccagagtgaggaggcgacccagggcgaagagcgactcggaccgatg

SEQ ID NO: 11659 - DNA, 203 bp, Artificial sequence
  synthetic
ggcgcgccagtcctgctagtatcaggtcaattatattcagtatggaaagaataaaagaactacggaacctgatgtcgcagtctcgcactcgcgagatactgacaaaaaccacagtggaccatatggccataattaagaagtacacatcggggagacaggaggtatctttaaagattaggatgaaatggcgactcggaccgatg

SEQ ID NO: 11660 - DNA, 203 bp, Artificial sequence
  synthetic
ggcgcgccagtcctggcgaagacaggtcaattatattcagtatggaaagaataaaagaactagcccgatctgctgggcagtctcgcactcgcgagatactgacaaaaaccacagtggaccatatggccataattaagaagtacacatcggggagacaggaaaagaacccgtcacttaggatgaaatggcgactcggaccgatg

SEQ ID NO: 11661 - DNA, 203 bp, Artificial sequence
  synthetic
ggcgcgccagtcctgagacgaacaggttcagaaaatttaaaaagtcttgcaccgcagtctctcgtcatttggtgcatacacgcagaagagaaagtgaaagatactgaaggagcaaaacaaatagtgcggagacatctagtggcagaaacaggaactgcagagaaaatgccaagcacaagtagaccaaccgactcggaccgatg

SEQ ID NO: 11662 - DNA, 203 bp, Artificial sequence
  synthetic
ggcgcgccagtcctagtgaattcaggttcagaaaatttaaaaagtctttttaatactgtctgcgtcatttggtgcatacacgcagaagagaaagtgaaagatactgaaggagcaaaacaaatagtgcggagatcagggtccctcttaacaggaactgcagagaaaatgccaagcacaagtagaccaaccgactcggaccgatg

SEQ ID NO: 11663 - DNA, 203 bp, Artificial sequence
  synthetic
ggcgcgccagtcctgtaagacacaggttcagaaaatttaaaaagtctttttaatactgtctgcgtcatttggtgcatacacgcagaagagaaagtgaaagatactgaaggagcaaaactttccagagcatcgcatctagtggcagaaacaggaactgcagagaaaatgccaagcacaagtagaccaaccgactcggaccgatg

SEQ ID NO: 11664 - DNA, 203 bp, Artificial sequence
  synthetic
ggcgcgccagtccttagaactacagtgaccgggtggtttgcttaggcgcagacggggaagcggagccaacatgccaacatatgttgctgaggtttgtcgcaaaacttatgtgaccccgcggagacccttcgagaaatctcgtctcgaccaagagctgaagctgatcggcgagtatgggctccggaacacgactcggaccgatg

SEQ ID NO: 11665 - DNA, 203 bp, Artificial sequence
  synthetic
ggcgcgccagtcctcttaccgtcagtgaccgggtggtttgcttaggcgcagacggggaagcggagccaacatgccagtggcccggagctgggtttgtcgcaaaaaacgcaacgtttttcggagacccttcgagaaatctcgtctcgaccaagagctgaagctgatcggcgagtatgggctccggaacacgactcggaccgatg

SEQ ID NO: 11666 - DNA, 203 bp, Artificial sequence
  synthetic
ggcgcgccagtccttgagataacagtgaccgggtggtttgcttaggcgcagacggggaagcggagccaacatgccagtggcccggagctgggtttgtcgcaaaacttatgtgaccccgcggagacccttcgagaaatctcgtctcgaccaagagctgaagctgatcggcgagtacctctctaacgtaccgactcggaccgatg

SEQ ID NO: 11667 - DNA, 203 bp, Artificial sequence
  synthetic
ggcgcgccagtcctaacgatttcagtgaccgggtggtttgcttaggcgcagacggggaagcggagccaacatgccagtggcccggagctgggtttgtcgcaaaacttatgtgaccccggatctgggacgtaggaaatctcgtctcgaccaagagctgaagctgatcggcgagtatgggctccggaacacgactcggaccgatg

SEQ ID NO: 11668 - DNA, 203 bp, Artificial sequence
  synthetic
ggcgcgccagtcctgaatcctccagtgcctccggaggaaatctgctcggtccccggcagccgccgcttcccctttgatgttttggtacgccgtgcgcatgcgcccgcgcacgttcgggctgcactgggcagactaagttggatctcctctcttcagtgaaaccctcaattccatcaaaaactaaagggcgactcggaccgatg

SEQ ID NO: 11669 - DNA, 203 bp, Artificial sequence
  synthetic
ggcgcgccagtcctagctgcggcagtgcctccggaggaaatctgctcggtccccggcagccgccgcttcccctttgatgttttggtacgccgtgcgcatgcgcctcacattagaattactgcactgggcagactaagttggatctcctctcttcagtgaaaccctcaattccatagggtgtgggtccacgactcggaccgatg

SEQ ID NO: 11670 - DNA, 203 bp, Artificial sequence
  synthetic
ggcgcgccagtcctcttatgtgcagtgcctccggaggaaatctgctcggtccccggcagccgccgcttcccctttgatgttttggtacgccgtgcgcatgcgcctcacattagaattactgcactgggcagactaagttggatctcctctcttcagtgaaaccctcaattccatcaaaaactaaagggcgactcggaccgatg

SEQ ID NO: 11671 - DNA, 203 bp, Artificial sequence
  synthetic
ggcgcgccagtccttaaacaatcagtgcctccggaggaaatctgctcggtccccggcagccgccgcttcccctttgatgttttggtacgccgtgcgcatgcgcctcacattagaattactgcactgggcagactaagttggatctcctctcttcagtgaaggttgtggccgagccaaaaactaaagggcgactcggaccgatg

SEQ ID NO: 11672 - DNA, 203 bp, Artificial sequence
  synthetic
ggcgcgccagtcctggagtagtcagtgcctccggaggaaatctgctcgtatgtaattgaatcccgcttcccctttgatgttttggtacgccgtgcgcatgcgcctcacattagaattactgcactgggcagactaagttggatctcctctcttcagtgaaaccctcaattccatcaaaaactaaagggcgactcggaccgatg

SEQ ID NO: 11673 - DNA, 203 bp, Artificial sequence
  synthetic
ggcgcgccagtcctctgtgaagcagtgcctccgggtcgctgtacaaacgtccccggcagccgccgcttcccctttgatgttttggtacgccgtgcgcatgcgcctcacattagaattactgcactgggcagactaagttggatctcctctcttcagtgaaaccctcaattccatcaaaaactaaagggcgactcggaccgatg

SEQ ID NO: 11674 - DNA, 203 bp, Artificial sequence
  synthetic
ggcgcgccagtccttcgttatacagttgctttctcgtggctctgcagcgagagcgcagagaagcagaggaccaagaggcagaatgccggcgctccaccgcccgagactgtgtttcctgtgagtccagatgtgtgatccagatatgctgcaatggtgacataaactgttgactgagactaggagcgtgccgactcggaccgatg

SEQ ID NO: 11675 - DNA, 203 bp, Artificial sequence
  synthetic
ggcgcgccagtcctgtcctacacagttggcccgtgtgaggagaaggccggggcagcggaggcttccggcggaaaatccaagaggaagaaggatctacggatatcgacgggtggagtctcacccgcacccaaccccacacccccccggaacctggactcccggaccttcatcaccattggagacagaaacgactcggaccgatg

SEQ ID NO: 11676 - DNA, 203 bp, Artificial sequence
  synthetic
ggcgcgccagtcctctctctcgcagttggcccgtgtgaggagaaggcctattacaattctctttccggcggaaaatccaagaggaagaaggatctacggatatcctgcatgtccaagccacccgcacccaaccccacacccccccggaacctggactcccggaccttcatcaccattggagacagaaacgactcggaccgatg

SEQ ID NO: 11677 - DNA, 203 bp, Artificial sequence
  synthetic
ggcgcgccagtcctacatggagcataacaaacacttcaacatcacagtacaggctgaatcatttcttcacatcatgctacccacacaactaagctagatccttaactcatagttacataaaaacctcaagtatcacaatcaaacacccgccgggggtccaattcacaaaattaacagctggggcaaatcgactcggaccgatg

SEQ ID NO: 11678 - DNA, 203 bp, Artificial sequence
  synthetic
ggcgcgccagtcctggcttggtcataacaaacacttcaacatcacagtacaggctgaatcatttcttcacatcatggctagttgcaggtgaagctagatccttaactcatagttacataaaaacctcaagtatcacaatcaaacactaaatcaacacatcattcacaaaattaacagctggggcaaatcgactcggaccgatg

SEQ ID NO: 11679 - DNA, 203 bp, Artificial sequence
  synthetic
ggcgcgccagtcctttgaagatcataagagtctaattcaccaaaaaagttgtggtaaaaatcttagttcatgtgaagaaatttcatgtgaatgttttagctatcaaacagtactgtcacctactcatgcacaaaactgcctcccaaagacttttcccaggtccctcgtatcaaaacattaagagtatacgactcggaccgatg

SEQ ID NO: 11680 - DNA, 203 bp, Artificial sequence
  synthetic
ggcgcgccagtccttatacacccataagagtctatcattgatttctttttgtggtaaaaatcacctggaccaatgcgaaatttcatgtgaatgttttagctatcaaacagtactgtcacctactcatgcacaaaactgcctcccaaagacttttcccaggtccctcgtatcaaaacattaagagtatacgactcggaccgatg

SEQ ID NO: 11681 - DNA, 203 bp, Artificial sequence
  synthetic
ggcgcgccagtccttcatcggacataagagtctatcattgatttctttttgtggtaaaaatcttagttcatgtgaagaaatttcatgtgaatgttttagctatcaaacagtactgtcacctactcatgcacaaaactgcctcccaaagacttttcccaggtccctcgtatcaaaacattaagagtatacgactcggaccgatg

SEQ ID NO: 11682 - DNA, 203 bp, Artificial sequence
  synthetic
ggcgcgccagtcctcagggtgccataagccaaattgtgagccatgatagtggcactgaatttctaaatacaagaaattgcttagacaattggtttagtatctgtatatgggcaatactctgtcctgcagtaggcagcatgtcagctgaaacaccaatcacggctccagctacggctcaggatctgcagcgactcggaccgatg

SEQ ID NO: 11683 - DNA, 203 bp, Artificial sequence
  synthetic
ggcgcgccagtcctagtatctgcataagccaaattgtgagccatgatagtggcactgaatttctaaatacaagaaattgcttagacaattttgcattcgctcagatatgggcaatactctgtcctgcagtaggcagcatgtcagctgaaacaccaatcacattgaatatcgatcctcaggatctgcagcgactcggaccgatg

SEQ ID NO: 11684 - DNA, 203 bp, Artificial sequence
  synthetic
ggcgcgccagtcctccttatctcataaggtatacgcactacggggtgaacggctactcactgcacgccatgaactcactcagcgccatgtacaacctgcaccagcaggcagcccagcaggcccagcatgcccccgactaccggccttcagtgcatgcgcttacattggctgagcgcctggctggctgtcgactcggaccgatg

SEQ ID NO: 11685 - DNA, 203 bp, Artificial sequence
  synthetic
ggcgcgccagtcctatccgcgtcatacaatgcacggcggggctgctcagtcctccaggcgtcggtactcagcggtgttggaacttcgttgcttgcttgcctgtgcgcgcgtgcgcggacatggcctcaaacgattatacccaacaagcaacccaaagctatggggcctaccccacccagcccgggcagcgactcggaccgatg

SEQ ID NO: 11686 - DNA, 203 bp, Artificial sequence
  synthetic
ggcgcgccagtcctgttcaattcatcctgggtcactaatgatgttaaggaaccagaacgttttcccctcctggactgttagtaacttagtctccctcctcccctaaccacccccgcccccccccaccccccgcagtaataaaggcccctgaacgtgtatgttggtctcccgggagctgcttgctgaagcgactcggaccgatg

SEQ ID NO: 11687 - DNA, 203 bp, Artificial sequence
  synthetic
ggcgcgccagtcctgggtagaacatcctgggtcagaggccgatccgcagaaccagaacgttttcccctcctggactgttagtaacttagtctccctcctcccctaaccacccccgcccggatatctaattgccagtaataaaggcccctgaacgtgtatgttggtctcccgggagctgcttgctgaagcgactcggaccgatg

SEQ ID NO: 11688 - DNA, 203 bp, Artificial sequence
  synthetic
ggcgcgccagtcctgaggttcgcatcctgggtcagaggccgatccgcagaaccagaacgttttcccctcctggactgttagtaacttagtctccctcctcccctcggggttgatctaaccccccaccccccgcagtaataaaggcccctgaacgtgtatgttggtctcccgggagctgcttgctgaagcgactcggaccgatg

SEQ ID NO: 11689 - DNA, 203 bp, Artificial sequence
  synthetic
ggcgcgccagtcctgggctgatcatctgcctgggatcatcaagccctaattagcccccaatcttaaattagggctgccgttttctgtttctccctgggctgcggaaagccagaagattttatctagcttatacaaggctgctggtgttccctctttttttccacgagggtgtttttggctgcaattgccgactcggaccgatg

SEQ ID NO: 11690 - DNA, 203 bp, Artificial sequence
  synthetic
ggcgcgccagtcctatatccttcatctgcctgggatcatcaagccctagaagctgggtttctttaaattagggctgccgttttctgtttctccctgggctgcggcggatagcttagcgttatctagcttatacaaggctgctggtgttccctctttttttccacgagggtgtttttggctgcaattgccgactcggaccgatg

SEQ ID NO: 11691 - DNA, 203 bp, Artificial sequence
  synthetic
ggcgcgccagtcctaggatagacatgaaatgtccagggattacgactcgcgtggtcggacagcacatgttagtcatgtattatggtgtttcccaacacgtatctttgctctagtattgaactttagtgatgagtgtacttggcatgtacacctgattagttagcccttgtggatacgccactgccgctcgactcggaccgatg

SEQ ID NO: 11692 - DNA, 203 bp, Artificial sequence
  synthetic
ggcgcgccagtcctatatgaaccatgagccggaacctatcaataacgtgcctcggggactgccagtgtgtggaggtgagctccgggattgccggcattcccgcttctgctggttgcttcatgctgcaggctgcggccgtcagccctcgctcgcattggtggcgctgaggtgccggggcagcaagtgaccgactcggaccgatg

SEQ ID NO: 11693 - DNA, 203 bp, Artificial sequence
  synthetic
ggcgcgccagtcctcgtgacgacatgagccggaagaccgtcccggatgaagctccactaatacagtgtgtggaggtgagctccgggattgccggcattcccgcttctgctggttgcttcatgctgcaggctgcggccgtcagccctcgctcgcattggtggcgctgaggtgccggggcagcaagtgaccgactcggaccgatg

SEQ ID NO: 11694 - DNA, 203 bp, Artificial sequence
  synthetic
ggcgcgccagtcctctgtttgacatgagccggaagaccgtcccggatggcctcggggactgccagtgtgtggaggtacttattacctgatccggcattcccgcttctgctggttgcttcatgctgcaggctgcggccgtcagccctcgctcgcattggtggcgctgaggtgccggggcagcaagtgaccgactcggaccgatg

SEQ ID NO: 11695 - DNA, 203 bp, Artificial sequence
  synthetic
ggcgcgccagtcctcgagcccgcatgagccggaagaccgtcccggatggcctcggggactgccagtgtgtggaggtgagctccgggattgccggcattcccgcttctgctggttgcttcatgctgcaggctgcggccgtcagccctcgctcgcattggtgaattgtgaccttgagggcagcaagtgaccgactcggaccgatg

SEQ ID NO: 11696 - DNA, 203 bp, Artificial sequence
  synthetic
ggcgcgccagtcctgccgtcctcatgagccggaagaccgtcccggatggcctcggggactgccagtgtgtggaggtgagctccgggattgccggcattcccgcttctgctggttgcttcatgctgcaggctgcggccgtcagccctcgctcgcattggtgcgagctcacacgatgggcagcaagtgaccgactcggaccgatg

SEQ ID NO: 11697 - DNA, 203 bp, Artificial sequence
  synthetic
ggcgcgccagtcctcaagcgatcatgagccggaagaccgtcccggatggcctcggggactgccagtgtgtggaggtgagctccgggattgccggcattcccgcttctgctggttgcttcatgctgcaggctgcggccgtcagccctcgctcgcattggtggcgctgaggtgccgactattttctcacacgactcggaccgatg

SEQ ID NO: 11698 - DNA, 203 bp, Artificial sequence
  synthetic
ggcgcgccagtcctcagtacagcatgagccggaagaccgtcccggatggcctcggggactgccagtgtgtggaggtgagctccgggattgccggcattcccgcttctgctggttgcttcatgctgcaggctgcggccgtcagccctcgctcgcattggtggcgctgaggtgccggggcagcaagtgaccgactcggaccgatg

SEQ ID NO: 11699 - DNA, 203 bp, Artificial sequence
  synthetic
ggcgcgccagtcctttggaatccatgagccggaagaccgtcccggatggcctcggggactgccagtgtgtggaggtgagctccgggattgccggcattcccgcttctgctggttgcttcatgctgcaggctggattttatctttaccgctcgcattggtggcgctgaggtgccggggcagcaagtgaccgactcggaccgatg

SEQ ID NO: 11700 - DNA, 203 bp, Artificial sequence
  synthetic
ggcgcgccagtcctgttcgcgacatgagccggaagaccgtcccggatggcctcggggactgccagtgtgtggaggtgagctccgggattgccggcattcccgcttctgctggttgcttcatgctgcaggctgtctgtacttcagaacgctcgcattggtggcgctgaggtgccggggcagcaagtgaccgactcggaccgatg

SEQ ID NO: 11701 - DNA, 203 bp, Artificial sequence
  synthetic
ggcgcgccagtccttgctcaaacatgagccggaagaccgtcccggatggcctcggggactgccagtgtgtggaggttgagagttttcaacccggcattcccgcttctgctggttgcttcatgctgcaggctgcggccgtcagccctcgctcgcattggtggcgctgaggtgccggggcagcaagtgaccgactcggaccgatg

SEQ ID NO: 11702 - DNA, 203 bp, Artificial sequence
  synthetic
ggcgcgccagtcctgcgatgcacatgccttacctcacgtgtaccagtttgctgagacacatgtctccgcccctgggtctggggaagaagtgtccggccagagtggcttacaagcggcttctgcggatggacctgcccgtcgcagatgacaacaccgtccacttcaattccaccctcatggctctgatccgactcggaccgatg

SEQ ID NO: 11703 - DNA, 203 bp, Artificial sequence
  synthetic
ggcgcgccagtcctaaccgtaacatgccttacctggacatgtatcagagaagcccggctgcctctccgcccctgggtctggggaagaagtgtccggccagagtggcttacaagcggcttctgcggatggacctgcccgtcgcagatgacaacaccgtccacttcaattccaccctcatggctctgatccgactcggaccgatg

SEQ ID NO: 11704 - DNA, 203 bp, Artificial sequence
  synthetic
ggcgcgccagtcctaggccaagcatgccttacctggacatgtatcagatgctgagacacatgtctccgcccctgggtctggggaagaagtgtccggccagagtgctacgatgaaccggtctgcggatggacctgcccgtcgcagatgacaacaccgtccacttcaattccaccctcatggctctgatccgactcggaccgatg

SEQ ID NO: 11705 - DNA, 203 bp, Artificial sequence
  synthetic
ggcgcgccagtcctataaatcccatgccttacctggacatgtatcagatgctgagacacatgtctccgcccctgggtctggggaagaagtgtccggccagagtggcttacaagcggctgagtgcataatctatgcccgtcgcagatgacaacaccgtccacttcaattccaccctcatggctctgatccgactcggaccgatg

SEQ ID NO: 11706 - DNA, 203 bp, Artificial sequence
  synthetic
ggcgcgccagtcctgcgttctgcatgccttacctggacatgtatcagatgctgagacacatgtctccgcccctgggtctggggaagaagtgtccggccagagtggcttacaagcggcttctgcggatggacctgcccgtcgcagatgacaacaccgtccacttcaattccacccctcataggacatcacgactcggaccgatg

SEQ ID NO: 11707 - DNA, 203 bp, Artificial sequence
  synthetic
ggcgcgccagtcctgtctacttcatgccttacctggacatgtatcagatgctgagacacatgtctccgcccctgggtctggggaagaagttgatccaggttccagcttacaagcggcttctgcggatggacctgcccgtcgcagatgacaacaccgtccacttcaattccaccctcatggctctgatccgactcggaccgatg

SEQ ID NO: 11708 - DNA, 203 bp, Artificial sequence
  synthetic
ggcgcgccagtcctcggccgttcatggccgagaggccggggcctccgggcggcgccgtgtccgcgaccgcgtaccctgacacccccgcggaattccctccgcacctccaggcgggtgcgatgcggcgccgctccaccttgactgataactgtctgtgcgccggcgcgttcggggccctggccgccgcccgactcggaccgatg

SEQ ID NO: 11709 - DNA, 203 bp, Artificial sequence
  synthetic
ggcgcgccagtccttccaaggccatggccgagaggccggggcctccgggcggcgccgtgtccgcgaccgcgtaccctgacacccccgcggaattccctccgcacctccaggcgggtgcgatgcggcgccgcttttggggcgtattcaactgtctgtgcgcaccgcaccaacaccccctggccgccgcccgactcggaccgatg

SEQ ID NO: 11710 - DNA, 203 bp, Artificial sequence
  synthetic
ggcgcgccagtcctacctatgacatggtgagaaaagggttgcggtaccttccagcaaggtcatacatgaaatcaagactggtggattggaaatgtatgtcccaggatggcaggccatgttccgctggatgcgcttccatgacctcggattgtggacaggagatcgcgatcttctgcccgaattcgtaacgactcggaccgatg

SEQ ID NO: 11711 - DNA, 203 bp, Artificial sequence
  synthetic
ggcgcgccagtcctctcagctgcatggtgagaaattttacagaaagatttccagcaaggtcatacatgaaatcaagactggtggattggaaatgtatgtcccaggatggcaggccatgccaattctttcaaccttccatgacctcggattgtggacaggagatcgcgatcttctgcccgaattcgtaacgactcggaccgatg

SEQ ID NO: 11712 - DNA, 203 bp, Artificial sequence
  synthetic
ggcgcgccagtccttgacttctcatggtgagaaattttacagaaagatttccagcaaggtcatacatgaaatcaagactggtggattggaaatgtatgtcccaggatggcaggccatgttccgctggatgcgcttccatgacctcggattgtggacaggagatcgcgatcttctgcccgaattcgtaacgactcggaccgatg

SEQ ID NO: 11713 - DNA, 203 bp, Artificial sequence
  synthetic
ggcgcgccagtcctattcgtagcatggttacccaatgcgcactcccgattccaataaacttgaatgtaaggcttgaaacagtggtctaggtgccctatttagggtgaggagcctagctggcagccccagtgaatcctctattggatagaaaccgctatatcgggtagctatagcagtcggatagtaatcgactcggaccgatg

SEQ ID NO: 11714 - DNA, 203 bp, Artificial sequence
  synthetic
ggcgcgccagtcctgtgaatggcatggttacccatcatttgaggaaatttccaataaacttgaatgtaaggcttgaaacagtggtctaggtgccctatttagggtgaggagcctagctggcagccccagtgaatcctctattggatagaaaccgctatatcgggtagctatagcagtcggatagtaatcgactcggaccgatg

SEQ ID NO: 11715 - DNA, 203 bp, Artificial sequence
  synthetic
ggcgcgccagtcctatgcggcgcatggttacccatcatttgaggaaatttccaataaacttgaatgtaaggcttgaaacagtggtctaggtgccctatttagggtgaggagcctagctggcagccccagtgaatcctctattggattagtttaatacctacgggtagctatagcagtcggatagtaatcgactcggaccgatg

SEQ ID NO: 11716 - DNA, 203 bp, Artificial sequence
  synthetic
ggcgcgccagtccttgggctcgcattcagcgcaacagccgtcggtcctctcgctttcccgtaggggccgtcggcgttcgtttgaaacgcggtccacccgtcccagcgtagccggcgctcttcggcgccgcgcgcaaacttcccgagccggcgggtgcgggcggtggcagcggggagtctcctatacgtcgactcggaccgatg

SEQ ID NO: 11717 - DNA, 203 bp, Artificial sequence
  synthetic
ggcgcgccagtcctctgccgggcattcagcgcaacagccgtcggtcctctcgctttcccgtaggggccgtcggcgttcgtttgaaacgcggtccacccgtcccagcgtagccggcgctcttcggcgccgcgcgcaaacttcccgagccggcgggtgcgggtatacctgtgtcaccccggatgggcgcccgactcggaccgatg

SEQ ID NO: 11718 - DNA, 203 bp, Artificial sequence
  synthetic
ggcgcgccagtcctaagccggtcattcatttctaccggtctctagtagtgcagcttcggctgagacacgtcccagtcttcctccgctgccgcccccgcaaggcttcgccgtcatcgaggccatttccagcgacttgtcgcacgcttttctatatacttcgttccccgccaaccgcaaccattgacgcccgactcggaccgatg

SEQ ID NO: 11719 - DNA, 203 bp, Artificial sequence
  synthetic
ggcgcgccagtcctcttggtaccattcatttctaccggtctctagtagtgcagcttcggctggtgtcatcggtgtccttcctccgctgccgcccccgcaaggcttcgccgtcatcgagctttcacatgcatccttgtcgcacgcttttctatatacttcgttccccgccaaccgcaaccattgacgcccgactcggaccgatg

SEQ ID NO: 11720 - DNA, 203 bp, Artificial sequence
  synthetic
ggcgcgccagtcctatttatgtcattcatttctaccggtctctagtagtgcagcttcggctggtgtcatcggtgtctgaatgatttaattgcccccgcaaggcttcgccgtcatcgaggccatttccagcgacttgtcgcacgcttttctatatacttcgttccccgccaaccgcaaccattgacgcccgactcggaccgatg

SEQ ID NO: 11721 - DNA, 203 bp, Artificial sequence
  synthetic
ggcgcgccagtccttggttcaacattcatttctaggttctctattatctgcagcttcggctggtgtcatcggtgtccttcctccgctgccgcccccgcaaggcttcgccgtcatcgaggccatttccagcgacttgtcgcacgcttttctatatacttcgttccccgccaaccgcaaccattgacgcccgactcggaccgatg

SEQ ID NO: 11722 - DNA, 203 bp, Artificial sequence
  synthetic
ggcgcgccagtcctaccttacgcatttgggccttacgagcccacaggccccggagtagcagcggggaggccgggagcccgcgggccggagccgcccggccgaggcgtgggggctgcggatgtactttgagactgggggcgacttgagcgttgagggcgcgcggggaggcgagccaccatgttcagccacgactcggaccgatg

SEQ ID NO: 11723 - DNA, 203 bp, Artificial sequence
  synthetic
ggcgcgccagtcctttactgtccatttgggccttacgagcccacaggccccggagtagcagctactgataacccttcccgcgggccggagccgcccggccgaggcgtgggggctgcggggccggcccatccgtgggggcgacttgagcgttgagggcgcgcggggaggcgagccaccatgttcagccacgactcggaccgatg

SEQ ID NO: 11724 - DNA, 203 bp, Artificial sequence
  synthetic
ggcgcgccagtcctactgtgcaccaaaacgaggggatatcagcttaccgaggccgcaggttttcctagtccctaccgatcgccccaagctgacatccccgggcccggaatgcggctctctgaccctctctgtgccctcccccgccccccgaaccaggcttggcgggcggaggcgccagcggatgtctccgactcggaccgatg

SEQ ID NO: 11725 - DNA, 203 bp, Artificial sequence
  synthetic
ggcgcgccagtcctctgctgaaccaaaacgaggggatatcagcttaccgaggccgcaggttttcctagtccctacctcatagatatgtaggacatccccgggcccggaatgcggctctctgaccctctctgtgccctcccccgcccatgatgtagttgcaggcgggcggaggcgccagcggatgtctccgactcggaccgatg

SEQ ID NO: 11726 - DNA, 203 bp, Artificial sequence
  synthetic
ggcgcgccagtcctgtaactgcccaaaacgaggggatatcagcttaccgaggccgcaggttttcctagtccctacctcatagatatgtaggacatccccgggcccggaatgcggctctctgaccctctctgtgccctcccccgccccccgaaccaggcttaaattaacactaacccagcggatgtctccgactcggaccgatg

SEQ ID NO: 11727 - DNA, 203 bp, Artificial sequence
  synthetic
ggcgcgccagtcctccgtaagaccaaaacgaggggatatcagcttaccgaggccgcaggttttcctagtccctacctcatagatatgtaggacatccccgggcccggaatgcggctctctgaccctctctgtgccctcccccgccccccgaaccaggcttggcgggcggaggcggttagacgacggcgcgactcggaccgatg

SEQ ID NO: 11728 - DNA, 203 bp, Artificial sequence
  synthetic
ggcgcgccagtcctcgggcgcaccaaaacgaggggatatcagcttaccgaggccgcaggttttcctagtccctacctcatagatatgtaggacatccccgggccgctctacatatgagctgaccctctctgtgccctcccccgccccccgaaccaggcttggcgggcggaggcgccagcggatgtctccgactcggaccgatg

SEQ ID NO: 11729 - DNA, 203 bp, Artificial sequence
  synthetic
ggcgcgccagtccttctagttgccaaaacgaggggatatcagcttacctgtagttggcccactcctagtccctacctcatagatatgtaggacatccccgggcccggaatgcggctctctgaccctctctgtgccctcccccgccccccgaaccaggcttggcgggcggaggcgccagcggatgtctccgactcggaccgatg

SEQ ID NO: 11730 - DNA, 203 bp, Artificial sequence
  synthetic
ggcgcgccagtccttcgcttcgccaaaatacctcattaccttaacgggttcagctgttaggattccagaaccttcttgaatggcaggccctgctctttgtcattttcctgctcatctactgcctgaccattatagggaatgttgtcatcatcaccgtggtgagccagggcctgcgactgcactcccctcgactcggaccgatg

SEQ ID NO: 11731 - DNA, 203 bp, Artificial sequence
  synthetic
ggcgcgccagtcctggaaagtgccaaaatacctccactgtgactaactttcagctgttaggaaagggcgtgtggggtgaatggcaggccctgctctttgtcattttcctgctcatctactgcctgaccattatagggaatgttgtcatcatcaccgtggtgagccagggcctgcgactgcactcccctcgactcggaccgatg

SEQ ID NO: 11732 - DNA, 203 bp, Artificial sequence
  synthetic
ggcgcgccagtcctttaaactcccaaaatacctccactgtgactaactttcagctgttaggattccagaaccttcttgaatggcaggccctgctctttgtcattttcctgctcatctactgcctgaccattatagggaatgttgtcatcatcaccgtggtcttggttacatactgactgcactcccctcgactcggaccgatg

SEQ ID NO: 11733 - DNA, 203 bp, Artificial sequence
  synthetic
ggcgcgccagtcctctttattgccaaaatacctccactgtgactaactttcagctgttaggattccagaaccttcttgaatggcaggccctgctctttgtcattttcctgctcatctactgcctgaccattatagggaatgttgtcatcatcaccgtggtgagccagggcctgcgactgagggatactcgactcggaccgatg

SEQ ID NO: 11734 - DNA, 203 bp, Artificial sequence
  synthetic
ggcgcgccagtcctgggaagctccaaaatacctccactgtgactaactttcagctgttaggattccagaaccttcttgaatggcaggccctgctctttgtcattttcctgctcatctactgcctgaccattatagggaatgttgtcatcatcaccgtggtgagccagggcctgcgactgcactcccctcgactcggaccgatg

SEQ ID NO: 11735 - DNA, 203 bp, Artificial sequence
  synthetic
ggcgcgccagtcctgatggtgaccaaaatacctccactgtgactaactttcagctgttaggattccagaaccttcttgaatggcaggccctgctctttgtcattttcctgctcatctactgcctgaccattatagggaatgttgtctagggagtaccctagagccagggcctgcgactgcactcccctcgactcggaccgatg

SEQ ID NO: 11736 - DNA, 203 bp, Artificial sequence
  synthetic
ggcgcgccagtcctggtatagcccaaaatacctccactgtgactaactttcagctgttaggattccagaaccttcttgaatggcaggccctgctctttgtcattttcctgctcatctagaaaagtgaggaactagggaatgttgtcatcatcaccgtggtgagccagggcctgcgactgcactcccctcgactcggaccgatg

SEQ ID NO: 11737 - DNA, 203 bp, Artificial sequence
  synthetic
ggcgcgccagtccttaatccagccaacagaaagtctgcaagcaatgccatgaggtcctgaccagagggtcttctgccaatgcctccaagtggtcaccacctcagaactataagaagcgaagtcggaagagataagccaagcaaaagcccagcacttcccagagccagggactgacacgacaagaccagcgactcggaccgatg

SEQ ID NO: 11738 - DNA, 203 bp, Artificial sequence
  synthetic
ggcgcgccagtccttttcgtccccaacagaaagtctgcaagcaatgccatgaggtcctgaccagagggtcttctgccaatgcctccaagtggtcaccacctcagaactataagaagcgtgtggcagccttggaagccaagcaaaagcccagcacttcccagagccagggactgacacgacaagaccagcgactcggaccgatg

SEQ ID NO: 11739 - DNA, 203 bp, Artificial sequence
  synthetic
ggcgcgccagtcctggccaaatccaacctactaacaggtgggtgggtagacctcagcaggaaactcagttcttctcatggggtttctctgagctccattcataccagaaagggagcaggagagagaggacaagtggatccaacagccttcgctccaggggaatcagggcatcgcctccttttctgggacgactcggaccgatg

SEQ ID NO: 11740 - DNA, 203 bp, Artificial sequence
  synthetic
ggcgcgccagtccttatggctgccaacctactaacaggtgggtgggtatggtgtgtggtttcactcagttcttctcatggggtttctctgagctccattcatacactgggtccttgcagagagagaggacaagtggatccaacagccttcgctccaggggaatcagggcatcgcctccttttctgggacgactcggaccgatg

SEQ ID NO: 11741 - DNA, 203 bp, Artificial sequence
  synthetic
ggcgcgccagtccttgtgtgggccaacctactaacaggtgggtgggtatggtgtgtggtttcactcagttcttctcatggggtttctctgagctccattcataccagaaagggagcagcgttcgcgttcagggtggatccaacagccttcgctccaggggaatcagggcatcgcctccttttctgggacgactcggaccgatg

SEQ ID NO: 11742 - DNA, 203 bp, Artificial sequence
  synthetic
ggcgcgccagtcctagaggagaccaacctactaacaggtgggtgggtatggtgtgtggtttcactcagttcttctcatggggtttctctgagctccattcataccagaaagggagcaggagagagaggacaagtggatccaacagccttcgctccaggggtgagcctaaccatgctccttttctgggacgactcggaccgatg

SEQ ID NO: 11743 - DNA, 203 bp, Artificial sequence
  synthetic
ggcgcgccagtcctcttgacagccaacctactaatgaacactcaacgttggtgtgtggtttcactcagttcttctcatggggtttctctgagctccattcataccagaaagggagcaggagagagaggacaagtggatccaacagccttcgctccaggggaatcagggcatcgcctccttttctgggacgactcggaccgatg

SEQ ID NO: 11744 - DNA, 203 bp, Artificial sequence
  synthetic
ggcgcgccagtcctcgagtaacccaactccacttatattggaagggatggacaggtggctcttgccctttagactacagttcccagcatgcccaggcgattgcgtcccagaaccgacgtcccaccgccttcccacatcggatcgcagggctcccaaaatggcctataacattcacgtgaatggagtcccgactcggaccgatg

SEQ ID NO: 11745 - DNA, 203 bp, Artificial sequence
  synthetic
ggcgcgccagtcctgtcaaatgccaactccactttgggctccctatcccttggacatatgtctgccctttagactacagttcccagcatgcccaggcgattgcgtcccagaaccgacgtcccaccgccttcccacatcggatcgcagggctcccaaaatggcctataacattcacgtgaatggagtcccgactcggaccgatg

SEQ ID NO: 11746 - DNA, 203 bp, Artificial sequence
  synthetic
ggcgcgccagtcctattacggaccaactccactttgggctccctatccggacaggtggctcttgccctttagactacagttcccagcatgcccaggcgattgcgtcccagaaccgacgtcccaccgccttcccacatcggatcgcagggctcccaaaatggcctataacattcatcgtcccctgcagtcgactcggaccgatg

SEQ ID NO: 11747 - DNA, 203 bp, Artificial sequence
  synthetic
ggcgcgccagtcctctacgcggccaactccactttgggctccctatccggacaggtggctcttgccctttagactacagttcccagcatgcccaggcgattgcgtcccagaaccgacgtcccaccgccttccgtagcaccggacacgggctcccaaaatggcctataacattcacgtgaatggagtcccgactcggaccgatg

SEQ ID NO: 11748 - DNA, 203 bp, Artificial sequence
  synthetic
ggcgcgccagtcctcgattccaccaagccccttgggtcgcgtatctggctggatccagcctctccgcatcttgatccaagtttgctagggaggaggcatccctacaccctatgactacaggcctgattctcttctttcagtcagggcgacccttgggcgctggagtacgcttgggactggggctgcgacgactcggaccgatg

SEQ ID NO: 11749 - DNA, 203 bp, Artificial sequence
  synthetic
ggcgcgccagtcctgtgcagagccaagccccttgggtcgcgtatctggctggatccagcctctccgcatcttgatcttttcccctcttctaggaggcatccctaataagctgcggacaaggcctgattctcttctttcagtcagggcgacccttgggcgctggagtacgcttgggactggggctgcgacgactcggaccgatg

SEQ ID NO: 11750 - DNA, 203 bp, Artificial sequence
  synthetic
ggcgcgccagtcctccatacggccaagccccttgggtcgcgtatctggctggatccagcctctccgcatcttgatcttttcccctcttctaggaggcatccctacaccctatgactacaggcctgattctcttctttcagtcagggcgacccttgggcgctggagtacgcttggactgtcaaagctatcgactcggaccgatg

SEQ ID NO: 11751 - DNA, 203 bp, Artificial sequence
  synthetic
ggcgcgccagtcctcggtcatcccaagccccttgggtcgcgtatctggctggatccagcctctccgcatcttgatcttttcccctcttctaggaggcatccctacaccctatgactacaggcctgattctcttctttcagtcagggcgacccttgggcgctggagtacgcttgggactggggctgcgacgactcggaccgatg

SEQ ID NO: 11752 - DNA, 203 bp, Artificial sequence
  synthetic
ggcgcgccagtccttattgtgcccaataaactcagtattaaggcttgttgtgttggacaaggtgccctatttagggtgaggagccttactctagttgggtcaacatcctccattggataggaacagctatattgggtagttgtagcagttgtattcaaatgaatgcagcgttccgaaatatcatacctcgactcggaccgatg

SEQ ID NO: 11753 - DNA, 203 bp, Artificial sequence
  synthetic
ggcgcgccagtccttctcctgaccaataaactctggtgtaaggcttagagtgatggtcgaggtgccctatttagggcattctagaaaaagggcagccccaccaaatcctctattggataggaacagctgtactgggcagttacagcagtcgtatggtaacacatgcggcgttccgaaataccatgcctcgactcggaccgatg

SEQ ID NO: 11754 - DNA, 203 bp, Artificial sequence
  synthetic
ggcgcgccagtccttttagctaccaataaactctggtgtaaggcttagagtgatggtcgaggtgccctatttagggtgaggagcctcggtggcagccccaccaaatcctctattggataggaacagctgtactgggcagttacagcagtcgtatggtaaccatgatccacacgagaaataccatgcctcgactcggaccgatg

SEQ ID NO: 11755 - DNA, 203 bp, Artificial sequence
  synthetic
ggcgcgccagtcctgaccatgtccaataaactctggtgtaaggcttagagtgatggtcgaggtgccctatttagggtgaggagcctcggtggcagccccaccaaatcctctattggataggaacagctgtactgggcagttacagcgcggcatcaaatggacatgcggcgttccgaaataccatgcctcgactcggaccgatg

SEQ ID NO: 11756 - DNA, 203 bp, Artificial sequence
  synthetic
ggcgcgccagtcctgccgcgggccaataaactctggtgtaaggcttagagtgatggtcgaggtgccctatttagggtgaggagcctcggtggcagccccaccaacaaggtgtagcagcaggaacagctgtactgggcagttacagcagtcgtatggtaacacatgcggcgttccgaaataccatgcctcgactcggaccgatg

SEQ ID NO: 11757 - DNA, 203 bp, Artificial sequence
  synthetic
ggcgcgccagtcctagttagcgccaataaactctggtgtaaggcttaggtatcctcctcccctgccctatttagggtgaggagcctcggtggcagccccaccaaatcctctattggataggaacagctgtactgggcagttacagcagtcgtatggtaacacatgcggcgttccgaaataccatgcctcgactcggaccgatg

SEQ ID NO: 11758 - DNA, 203 bp, Artificial sequence
  synthetic
ggcgcgccagtccttcacccgcccaataaacttgaatgtaaggcttgaaacagtggtctaggtgccctatttagggtgaggagcctagctggcagccccagtgaatcctctattggatagaaaccgctatatcgggtagctatagcagtcggatagtaatatatccggcgtttcgaaataccatacctcgactcggaccgatg

SEQ ID NO: 11759 - DNA, 203 bp, Artificial sequence
  synthetic
ggcgcgccagtcctcataaataccaataaacttgaatgtaaggcttgaaacagtggtctaggtgccctatttagggtgaggagcctagctggcagccccagtgaatcctctattggatagaaaccgctatatcgggtagctatagcagtcggatagtaatatatccggcgtttctcgcccgggagtggcgactcggaccgatg

SEQ ID NO: 11760 - DNA, 203 bp, Artificial sequence
  synthetic
ggcgcgccagtcctagtccgccccaataaacttggtgtcgtactccagaacagtggtctaggtgccctatttagggtgaggagcctagctggcagccccagtgaatcctctattggatagaaaccgctatatcgggtagctatagcagtcggatagtaatatatccggcgtttcgaaataccatacctcgactcggaccgatg

SEQ ID NO: 11761 - DNA, 203 bp, Artificial sequence
  synthetic
ggcgcgccagtcctgaacctggccaatcggtgtgctgccactgggccatggagactgtggcacagtagactgtagtgtgaggctcgcgggggcagtggccatggaggccgtgctgaacgagctggtgtctgtggaggacctgctgaagtttgaaaagaaatttcagtctgagaaggcagcaggctcggcgactcggaccgatg

SEQ ID NO: 11762 - DNA, 203 bp, Artificial sequence
  synthetic
ggcgcgccagtccttgaaaccaccacaagccacagcgctgagctgcaggcgcggcgaaacttccctctacccgcccggcccgcggcgcgcaccgttggcgctggacgcttcctccttggaagcgcctctccctcagttatggagaaaacttgtatagatgcacttcctcttacttcactccagatccgcgactcggaccgatg

SEQ ID NO: 11763 - DNA, 203 bp, Artificial sequence
  synthetic
ggcgcgccagtccttgttatggccacaagccacagcgctgagctgcaggcgcggcgaaacttccctctacccgcccggcccgcggcgcgcaccgttggcgctggacgcttcctccttggaagcgcctctccctcagttatggagaacctggtatgtacctcacttcctcttactatgaattcttcagacgactcggaccgatg

SEQ ID NO: 11764 - DNA, 203 bp, Artificial sequence
  synthetic
ggcgcgccagtcctgcccgtgaccacaagccacagcgctgagctgcaggcgcggcgaaacttccctctacccgcccggcccgcggcgcgcaccgttggcgctgggtctgggtctgccagaagcgcctctccctcagttatggagaaaacttgtatagatgcacttcctcttactatgaattcttcagacgactcggaccgatg

SEQ ID NO: 11765 - DNA, 203 bp, Artificial sequence
  synthetic
ggcgcgccagtccttcctggctccacaagccacagcgctgagctgcaggcgcggcgaaacttccctctacccgcccggcccgcggcgcgcggacagccgtgcttacgcttcctccttggaagcgcctctccctcagttatggagaaaacttgtatagatgcacttcctcttactatgaattcttcagacgactcggaccgatg

SEQ ID NO: 11766 - DNA, 203 bp, Artificial sequence
  synthetic
ggcgcgccagtccttgccgaccccacaagccacagcgctgagctgcaggcgcggcgaaacttccctctacccgccctagggttcaacgttaccgttggcgctggacgcttcctccttggaagcgcctctccctcagttatggagaaaacttgtatagatgcacttcctcttactatgaattcttcagacgactcggaccgatg

SEQ ID NO: 11767 - DNA, 203 bp, Artificial sequence
  synthetic
ggcgcgccagtcctgcgtgtaaccacaatgccgtggggcgggaagtccaggccccgcactcgatccacgctggctccctacggaggcccacctactcgaggcccaccgactcctactgcaatcagtactatgcgatcgtcctagagagtccattcagctgcacttccgcctcagtatggcatcacagccgactcggaccgatg

SEQ ID NO: 11768 - DNA, 203 bp, Artificial sequence
  synthetic
ggcgcgccagtcctgacaaaccccacacgggcccgtcatgtgtgcaaccccagcacggcgacagattgtgaggtgtcactttaaagtgacattgaaactggtacccacacactggtgacaggctaaggatgcccttcaggtaccccgaggtaacacgcgacactcgggatctgagaaggggactggggcgactcggaccgatg

SEQ ID NO: 11769 - DNA, 203 bp, Artificial sequence
  synthetic
ggcgcgccagtccttcagaagaccacacgggcccgtcatgtgtgcaaccccagcacggcgactttactgcgaaacccactttaaagtgacattgaaactggtacccacacactggtgaagttaggcatcacgccttcaggtaccccgaggtaacacgcgacactcgggatctgagaaggggactggggcgactcggaccgatg

SEQ ID NO: 11770 - DNA, 203 bp, Artificial sequence
  synthetic
ggcgcgccagtccttggactgaccacacgggcccgtcatgtgtgcaaccccagcacggcgactttactgcgaaacccactttaaagtgacattgaaactggtacccacacactggtgacaggctaaggatgcccttcaggtaccccgaggtaacacgcgacactcgggatctgatctataagggcttccgactcggaccgatg

SEQ ID NO: 11771 - DNA, 203 bp, Artificial sequence
  synthetic
ggcgcgccagtcctgtttggacccacacgggcccgtcatgtgtgcaaccccagcacggcgactttactgcgaaacccactttaaagtgacattgaaactggtactgtttagagccgaccaggctaaggatgcccttcaggtaccccgaggtaacacgcgacactcgggatctgagaaggggactggggcgactcggaccgatg

SEQ ID NO: 11772 - DNA, 203 bp, Artificial sequence
  synthetic
ggcgcgccagtcctgcagattcccacacgggcccgtcatgtgtgcaaccccagcacggcgactttactgcgaaacccactttaaagtgacgggatggaaatgttccacacactggtgacaggctaaggatgcccttcaggtaccccgaggtaacacgcgacactcgggatctgagaaggggactggggcgactcggaccgatg

SEQ ID NO: 11773 - DNA, 203 bp, Artificial sequence
  synthetic
ggcgcgccagtcctatggacgcccacacgggcccgtcatgtgtgcaacggtctgcgatgttgtttactgcgaaacccactttaaagtgacattgaaactggtacccacacactggtgacaggctaaggatgcccttcaggtaccccgaggtaacacgcgacactcgggatctgagaaggggactggggcgactcggaccgatg

SEQ ID NO: 11774 - DNA, 203 bp, Artificial sequence
  synthetic
ggcgcgccagtcctggctttcaccaccagcctcggccagctggttgtggaccagccgtgaccgacctatcaggtttcaacctcaccgtccaatgggctgcagccacctctctccagtgaggtctgagacccagccttaacgaggctacccccttccaggtccggccgtagcacctccgcgccgtcgcccgactcggaccgatg

SEQ ID NO: 11775 - DNA, 203 bp, Artificial sequence
  synthetic
ggcgcgccagtcctacagatagccaccagcctcggccagctggttgtggaccagccgtgacctggggcaacccagccaacctcaccgtccaatgggctgcagccacctctctccagtgaggtctgagacccagccttaacgaggctacccccttccaggaatcatgacagcacctccgcgccgtcgcccgactcggaccgatg

SEQ ID NO: 11776 - DNA, 203 bp, Artificial sequence
  synthetic
ggcgcgccagtccttgcgtatcccaccagcctcggccagctggttgtggaccagccgtgacctggggcaacccagccaacctcaccgtccaatgggctgcagccacctctctccagtgaggtctgagacccagccttaacgaggctgagtttgcgagttgccggccgtagcacctccgcgccgtcgcccgactcggaccgatg

SEQ ID NO: 11777 - DNA, 203 bp, Artificial sequence
  synthetic
ggcgcgccagtccttactaccaccaccagcctcggccagctggttgtggaccagccgtgacctggggcaacccagccaacctcaccgtccaatgggctgcagccacctctctccagtgtaccagtttgaggtgccttaacgaggctacccccttccaggtccggccgtagcacctccgcgccgtcgcccgactcggaccgatg

SEQ ID NO: 11778 - DNA, 203 bp, Artificial sequence
  synthetic
ggcgcgccagtcctgattagatccaccagcctcggccagctggttgtggaccagccgtgacctggggcaacccagccaacctcaccgtccaatgggctgcagccggtctgacattaccaggtctgagacccagccttaacgaggctacccccttccaggtccggccgtagcacctccgcgccgtcgcccgactcggaccgatg

SEQ ID NO: 11779 - DNA, 203 bp, Artificial sequence
  synthetic
ggcgcgccagtccttcggatacccacccctaatgagcgccgcggcctgtatttctagacctgcccttcgcctggttcgtggcgccttgtgaccccgggcccctgccgcctgcaagtcggaaattgcgctgtgctcctgtgctacggcctgtggctggactgcctgctgctgcccaactggctggcaagcgactcggaccgatg

SEQ ID NO: 11780 - DNA, 203 bp, Artificial sequence
  synthetic
ggcgcgccagtcctatagcaggccacggctagccttgacaaccgccagtgtgttcaagattcagaccagtgtttcaagaacacggatgcagcagcagctcttctggcctctcacgccatccaggggaccttgtcctaccctcttgtgtccgtcgtcagtgaatctctgactcgaaaaggtactcagctcgactcggaccgatg

SEQ ID NO: 11781 - DNA, 203 bp, Artificial sequence
  synthetic
ggcgcgccagtcctgacatattccactaccagccaacaagtcacgggcgtcgagacaactatttttgaggtatctgaggctaccccacagcactctctggcattggcaagactcgtggctgtgacccatgggcctctgaggaggcgttgtaagtccgcccagctccccacttgctgtgctctcactcacgactcggaccgatg

SEQ ID NO: 11782 - DNA, 203 bp, Artificial sequence
  synthetic
ggcgcgccagtcctgcctggtcccactaccagccggagccagggcctggtcgagacaactatttttgaggtatctgaggctaccccacagcactctctggcattataggcgaggacacctgtgacccatgggcctctgaggaggcgttgtaagtccgcccagctccccacttgctgtgctctcactcacgactcggaccgatg

SEQ ID NO: 11783 - DNA, 203 bp, Artificial sequence
  synthetic
ggcgcgccagtcctaagtctgaccactaccagccggagccagggcctggtcgagacaactatttttgaggtatctgaggctaccccacagcactctctggcattggcaagactcgtggctgtgacccatgggcctctgaggaggcgttgtaagtccgcccagctccccacttgcaagtaaggtgtaagcgactcggaccgatg

SEQ ID NO: 11784 - DNA, 203 bp, Artificial sequence
  synthetic
ggcgcgccagtcctagtctacaccactaccagccggagccagggcctggtcgagacaactatttttgaggtatctgaggctaccccacagcactctctggcattggcaagactcgtggctgtgacccatgggcctctgaggaggcgttgtaagtccgcccgatcgaggtgcatatgtgctctcactcacgactcggaccgatg

SEQ ID NO: 11785 - DNA, 203 bp, Artificial sequence
  synthetic
ggcgcgccagtcctatcaagagccactaccagccggagccagggcctggtcgagacaactatttttgaggtatctgaggctaccccacagcactctctggcattggcaagactcgtggtctgtctgggaaaacctctgaggaggcgttgtaagtccgcccagctccccacttgctgtgctctcactcacgactcggaccgatg

SEQ ID NO: 11786 - DNA, 203 bp, Artificial sequence
  synthetic
ggcgcgccagtcctataaagttccactaccagccggagccagggcctggtcgagacaactatttttgaggtatctgtctaacggagcatacactctctggcattggcaagactcgtggctgtgacccatgggcctctgaggaggcgttgtaagtccgcccagctccccacttgctgtgctctcactcacgactcggaccgatg

SEQ ID NO: 11787 - DNA, 203 bp, Artificial sequence
  synthetic
ggcgcgccagtcctctgcaataccagaactttacacagaaaaggtgctcaaaggatatttgtttaatgaatgtggtatgctgacatttaaacaggacaaaacttgtagaacttcatggaggaacacggagtgacccaaaccgaacatatggctaccatagaagcacatgcagtgctgggtggttgaagcgactcggaccgatg

SEQ ID NO: 11788 - DNA, 203 bp, Artificial sequence
  synthetic
ggcgcgccagtcctgaattccgccagaactttacacagaaaaggtgctcaaaggatatttgtttaatgaatgtggtatgctgacatttaaacaggacaaaacttgtagaacttcatggaggaacacggagtgacccaaaccgaacatatggctaccatagaagcacatgcagtggcccagcaagtgcacgactcggaccgatg

SEQ ID NO: 11789 - DNA, 203 bp, Artificial sequence
  synthetic
ggcgcgccagtccttcttcacgccagaactttacacagaaaaggtgctcaaaggatatttgtttaatgaatgtggtatgctgacatttaagttacctccgtagcgtagaacttcatggaggaacacggagtgacccaaaccgaacatatggctaccatagaagcacatgcagtggcccagcaagtgcacgactcggaccgatg

SEQ ID NO: 11790 - DNA, 203 bp, Artificial sequence
  synthetic
ggcgcgccagtcctaccaactgccagaagacagcggggcgttccttgctgcatttctattggttggcgtttgttactcccagccaatagaaagtgagcgcaactttttatgccaaaatggcgatgcctaccacctagaactggattgtgcgctggccgccaccgctgccacctgctcagagtgaaatacgactcggaccgatg

SEQ ID NO: 11791 - DNA, 203 bp, Artificial sequence
  synthetic
ggcgcgccagtcctaatcacttccagaagacagcggggcgttccttgctgcatttctattggttggcgtttgttactcccagccaatagaaagtgagcttcttgacaagtgccaaaattagccctaacgaggcctagaactggattgtgcgctggccgccaccgctgccacctgctcagagtgaaatacgactcggaccgatg

SEQ ID NO: 11792 - DNA, 203 bp, Artificial sequence
  synthetic
ggcgcgccagtccttgaaccacccagaatcaagtgttccgcgtgattgaagacaccccctcgcttcgagcctgtctgcacatccaataaaatagctggattataactcctcttctttctctgggggccgtggggtgggagctggggcgagaggtgccgttggcccccgttgcttttcctctgggaaggcgactcggaccgatg

SEQ ID NO: 11793 - DNA, 203 bp, Artificial sequence
  synthetic
ggcgcgccagtcctttgtcctgccagaatcaagtgttccgcgtgattgaagacaccccctcgtccaagaatgcaaacgggccgtggggttatagctggattataactcctcttctttctctgggggccgtggggtgggagctggggcgagaggtgccgttggcccccgttgcttttcctctgggaaggcgactcggaccgatg

SEQ ID NO: 11794 - DNA, 203 bp, Artificial sequence
  synthetic
ggcgcgccagtccttctctgagccagaatcaagtgttccgcgtgattgaagacaccccctcgtccaagaatgcaaagcacatccaataaaatagctggattataactcctcttctttcatccccaaggtataggtgggagctggggcgagaggtgccgttggcccccgttgcttttcctctgggaaggcgactcggaccgatg

SEQ ID NO: 11795 - DNA, 203 bp, Artificial sequence
  synthetic
ggcgcgccagtcctagattcgtccagaatcaagtgttccgcgtgattgaagacaccccctcgtccaagaatgcaaagcacatccaataaaatagctggattataactcctcttctttctctgggggccgtggggtgggagctggggcgagaggtgccgttggcccccgttgcttaattctatttcgcacgactcggaccgatg

SEQ ID NO: 11796 - DNA, 203 bp, Artificial sequence
  synthetic
ggcgcgccagtccttcgatcgtccagaatcaagtgttccgcgtgattgaagacaccccctcgtccaagaatgcaaagcacatccaataaaggcttacccacgccactcctcttctttctctgggggccgtggggtgggagctggggcgagaggtgccgttggcccccgttgcttttcctctgggaaggcgactcggaccgatg

SEQ ID NO: 11797 - DNA, 203 bp, Artificial sequence
  synthetic
ggcgcgccagtccttctatgctccagaatcaagtgttccgcgtgattgtcactcagttagactccaagaatgcaaagcacatccaataaaatagctggattataactcctcttctttctctgggggccgtggggtgggagctggggcgagaggtgccgttggcccccgttgcttttcctctgggaaggcgactcggaccgatg

SEQ ID NO: 11798 - DNA, 203 bp, Artificial sequence
  synthetic
ggcgcgccagtcctaatctttaccagacagtggctcagccttcaggacctgagcttccagcagccgaagacacctattcacacaagatggtaaaaacaaatcataggcgctgtcgcacaaaattcacagaagaacagttgaaaatcctcatcaataccttcaatcaaaagccttacccaggttatgctcgactcggaccgatg

SEQ ID NO: 11799 - DNA, 203 bp, Artificial sequence
  synthetic
ggcgcgccagtcctacttgtcaccagacagtggctcagccttcaggactctcttccagcatggccgaagacacctattcacacaagatggtaaaaacaaatcataggcgctgtcgcacaaaattcacagaagaacagttgaaaatcctcatcaataccttcaatcaaaagccttacccaggttatgctcgactcggaccgatg

SEQ ID NO: 11800 - DNA, 203 bp, Artificial sequence
  synthetic
ggcgcgccagtcctgtcgtcaaccagacagtggctcagccttcaggactctcttccagcatggccgaagacacctattcacacaagatggtaaaaacaaatcataggcgctgtcgcacaaaattcacagaagcttgtaacgtggaactcatcaataccttcaatcaaaagccttacccaggttatgctcgactcggaccgatg

SEQ ID NO: 11801 - DNA, 203 bp, Artificial sequence
  synthetic
ggcgcgccagtcctactccagcccagccttgaactcgctggacagagcgttgctttctctaagcctggaagtgcccgctgagaaagggagaagacagcagaggggttgccgagagcatatatcagagggaccccctgaagctggtggccactttcagacaaatacttcaaggagagaaaaaagctgttcgactcggaccgatg

SEQ ID NO: 11802 - DNA, 203 bp, Artificial sequence
  synthetic
ggcgcgccagtccttaaggaacccagccttgaactcgctggacagagctacagacctatggggcctggaagtgccccggagttcctcttcaagacagcagaggggttgccgagagcatatatcagagggaccccctgaagctggtggccactttcagacaaatacttcaaggagagaaaaaagctgttcgactcggaccgatg

SEQ ID NO: 11803 - DNA, 203 bp, Artificial sequence
  synthetic
ggcgcgccagtcctatcccgtgccagccttgaactcgctggacagagctacagacctatggggcctggaagtgcccgctgagaaagggagaagacagcagaggggttgccgagagcatatatcagagggaccccctgaagctggtggccactttcagacaaatacttcaaggaggcggtggcctcacgcgactcggaccgatg

SEQ ID NO: 11804 - DNA, 203 bp, Artificial sequence
  synthetic
ggcgcgccagtcctgcgctgggccagccttgaactcgctggacagagctacagacctatggggcctggaagtgcccgctgagaaagggagaagacagcagaggggttgccgagagcatatatcagagggaccccctgaagctggtggccactttcagacagtgctgcatgacctagaaaaaagctgttcgactcggaccgatg

SEQ ID NO: 11805 - DNA, 203 bp, Artificial sequence
  synthetic
ggcgcgccagtcctatgttccaccagccttgaactcgctggacagagctacagacctatggggcctggaagtgcccgctgagaaagggagaagacagcagagggtaccgttgcccgtaatatcagagggaccccctgaagctggtggccactttcagacaaatacttcaaggagagaaaaaagctgttcgactcggaccgatg

SEQ ID NO: 11806 - DNA, 203 bp, Artificial sequence
  synthetic
ggcgcgccagtcctcaccacaaccagctgattaccgacgagaattcaacctcttgagactggccgaaaggcagccacggggccaccaaggcggcgcagcgctgcatgcggcaaggggaaaaatccttcgggtgacccctggtggcaatcccttcccttaggagcatgagtgtggtcgacacattcacccgactcggaccgatg

SEQ ID NO: 11807 - DNA, 203 bp, Artificial sequence
  synthetic
ggcgcgccagtcctcgtttgttccagctgattacttgtcctgcgagttcctcttgagactggccgaaaggcagccacggggccaccaaggcggcgcagcgctgcatgcggcaaggggaaaaatccttcgggtagggttatcctcttatcccttcccttaggagcatgagtgtggtcgacacattcacccgactcggaccgatg

SEQ ID NO: 11808 - DNA, 203 bp, Artificial sequence
  synthetic
ggcgcgccagtcctaaatggcaccagctgattacttgtcctgcgagttcctcttgagactggccgaaaggcagccacggggccaccaaggcggcgcagcgctgcatgcggcaaggggaaaaatccttcgggtgacccctggtggcaatcccttcccttagatagggcgtgaacctcgacacattcacccgactcggaccgatg

SEQ ID NO: 11809 - DNA, 203 bp, Artificial sequence
  synthetic
ggcgcgccagtccttggcattcccagctgattacttgtcctgcgagttcctcttgagactggccgaaaggcagccacggggccaccaaggcggcgcagcgctgcatgcggcaaggggaaaaatccttcgggtgacccctggtggcaatcccttcccttaggagcatgagtgtgggtactgatgcagagcgactcggaccgatg

SEQ ID NO: 11810 - DNA, 203 bp, Artificial sequence
  synthetic
ggcgcgccagtcctcccaccgaccagctgattacttgtcctgcgagttcctcttgagactggccgaaaggcagccacggggccaccaaggcggcgcagcgctgcatgcggcaaggggactttaggagttcaggacccctggtggcaatcccttcccttaggagcatgagtgtggtcgacacattcacccgactcggaccgatg

SEQ ID NO: 11811 - DNA, 203 bp, Artificial sequence
  synthetic
ggcgcgccagtcctctcttctaccagctgattacttgtcctgcgagttcctcttgagactggccgaaaggcagccacggggccaccaaggcggcgcagcgctgctgcgtatgttttagaaaatccttcgggtgacccctggtggcaatcccttcccttaggagcatgagtgtggtcgacacattcacccgactcggaccgatg

SEQ ID NO: 11812 - DNA, 203 bp, Artificial sequence
  synthetic
ggcgcgccagtcctacatactcccaggccgccccgaggcttggggtctctcccactcccagagcgcccggggccgaacagcgggggcacacggggcgctgccgaagtgcaaggccacggccagagctcgagcccgacgcgctgtctggagtcgtaggaccctgacgtggctgaagcggccccgggagccgactcggaccgatg

SEQ ID NO: 11813 - DNA, 203 bp, Artificial sequence
  synthetic
ggcgcgccagtcctgagcattgccaggccgccccgaggcttggggtcttcgaaggataatcggcgcccggggccgaacagcgggggcacacggggcgctgccgaagtgcaaggccacggccagagctcgagcccgacgcgctgtctcttccgcggcttagctgacgtggctgaagcggccccgggagccgactcggaccgatg

SEQ ID NO: 11814 - DNA, 203 bp, Artificial sequence
  synthetic
ggcgcgccagtccttgtaagagccaggccgccccgaggcttggggtcttcgaaggataatcggcgcccggggccgatttcgctacaagagcggggcgctgccgaagtgcaaggccacggccagagctcgagcccgacgcgctgtctggagtcgtaggaccctgacgtggctgaagcggccccgggagccgactcggaccgatg

SEQ ID NO: 11815 - DNA, 203 bp, Artificial sequence
  synthetic
ggcgcgccagtcctggtgtacgccaggtgcgtacgcgacggagcggggtgtgaagatggcggacgaagaggccgagcaggagaggttgagttgcggcgaaggcggctgcgtcgcggagctgcagcgcctgggcgagcggctccaggagctggagctacagctgcgggagagccgggtaccggccgtggcgactcggaccgatg

SEQ ID NO: 11816 - DNA, 203 bp, Artificial sequence
  synthetic
ggcgcgccagtccttatgacacccaggtgcgtacgcgacggagcggggtgtgaagatggcggctcccagactatgacaggagaggttgagttgcggcgaaggcggctgcgtcgcggagctgcagcgcctgggcgagcggctccaggagctggagctacagctgcgggagagccgggtaccggccgtggcgactcggaccgatg

SEQ ID NO: 11817 - DNA, 203 bp, Artificial sequence
  synthetic
ggcgcgccagtcctgtcctggcccagttcccatgcgacaagaacagtttcgaatcggaagcttgcttaacgtagttctaacagttttttattagagagcagatctctgatgaacaaccaacggaaaaagacgggtcgaccgtctttcaatatgctgaaacgcgcgagaaaccgcgtgtcaactgtttccgactcggaccgatg

SEQ ID NO: 11818 - DNA, 203 bp, Artificial sequence
  synthetic
ggcgcgccagtcctacccaagtccatgagggggatccaatttaggaaacattctgtttaagagttgacaaggtctcaatgaataatggacaagcaacaattacaagaaatggaggaaggttcgaaatcaggtgtcgtcacttggaccgtgactacaccatgccactaccaaatgctactagtaatgatcgactcggaccgatg

SEQ ID NO: 11819 - DNA, 203 bp, Artificial sequence
  synthetic
ggcgcgccagtccttccactccccattggacctctcaagacttgattgatgcaattcaaaattttctacaacatctaggtattactgatgggcgcaggcttcagtatatattagtgtcataacactcaatcctaatgcttaccacatcatcaaactattaactcaaacaattcaagccatgggacaaacgactcggaccgatg

SEQ ID NO: 11820 - DNA, 203 bp, Artificial sequence
  synthetic
ggcgcgccagtcctcacggatgccattttgtgaagagacgaagactgactatcaggcagatgatttctggcctcgagccgcagtcagcttctccccgtagaacccggcagtaggagacttagaatcgaatctcttctccctcccgcctcctgtttttggctttttgagaaaccttatcatccaacacacgactcggaccgatg

SEQ ID NO: 11821 - DNA, 203 bp, Artificial sequence
  synthetic
ggcgcgccagtccttaaagtaaccattttgtgaagagacgaagactgagctgttttggctgcatttctggcctcgaatgcataaatcagcctccccgtagaacccggcagtaggagacttagaatcgaatctcttctccctcccgcctcctgtttttggctttttgagaaaccttatcatccaacacacgactcggaccgatg

SEQ ID NO: 11822 - DNA, 203 bp, Artificial sequence
  synthetic
ggcgcgccagtcctcgacacagccattttgtgaagagacgaagactgagctgttttggctgcatttctggcctcgagccgcagtcagcttctccccgtagaacccggcagtaggagacactcccctccgctgcttctccctcccgcctcctgtttttggctttttgagaaaccttatcatccaacacacgactcggaccgatg

SEQ ID NO: 11823 - DNA, 203 bp, Artificial sequence
  synthetic
ggcgcgccagtcctggttagtcccattttgtgaagagacgaagactgagctgttttggctgcatttctggcctcgagccgcagtcagcttctccccgtagaacccggcagtaggagacttagaatcgaatctcttctccctcccgcaaatgtagccctcatttttgagaaaccttatcatccaacacacgactcggaccgatg

SEQ ID NO: 11824 - DNA, 203 bp, Artificial sequence
  synthetic
ggcgcgccagtccttaggtggacccaatagatcactaatacatagcacttatttctcttgctttacggcaggtgaagtaagaagagccatcagaggggaaaagttattgtcctgctgcaactatccccaagctcataaagcacaggtaccatcacttcaatacctagccctagtagtagtacaacaaacgactcggaccgatg

SEQ ID NO: 11825 - DNA, 203 bp, Artificial sequence
  synthetic
ggcgcgccagtcctcgcgtggacccacccggcaggggaggcggcctaacgactctttcactgggtcgccatcttggtcccgggactccaaggaacttaggaatttagtctgcttaggtgagagtctgtaccacctgggaactgccaaagcaacacagtgtctgagaaaggtcctgttttgggccttctcgactcggaccgatg

SEQ ID NO: 11826 - DNA, 203 bp, Artificial sequence
  synthetic
ggcgcgccagtcctgatgccagcccacccggcaggggaggcggcctaagccacagcagcagcccaacaatctcctatcccgggactccaaggaacttaggaatttagtctgcttaggtgagagtctgtaccacctgggaactgccaaagcaacacagtgtctgagaaaggtcctgttttgggccttctcgactcggaccgatg

SEQ ID NO: 11827 - DNA, 203 bp, Artificial sequence
  synthetic
ggcgcgccagtcctggattatccccacccggcaggggaggcggcctaagccacagcagcagcggtcgccatcttggtcccgggactccaaggaacttaggaattctcctgttagcaaagagagtctgtaccacctgggaactgccaaagcaacacagtgtctgagaaaggtcctgttttgggccttctcgactcggaccgatg

SEQ ID NO: 11828 - DNA, 203 bp, Artificial sequence
  synthetic
ggcgcgccagtcctagaaccgacccacccggcagtatctagcttaatggccacagcagcagcggtcgccatcttggtcccgggactccaaggaacttaggaatttagtctgcttaggtgagagtctgtaccacctgggaactgccaaagcaacacagtgtctgagaaaggtcctgttttgggccttctcgactcggaccgatg

SEQ ID NO: 11829 - DNA, 203 bp, Artificial sequence
  synthetic
ggcgcgccagtcctaggagtgtcccattgttccactagaatgctcatagcaggctcctccggaagaccaggggcagacggggcggtggcggggtcgtgcccagtgggaggggtcgggtctgcccaatgggttctcccgggcggggggcggggctctatttcagcagctctcagggccttgggctcatccgactcggaccgatg

SEQ ID NO: 11830 - DNA, 203 bp, Artificial sequence
  synthetic
ggcgcgccagtccttcccataacccattgttccaggcaggattcagccatgtaacataagttaagaccaggggcagacggggcggtggcggggtcgtgcccagtgggaggggtcgggtctgcccaatgggttctcccgggcggggggcggggctctatttcagcagctctcagggccttgggctcatccgactcggaccgatg

SEQ ID NO: 11831 - DNA, 203 bp, Artificial sequence
  synthetic
ggcgcgccagtcctcccgagctcccattgttccaggcaggattcagccgcaggctcctccggaagaccaggggcagacggggcggtggcggggtcgtgcccagtgggaggggtcgggtctgcccaatgggttctcccgggcgggggagcccttagcgacccagcagctctcagggccttgggctcatccgactcggaccgatg

SEQ ID NO: 11832 - DNA, 203 bp, Artificial sequence
  synthetic
ggcgcgccagtcctggtccgtgcccattgttccaggcaggattcagccgcaggctcctccggaagaccaggggcagacggggcggtggcgtatgttaatagctggggaggggtcgggtctgcccaatgggttctcccgggcggggggcggggctctatttcagcagctctcagggccttgggctcatccgactcggaccgatg

SEQ ID NO: 11833 - DNA, 203 bp, Artificial sequence
  synthetic
ggcgcgccagtcctttatgtgacccattgttccaggcaggattcagccgcaggctcctccgggttcggttcctggcacggggcggtggcggggtcgtgcccagtgggaggggtcgggtctgcccaatgggttctcccgggcggggggcggggctctatttcagcagctctcagggccttgggctcatccgactcggaccgatg

SEQ ID NO: 11834 - DNA, 203 bp, Artificial sequence
  synthetic
ggcgcgccagtcctatgtgagaccccaacaatcgactcagcttcaaaaagtgcgctcgccgtcggctctacctgcgtgctttagctccttctcgcctgatccttctgtctctcccaaccccggacacccggcttcgactggttatatcttcggtgttcttttcctctcttcttctttcgcggttcagccgactcggaccgatg

SEQ ID NO: 11835 - DNA, 203 bp, Artificial sequence
  synthetic
ggcgcgccagtcctcagtatttccccaacaatcgctgtgtgccgctttagtgcgctcgccgtaatagtccgaccattgctttagctccttctcgcctgatccttctgtctctcccaaccccggacacccggcttcgactggttatatcttcggtgttcttttcctctcttcttctttcgcggttcagccgactcggaccgatg

SEQ ID NO: 11836 - DNA, 203 bp, Artificial sequence
  synthetic
ggcgcgccagtccttccctgtaccccaacaatcgctgtgtgccgctttagtgcgctcgccgtcggctctacctgcggctggctataatggctcgcctgatccttctgtctctcccaaccccggacacccggcttcgactggttatatcttcggtgttcttttcctctcttcttctttcgcggttcagccgactcggaccgatg

SEQ ID NO: 11837 - DNA, 203 bp, Artificial sequence
  synthetic
ggcgcgccagtcctctttggcgccccaacaatcgctgtgtgccgctttagtgcgctcgccgtcggctctacctgcgtgctttagctccttctcgcctgatccttctgtctctcccaacaagttttcagaaaattcgactggttatatcttcggtgttcttttcctctcttcttctttcgcggttcagccgactcggaccgatg

SEQ ID NO: 11838 - DNA, 203 bp, Artificial sequence
  synthetic
ggcgcgccagtccttatactgtccccaacaatcgctgtgtgccgctttagtgcgctcgccgtcggctctacctgcgtgctttagctccttctcgcctgatccttctgtctctcccaaccccggacacccggcaattcaactgctgctcttcggtgttcttttcctctcttcttctttcgcggttcagccgactcggaccgatg

SEQ ID NO: 11839 - DNA, 203 bp, Artificial sequence
  synthetic
ggcgcgccagtcctcggagaccccccaacaatcgctgtgtgccgctttagtgcgctcgccgtcggctctacctgcgtgctttagctccttctcgcctgatccttctgtctctcccaaccccggacacccggcttcgactggttatagtcatacatcaaagttcctctcttcttctttcgcggttcagccgactcggaccgatg

SEQ ID NO: 11840 - DNA, 203 bp, Artificial sequence
  synthetic
ggcgcgccagtcctaagagacaccccaacaatcgctgtgtgccgctttagtgcgctcgccgtcggctctacctgcgtgctttagctccttctcgcctgatccttctgtctctcccaaccccggacacccggcttcgactggttatatcttcggtgttcttttcctctcttcttcagcttgcagctgctcgactcggaccgatg

SEQ ID NO: 11841 - DNA, 203 bp, Artificial sequence
  synthetic
ggcgcgccagtcctgtacggccccccaacaatcgctgtgtgccgctttagtgcgctcgccgtcggctctacctgcgtgctttagctccttctcgcctgatccttctgtctctcccaaccccggacacccggcttcgactggttatatcttcggtgttcttttcctctcttcttctttcgcggttcagccgactcggaccgatg

SEQ ID NO: 11842 - DNA, 203 bp, Artificial sequence
  synthetic
ggcgcgccagtcctctgcacacccccaacaatcgctgtgtgccgctttagtgcgctcgccgtcggctctacctgcgtgctttagctccttgcgaatatgaaaccctgtctctcccaaccccggacacccggcttcgactggttatatcttcggtgttcttttcctctcttcttctttcgcggttcagccgactcggaccgatg

SEQ ID NO: 11843 - DNA, 203 bp, Artificial sequence
  synthetic
ggcgcgccagtccttcacgcatccccatgccttccctttcacgcttccgtcctgacgcaaacccattaaatttcgacgcactgcgggcttgtccttggccctgccctactcagtttcctgaagcatgcgcagttgcctttccgtcaattcctgtcctgggcgtacgtcaagatggcggcgtctgtattcgactcggaccgatg

SEQ ID NO: 11844 - DNA, 203 bp, Artificial sequence
  synthetic
ggcgcgccagtcctgtggaccaccccatgccttccctttcacgcttccgtcctgacgcaaacgtggggccgccttcattgaacaatcgacgtccttggccctgccctactcagtttcctgaagcatgcgcagttgcctttccgtcaattcctgtcctgggcgtacgtcaagatggcggcgtctgtattcgactcggaccgatg

SEQ ID NO: 11845 - DNA, 203 bp, Artificial sequence
  synthetic
ggcgcgccagtcctagtattaaccccatgccttccctttcacgcttccgtcctgacgcaaacgtggggccgccttccgcactgcgggcttgtccttggccctgccctactcagtttcctgaagcatgcgcagaccagccagtcaatattcctgtcctgggcgtacgtcaagatggcggcgtctgtattcgactcggaccgatg

SEQ ID NO: 11846 - DNA, 203 bp, Artificial sequence
  synthetic
ggcgcgccagtcctactgcgtgccccatgccttccctttcacgcttccgtcctgacgcaaacgtggggccgccttccgcactgcgggcttgtccttggccctgccctactcagtttcctgaagcatgcgcagttgcctttccgtcaattcctgtcctgggcgtacgtcaagatgaacatagtatagcacgactcggaccgatg

SEQ ID NO: 11847 - DNA, 203 bp, Artificial sequence
  synthetic
ggcgcgccagtccttaagattgccccatgccttccctttcacgcttccgtcctgacgcaaacgtggggccgccttccgcactgcgggcttgtccttggccctgcgtataatttcggtttgaagcatgcgcagttgcctttccgtcaattcctgtcctgggcgtacgtcaagatggcggcgtctgtattcgactcggaccgatg

SEQ ID NO: 11848 - DNA, 203 bp, Artificial sequence
  synthetic
ggcgcgccagtcctgcacctcaccccatgccttccctttcacgcttccgtcctgacgcaaacgtggggccgccttccgcactgcgggctttagtacaatatctgcctactcagtttcctgaagcatgcgcagttgcctttccgtcaattcctgtcctgggcgtacgtcaagatggcggcgtctgtattcgactcggaccgatg

SEQ ID NO: 11849 - DNA, 203 bp, Artificial sequence
  synthetic
ggcgcgccagtcctaggaacggccccatgccttcttcccggactcaatgtcctgacgcaaacgtggggccgccttccgcactgcgggcttgtccttggccctgccctactcagtttcctgaagcatgcgcagttgcctttccgtcaattcctgtcctgggcgtacgtcaagatggcggcgtctgtattcgactcggaccgatg

SEQ ID NO: 11850 - DNA, 203 bp, Artificial sequence
  synthetic
ggcgcgccagtcctgggagccacccccgccccccatgcgggaggttcctaataaaggcccctgaacgtgtatgttggtctcccgggagctgcttgctgaagatccgcgcccctgtcgccgtctggtaggagctgtttgcagggtcctaactcaatcggcttgttgtgatgcgtatccccgtagatgcccgactcggaccgatg

SEQ ID NO: 11851 - DNA, 203 bp, Artificial sequence
  synthetic
ggcgcgccagtcctgcggatctcccccggttgactaggagctggcggttttctacaacaaagggaagaccgacgcgatgaagcccagacctgcagggttcgtggataataaactcaagcagcgagtcatccagtaccttaccagtaacaaatgtggcaaatatgtggacattggagtcttagcgtctgcgactcggaccgatg

SEQ ID NO: 11852 - DNA, 203 bp, Artificial sequence
  synthetic
ggcgcgccagtcctattgtcttcccccggttgactaggagctgggggtccgagctgtggcttatgtccttcggttcatgaagcccagacctgcagggttcgtggataataaactcaagcagcgagtcatccagtaccttaccagtaacaaatgtggcaaatatgtggacattggagtcttagcgtctgcgactcggaccgatg

SEQ ID NO: 11853 - DNA, 203 bp, Artificial sequence
  synthetic
ggcgcgccagtcctcctgggtccccccggttgactaggagctgggggtccgagctgtggcttggaagaccgacgcgatgaagcccagacctgcagggttcgtggataataaactcaagcagcgagtcatccagtaccttaccagtacgcctccgctgtggtatgtggacattggagtcttagcgtctgcgactcggaccgatg

SEQ ID NO: 11854 - DNA, 203 bp, Artificial sequence
  synthetic
ggcgcgccagtccttttagggtcccccggttgactaggagctgggggtccgagctgtggcttggaagaccgacgcgcgtcccgaagttggtgcagggttcgtggataataaactcaagcagcgagtcatccagtaccttaccagtaacaaatgtggcaaatatgtggacattggagtcttagcgtctgcgactcggaccgatg

SEQ ID NO: 11855 - DNA, 203 bp, Artificial sequence
  synthetic
ggcgcgccagtcctattacatgccccggtcaccgcgaggatgtagcacccctgtgcttataacctgggatgggcacccctgccagtcctgctctgccgcctgccaccgctgcccgagcccgagtggttcactgcactgtgaaaacagattccagacgccgggaactcacgcctccaatcccagacgctcgactcggaccgatg

SEQ ID NO: 11856 - DNA, 203 bp, Artificial sequence
  synthetic
ggcgcgccagtcctccagctacccccggtcaccggccctgcccccgggattatctagacgcgcctgggatgggcacccctgccagtcctgctctgccgcctgccaccgctgcccgagcccgagtggttcactgcactgtgaaaacagattccagacgccgggaactcacgcctccaatcccagacgctcgactcggaccgatg

SEQ ID NO: 11857 - DNA, 203 bp, Artificial sequence
  synthetic
ggcgcgccagtcctctcccaaaccccggtcaccggccctgcccccgggccctgtgcttataaaagccctactaggaccctgccagtcctgctctgccgcctgccaccgctgcccgagcccgagtggttcactgcactgtgaaaacagattccagacgccgggaactcacgcctccaatcccagacgctcgactcggaccgatg

SEQ ID NO: 11858 - DNA, 203 bp, Artificial sequence
  synthetic
ggcgcgccagtcctgtgtttagccccggtcaccggccctgcccccgggccctgtgcttataacctgggatgggcacccctgccagtcctgaggccggaatctgtaccgctgcccgagcccgagtggttcactgcactgtgaaaacagattccagacgccgggaactcacgcctccaatcccagacgctcgactcggaccgatg

SEQ ID NO: 11859 - DNA, 203 bp, Artificial sequence
  synthetic
ggcgcgccagtcctgggtaaggccccggtcaccggccctgcccccgggccctgtgcttataacctgggatgggcacccctgccagtcctgctctgccgcctgccaccgctgcccgagcccgagtggttcactgcactgtgaaaacagattccagacgccgggaactcacgcctctccagggcttgtgacgactcggaccgatg

SEQ ID NO: 11860 - DNA, 203 bp, Artificial sequence
  synthetic
ggcgcgccagtcctatgggctgccccggtcaccggccctgcccccgggccctgtgcttataacctgggatgggcacccctgccagtcctgctctgccgcctgcctaattacggtattgccgagtggttcactgcactgtgaaaacagattccagacgccgggaactcacgcctccaatcccagacgctcgactcggaccgatg

SEQ ID NO: 11861 - DNA, 203 bp, Artificial sequence
  synthetic
ggcgcgccagtccttgcttgtgccccgtggccaaaagcccagtgtttacagcacctctcacatccaggacgaccccatcctggcgctcaccacctcggcgcctccttagtacgcattaggtggtaagccgagctctccctcggccttgttctgaatgcacacatgtctaggggctaaggatgtcctaccgactcggaccgatg

SEQ ID NO: 11862 - DNA, 203 bp, Artificial sequence
  synthetic
ggcgcgccagtcctccgtggtgccccgtggccaaaagcccagtgtttacagcacctctcacatccaggacgacccccgggccatcgcgcgtcttagtagtatggcttagtacgcattaggtggtaagccgagctctccctcggccttgttctgaatgcacacatgtctaggggctaaggatgtcctaccgactcggaccgatg

SEQ ID NO: 11863 - DNA, 203 bp, Artificial sequence
  synthetic
ggcgcgccagtcctcttcagatccccgtggccaatcatattcgtggatcagcacctctcacatccaggacgaccccatcctggcgctcactcttagtagtatggcttagtacgcattaggtggtaagccgagctctccctcggccttgttctgaatgcacacatgtctaggggctaaggatgtcctaccgactcggaccgatg

SEQ ID NO: 11864 - DNA, 203 bp, Artificial sequence
  synthetic
ggcgcgccagtcctcggcctccccccgttcttccaacatcctccgctggcgccgcccagccctgtcgccccccggaggtgatccctccctcctgcctgcccgccagcctgacctgtgcccggctcgcgggccgcagcctcggcccccgcgcgcccccggcagctctcggcgcgatgagcatagagacgcgactcggaccgatg

SEQ ID NO: 11865 - DNA, 203 bp, Artificial sequence
  synthetic
ggcgcgccagtcctgcgtaattccccgttcttccctgcggagtgcgctcatttataaccgagtgtcgccccccggaggtgatccctccctcctgcctgcccgccagcctgacctgtgcccggctcgcgggccgcagcctcggcccccgcgcgcccccggcagctctcggcgcgatgagcatagagacgcgactcggaccgatg

SEQ ID NO: 11866 - DNA, 203 bp, Artificial sequence
  synthetic
ggcgcgccagtcctccgggcccccccgttcttccctgcggagtgcgctgcgccgcccagccctgtcgccccccggaggtgatccctccctcctgcctgcccgccagcctgacctgtgcccggctcgcgggccgcagcctcggccccctactctaaattcgagctctcggcgcgatgagcatagagacgcgactcggaccgatg

SEQ ID NO: 11867 - DNA, 203 bp, Artificial sequence
  synthetic
ggcgcgccagtcctcgagatgcccccgttcttccctgcggagtgcgctgcgccgcccagccctgtcgccccccggaggtgatccctccctcctgcctgcccgccagcctgacctgtgctacctgataaccgagcagcctcggcccccgcgcgcccccggcagctctcggcgcgatgagcatagagacgcgactcggaccgatg

SEQ ID NO: 11868 - DNA, 203 bp, Artificial sequence
  synthetic
ggcgcgccagtcctcaggaaatcccctcccaaaccacctcccaaatgggagataatggggggccccggccttaccaatcagcggtggaaaggtccattgcaatccctccaggaagcggccggggcagccttgctctccatagacggctccccccggtggatcccgtggcgattcctgaaaaaagctgccgactcggaccgatg

SEQ ID NO: 11869 - DNA, 203 bp, Artificial sequence
  synthetic
ggcgcgccagtccttcatgtaccccctcccaaaccacctcccaaatggttctattataaactccccggccttaccaatcagcggtggaaaaagaagcccagtctcctccaggaagcggccggggcagccttgctctccatagacggctccccccggtggatcccgtggcgattcctgaaaaaagctgccgactcggaccgatg

SEQ ID NO: 11870 - DNA, 203 bp, Artificial sequence
  synthetic
ggcgcgccagtcctagacggttcccctcccaaaccacctcccaaatggttctattataaactccccggccttaccaatcagcggtggaaaggtccattgcaatccctccaggaagcggccggggcagccttgctctccatagacggctccccccggtggatcccgtggcgattcctgaaaaaagctgccgactcggaccgatg

SEQ ID NO: 11871 - DNA, 203 bp, Artificial sequence
  synthetic
ggcgcgccagtcctgtgtgctacccctcccaaaccacctcccaaatggttctattataaactccccggccttaccaatcagcggtggaaaggtccattgcaatccctccaggaagcggccggggcagccttgctctccatagacggtgagaaggaaaaattcccgtggcgattcctgaaaaaagctgccgactcggaccgatg

SEQ ID NO: 11872 - DNA, 203 bp, Artificial sequence
  synthetic
ggcgcgccagtcctatgtagaccccctctaggttgaaggatgcccagaaggtacccgcaggtaacaagagacactgtggatctgatctggggccacctacctctatcctggtgaggtggttaaaaaacgtctagtgggccaaacccaggggggatccctggtttccttattttagtgtaaatgtcattcgactcggaccgatg

SEQ ID NO: 11873 - DNA, 203 bp, Artificial sequence
  synthetic
ggcgcgccagtccttaattagacccgaaaacacacccaactccacacaaacacccacagcatccgagccctctacatcaaattccacccaaaatacccaatcacatgcttagttattcaaaaactacatcttagcagaaaaccgtgacctatcaagcaagtcacggtaacctaatggggcaaataacccgactcggaccgatg

SEQ ID NO: 11874 - DNA, 203 bp, Artificial sequence
  synthetic
ggcgcgccagtccttattaagtcccgaaaacacaggtgcgcgatagataacacccacagcatccgagccctctacatcaaattccacccaaaatacccaatcacatgcttagttattcaaaaactacatcttagcagaaaaccgtgacctatcaagcaagaacgaaattaaacctggggcaaataacccgactcggaccgatg

SEQ ID NO: 11875 - DNA, 203 bp, Artificial sequence
  synthetic
ggcgcgccagtcctcgataacgcccgatcgtaaactccatgtattggttacccatctgcatcgaaaactctccgaacactaggtgcagtaaggctttcatggagcccggcctatgaccgcgtacgtgtaccataggcagccccaaaaacacgtgtgaggagaaagtcccagtcactttgggcaaagtacgactcggaccgatg

SEQ ID NO: 11876 - DNA, 203 bp, Artificial sequence
  synthetic
ggcgcgccagtcctccaacggccccgatcgtaaactccatgtattggttacccatctgcatcgaaaactctccgaacactaggtgcagtaaggctttcatggagtggtttgctatttagcgtacgtgtaccataggcagccccaaatttgacgcacgattgaaagtcccagtcactttgggcaaagtacgactcggaccgatg

SEQ ID NO: 11877 - DNA, 203 bp, Artificial sequence
  synthetic
ggcgcgccagtccttcgagagacccgcaggacgcgcctcccagccagcccgactcctaggaggaggggaggcgggaaagcagctcaagccagtagattgcgttcgcccccagccccgccactcccaggctcctcgggactcggcgggtcctcctgggagtctcggaggggaccggctgtgcagacgcccgactcggaccgatg

SEQ ID NO: 11878 - DNA, 203 bp, Artificial sequence
  synthetic
ggcgcgccagtcctgctacggtcccgcaggacgcgcctcccagccagcccgactcctaggaggaggggaggcgggaaagcagctcaagcctcacccaccgccctaaatgtttttttctcactcccaggctcctcgggactcggcgggtcctcctgggagtctcggaggggaccggctgtgcagacgcccgactcggaccgatg

SEQ ID NO: 11879 - DNA, 203 bp, Artificial sequence
  synthetic
ggcgcgccagtcctcatttaaacccgcaggacgcgcctcccagccagcccgactcctaggaggaggggaggcgggaaagcagctcaagcctcacccaccgccctgcccccagccccgccactcccaggctcctcgggacaacaactaacctcctgggagtctcggaggggaccggctgtgcagacgcccgactcggaccgatg

SEQ ID NO: 11880 - DNA, 203 bp, Artificial sequence
  synthetic
ggcgcgccagtcctcagcgctacccgcaggacgcgcctcccagccagcccgactcctaggaggaggggaggcgggaaagcagctcaagcctcacccaccgccctgcccccagccccgccactcccaggctcctcgggactcggcgggtcctcctgggagtaattccatttcatagctgtgcagacgcccgactcggaccgatg

SEQ ID NO: 11881 - DNA, 203 bp, Artificial sequence
  synthetic
ggcgcgccagtcctgggaaatccccgcaggacgcgcctcccagccagcccgactcctaggaggaggggaggcgggaaagcagctcaagcctcacccaccgccctgcccccagccccgctttcttgctagctttcgggactcggcgggtcctcctgggagtctcggaggggaccggctgtgcagacgcccgactcggaccgatg

SEQ ID NO: 11882 - DNA, 203 bp, Artificial sequence
  synthetic
ggcgcgccagtccttctcagtccccgccgccatgacgctgcgcgcggccgtcttcgaccttgacggggtgctggcgacagtgatctaaggcggcgtcctcggccgcacggaggaggccctggcgctgcccaggacttctgaatgatgctttccagaaagggggaccagagggtgccactacccggcttcgactcggaccgatg

SEQ ID NO: 11883 - DNA, 203 bp, Artificial sequence
  synthetic
ggcgcgccagtcctcttcatcacccgccgccatgacgctgcgcgcggccgtcttcgaccttgacggggtgctggcgctgccagcggtgttcggcgtcctcggccgcacggaggaggccggtcttaccaaggcgacttctgaatgatgctttccagaaagggggaccagagggtgccactacccggcttcgactcggaccgatg

SEQ ID NO: 11884 - DNA, 203 bp, Artificial sequence
  synthetic
ggcgcgccagtcctaagctcgacccgccgccatgacgctgcgcgcggccgtcttcgaccttgcaaattaaaataatctgccagcggtgttcggcgtcctcggccgcacggaggaggccctggcgctgcccaggacttctgaatgatgctttccagaaagggggaccagagggtgccactacccggcttcgactcggaccgatg

SEQ ID NO: 11885 - DNA, 203 bp, Artificial sequence
  synthetic
ggcgcgccagtccttgcgagtacccgccgccatgacgctgcgcgcggctaatccatttgactacggggtgctggcgctgccagcggtgttcggcgtcctcggccgcacggaggaggccctggcgctgcccaggacttctgaatgatgctttccagaaagggggaccagagggtgccactacccggcttcgactcggaccgatg

SEQ ID NO: 11886 - DNA, 203 bp, Artificial sequence
  synthetic
ggcgcgccagtcctcgcgactgcccgcctgccggcctgcctgccacagccggactccgccaccagccctacgagatccgcctgtcattccctagcccagctcttgggaaactgcagaggggtccagaggatttgcagttctgaacctgcacactccagtctaggatctccgagcaagagcgtagcctccgactcggaccgatg

SEQ ID NO: 11887 - DNA, 203 bp, Artificial sequence
  synthetic
ggcgcgccagtcctcacgtcagcccgcctgccggcctgcctgccacagccggactccgccactccggtaggattccccgcctgtcattccctagcccagctcttgggaaactgcagagacaggggtgtccactgcagttctgaacctgcacactccagtctaggatctccgagcaagagcgtagcctccgactcggaccgatg

SEQ ID NO: 11888 - DNA, 203 bp, Artificial sequence
  synthetic
ggcgcgccagtcctggcccttacccgcctgccggcctgcctgccacagccggactccgccactccggtaggattccccgcctgtcattccctagcccagctcttgggaaactgcagaggggtccagaggattccggtccagcctggtgcacactccagtctaggatctccgagcaagagcgtagcctccgactcggaccgatg

SEQ ID NO: 11889 - DNA, 203 bp, Artificial sequence
  synthetic
ggcgcgccagtcctcggtcgagcccgcctgccggcctgcctgccacagccggactccgccactccggtaggattccccgcctgtcattccctagcccagctcttgggaaactgcagaggggtccagaggatttgcagttctgaacctgcacactccagtcatattcgctttgtgaagagcgtagcctccgactcggaccgatg

SEQ ID NO: 11890 - DNA, 203 bp, Artificial sequence
  synthetic
ggcgcgccagtcctattccttccccgcctgccggcctgcctgccacagccggactccgccactccggtaggattccgacgagcagccgttctagcccagctcttgggaaactgcagaggggtccagaggatttgcagttctgaacctgcacactccagtctaggatctccgagcaagagcgtagcctccgactcggaccgatg

SEQ ID NO: 11891 - DNA, 203 bp, Artificial sequence
  synthetic
ggcgcgccagtcctgttgcctccccgcctgccggcctgcctgccacagtattctcattgatgtccggtaggattccccgcctgtcattccctagcccagctcttgggaaactgcagaggggtccagaggatttgcagttctgaacctgcacactccagtctaggatctccgagcaagagcgtagcctccgactcggaccgatg

SEQ ID NO: 11892 - DNA, 203 bp, Artificial sequence
  synthetic
ggcgcgccagtcctgttctaggcccggaaatctgacaaagcctcttggccgtgttctgaacttgaagcctggaggagttctctgctcagcacagccaaggaacagaattagaagaaaaggaaccctggcctgaggcaggtgacaaacattaccaccccagctgtgcacgatgcagcagatgcaaccagcgactcggaccgatg

SEQ ID NO: 11893 - DNA, 203 bp, Artificial sequence
  synthetic
ggcgcgccagtcctacatctgccccggctcggggtccgggctggggaggggaacctgggcgcctgggacccgccgatgccccctgccccgcccggaggtgaaagcgggtgtgaggagcgcggcgcggcaggtcatattgaacattccagatacctatcatcctgacgacacacagataacagcaagatcgactcggaccgatg

SEQ ID NO: 11894 - DNA, 203 bp, Artificial sequence
  synthetic
ggcgcgccagtcctggatcaagcccggctcggggtccgggctggggaggggaacctgggcgcctgggacccgccgatgccccctgccccgcccggaggtgaaagcgggtgtgaggagcgcggcgcggcaggtcatattgaacattccagatacctatcattactcgatgctgttacgcctttttgacacgactcggaccgatg

SEQ ID NO: 11895 - DNA, 203 bp, Artificial sequence
  synthetic
ggcgcgccagtcctaagaatgccccggctcggggtccgggctggggaggggaacctgggcgcctgggacccgccgatgccccctgccccgtggacccagatgtacgggtgtgaggagcgcggcgcggcaggtcatattgaacattccagatacctatcattactcgatgctgttgataacagcaagatcgactcggaccgatg

SEQ ID NO: 11896 - DNA, 203 bp, Artificial sequence
  synthetic
ggcgcgccagtcctgtgttcgtcccggctcggggtccgggctggggaggggaacctgggcgcggttcgtataggcttgccccctgccccgcccggaggtgaaagcgggtgtgaggagcgcggcgcggcaggtcatattgaacattccagatacctatcattactcgatgctgttgataacagcaagatcgactcggaccgatg

SEQ ID NO: 11897 - DNA, 203 bp, Artificial sequence
  synthetic
ggcgcgccagtcctgctgttaacccggggccaacatacgccgtggagcgcagcaagggctagggcttcctgaacctctccgggagaggtcctagcaaccctcgcggcccgccctaggagcattgtcttcccggggaagacaaacaattgggggctcgtccgggatttgaattcctccattctcacattcgactcggaccgatg

SEQ ID NO: 11898 - DNA, 203 bp, Artificial sequence
  synthetic
ggcgcgccagtccttgggacagcccggggccaacatacgccgtggagcgcagcaagggctagggcttcctgaacctctccgggagaggtctattgctataggcaggcccgccctaggacagcacaaggggttgggaagacaaacaattgggggctcgtccgggatttgaattcctccattctcacattcgactcggaccgatg

SEQ ID NO: 11899 - DNA, 203 bp, Artificial sequence
  synthetic
ggcgcgccagtccttcatagtgcccggggccaacatacgccgtggagcgcagcaagggctagggcttcctgaacctctccgggagaggtctattgctataggcaggcccgccctaggagcattgtcttcccggggaagacaaacaacgctaactagcaatgggatttgaattcctccattctcacattcgactcggaccgatg

SEQ ID NO: 11900 - DNA, 203 bp, Artificial sequence
  synthetic
ggcgcgccagtcctcgtacgatcccggggccaacatacgccgtggagcgcagcaagggctagggcttcctgaacctctccgggagaggtctattgctataggcaggcccgccctaggagcattgtcttcccggggaagacaaacaattgggggctcgtccgggatttgaattcctccattctcacattcgactcggaccgatg

SEQ ID NO: 11901 - DNA, 203 bp, Artificial sequence
  synthetic
ggcgcgccagtcctgcgggtggcccggggccaacatacgccgtggagcgcagcaagggctagggcttcctgaacctctccgggagaggtctattgctataggcaggcccgccctaggagcattgtcttcccgttcggctaggcaggttgggggctcgtccgggatttgaattcctccattctcacattcgactcggaccgatg

SEQ ID NO: 11902 - DNA, 203 bp, Artificial sequence
  synthetic
ggcgcgccagtcctgaactgctccctaaccaacccagctggacactccctccctgcaccatgtcttacagttgtggcctgcccagcctgagctgccgcaccagctgctcctcccggccctgtgtgccccccagctgccacggctgcaccctgcccggggcctgcaacatccccgccaatgtgagcaaccgactcggaccgatg

SEQ ID NO: 11903 - DNA, 203 bp, Artificial sequence
  synthetic
ggcgcgccagtcctcaccaaggccctaactaggtacttgatcattatattaagaaaaacttaggatccaagaccataaatctaggatcctttacaatctcagaccctggtgcaaggttatatatagagcccaattctcctaattaaacagtgtctcaggttgacaaatggacaagttggatctagtcacgactcggaccgatg

SEQ ID NO: 11904 - DNA, 203 bp, Artificial sequence
  synthetic
ggcgcgccagtccttcctttgcccctaccccatccccttattcagcacatgaaataaacaaggggcatccaaatcttgcggcaacgcccccgggacatgcatcgcatagatcggatgatcaaaccccttatccctctggacagaatgcaggtccaaccacgctggtataccctcaaacccctcagacacgactcggaccgatg

SEQ ID NO: 11905 - DNA, 203 bp, Artificial sequence
  synthetic
ggcgcgccagtcctaattacggccctaccccatccccttattcagcacatgaaataaacaaggggcatccaaatcttgcggcaacgcccccgggacatgcatcgtcccctggactctcatgcggaagccgaacctctggacagaatgcaggtccaaccacgctggtataccctcaaacccctcagacacgactcggaccgatg

SEQ ID NO: 11906 - DNA, 203 bp, Artificial sequence
  synthetic
ggcgcgccagtcctggttccctccctaccccatccccttattcagcacatgaaataaacaaggggcatccaaatcttgcggcaacgcccccgggacatgcatcgtcccctggactctctcaaaccccttatccctctggacagaatgcaggtccaaccaccgcaactctagtcgaaacccctcagacacgactcggaccgatg

SEQ ID NO: 11907 - DNA, 203 bp, Artificial sequence
  synthetic
ggcgcgccagtccttgctatctccctaccccatccccttattcagcacatgaaataaacaaggggcatccaaatcttgcggcaacgcccccgggacatgcatcgtcccctggactctctcaaaccccttatccctctggacagaatgcaggtccaaccacgctggtataccctcgtttgtaatgctgtcgactcggaccgatg

SEQ ID NO: 11908 - DNA, 203 bp, Artificial sequence
  synthetic
ggcgcgccagtccttgctgctaccctaccccatccccttattcagcacatgaaataaacaaggggcatccaaatcttgcggcaacgcccccgggacatgcatcgtcccctggactctctcaaaccccttatccctctggacagaatgcaggtccaaccactgctccgacatggtaaacccctcagacacgactcggaccgatg

SEQ ID NO: 11909 - DNA, 203 bp, Artificial sequence
  synthetic
ggcgcgccagtcctattagcggccctaccccatccccttattcagcacatgaaataaacaagttaggcaacgcgagtgcggcaacgcccccgggacatgcatcgtcccctggactctctcaaaccccttatccctctggacagaatgcaggtccaaccacgctggtataccctcaaacccctcagacacgactcggaccgatg

SEQ ID NO: 11910 - DNA, 203 bp, Artificial sequence
  synthetic
ggcgcgccagtcctaagggcgtccctaccccatccccttattcagcaccgcgtgatccatcagggcatccaaatcttgcggcaacgcccccgggacatgcatcgtcccctggactctctcaaaccccttatccctctggacagaatgcaggtccaaccacgctggtataccctcaaacccctcagacacgactcggaccgatg

SEQ ID NO: 11911 - DNA, 203 bp, Artificial sequence
  synthetic
ggcgcgccagtcctttcagcctccctaccccatcgttcacgcacagttatgaaataaacaaggggcatccaaatcttgcggcaacgcccccgggacatgcatcgtcccctggactctctcaaaccccttatccctctggacagaatgcaggtccaaccacgctggtataccctcaaacccctcagacacgactcggaccgatg

SEQ ID NO: 11912 - DNA, 203 bp, Artificial sequence
  synthetic
ggcgcgccagtcctctccatagccctagagccatgcactaacaaatgcgtacccttcacggccagtttccattgccagctgtgtttctcgaaaaaggggctcggaatatcatatgagcgaaagggcagacgaagaaggactccaaggaaaactaagactccttcgccttctgcaccagacaagtgagtcgactcggaccgatg

SEQ ID NO: 11913 - DNA, 203 bp, Artificial sequence
  synthetic
ggcgcgccagtcctttgctaacccctagagccatgcactaacaaatgctattgtaagcgatgcagtttccattgccagctgtgtttctcgaaaaaggggctcggaatatcatatgagcatctcttagatgatagaaggactccaaggaaaactaagactccttcgccttctgcaccagacaagtgagtcgactcggaccgatg

SEQ ID NO: 11914 - DNA, 203 bp, Artificial sequence
  synthetic
ggcgcgccagtcctggctatacccctagagccatgcactaacaaatgctattgtaagcgatgcagtttccattgccagctgtgtttctcgaaaaaggggctcggctagcaggggtttggaaagggcagacgaagaaggactccaaggaaaactaagactccttcgccttctgcaccagacaagtgagtcgactcggaccgatg

SEQ ID NO: 11915 - DNA, 203 bp, Artificial sequence
  synthetic
ggcgcgccagtcctggtcggaaccctagagccatgcactaacaaatgctattgtaagcgatgtgccacgggcgaaaagctgtgtttctcgaaaaaggggctcggaatatcatatgagcgaaagggcagacgaagaaggactccaaggaaaactaagactccttcgccttctgcaccagacaagtgagtcgactcggaccgatg

SEQ ID NO: 11916 - DNA, 203 bp, Artificial sequence
  synthetic
ggcgcgccagtcctgcaccagtccctatcccgtgaccctgttcctccgcttcttcgttgggcgcatctcctggaactgggccgcgtccccgccgcctttccgtcatttcttcagatagctccccagctgtggaaaatgagcatcctcaagagaccccagagaatccatcggatttgtatacttccttccgactcggaccgatg

SEQ ID NO: 11917 - DNA, 203 bp, Artificial sequence
  synthetic
ggcgcgccagtcctgtttctggccctatcccgtgaccctgttcctccgcttcttcgttgggcgcatctcctggaactgggccgcgtccccgccgcctttccgtccagcggcgttcctcctccccagctgtggaaaatgagcatcctcaagagaccccagaatccaacaatagcgtgtatacttccttccgactcggaccgatg

SEQ ID NO: 11918 - DNA, 203 bp, Artificial sequence
  synthetic
ggcgcgccagtccttttctgcaccctatcccgtgaccctgttcctccgcttcttcgttgggcgcatctcctggaactgggccgcgtcccctagagtccatttatatttcttcagatagctccccagctgtggaaaatgagcatcctcaagagaccccagaatccaacaatagcgtgtatacttccttccgactcggaccgatg

SEQ ID NO: 11919 - DNA, 203 bp, Artificial sequence
  synthetic
ggcgcgccagtcctttctggaaccctatcccgtgctatgtgcgtgtaccttcttcgttgggcgcatctcctggaactgggccgcgtccccgccgcctttccgtcatttcttcagatagctccccagctgtggaaaatgagcatcctcaagagaccccagaatccaacaatagcgtgtatacttccttccgactcggaccgatg

SEQ ID NO: 11920 - DNA, 203 bp, Artificial sequence
  synthetic
ggcgcgccagtcctctgaggctccctgggccaggacgcctccctcattaagcgggaggacacgaccccagggcattgtgggaacactggccaggctggactttgccttcctcctcgtcctttagccgggagcctgtctttgcttgcctttgcctttgaggctctgtggctgtggggctgagtggcatccgactcggaccgatg

SEQ ID NO: 11921 - DNA, 203 bp, Artificial sequence
  synthetic
ggcgcgccagtcctattagaaaccctgggccaggcttggcagagagggaagcgggaggacacgaccccagggcattgtgggaacactggccaggctggactttgccttcctcctcgtcaaggcatttacttgctgtctttgcttgcctttgcctttgaggctctgtggctgtggggctgagtggcatccgactcggaccgatg

SEQ ID NO: 11922 - DNA, 203 bp, Artificial sequence
  synthetic
ggcgcgccagtcctagaattgcccctgggccaggcttggcagagagggaagcgggaggacacgaccccagggcattgtgggaacactggccaggctggactttgccttcctcctcgtcctttagccgggagcctgtctttgcttgcctttgcctttgaggctctgtggctgtggactgcccatttgaacgactcggaccgatg

SEQ ID NO: 11923 - DNA, 203 bp, Artificial sequence
  synthetic
ggcgcgccagtcctccctcaagccctgggccaggcttggcagagagggaagcgggaggacacgaccccagggcattgtgggaacactggccaggctggactttgccttcctcctcgtcctttagccgggagcctgtctttgcttgcctttgcctttgaggctctgtggctgtggggctgagtggcatccgactcggaccgatg

SEQ ID NO: 11924 - DNA, 203 bp, Artificial sequence
  synthetic
ggcgcgccagtccttacttcttccctgggccaggcttggcagagagggaagcgggaggacacgaccccagggcattgtgggaacactggccaggctggactttgccttcctcctcgtcctttagccgggagcctgtctttgcttgcctttgcctttgagggcagagacggcccaggctgagtggcatccgactcggaccgatg

SEQ ID NO: 11925 - DNA, 203 bp, Artificial sequence
  synthetic
ggcgcgccagtcctgtccctatccctgggccaggcttggcagagagggaagcgggaggacacgaccccagggcattgtgggaacactggccaggctggactttgccttcctcctcgtcctttagccgggagctctcgggattggagctttgcctttgaggctctgtggctgtggggctgagtggcatccgactcggaccgatg

SEQ ID NO: 11926 - DNA, 203 bp, Artificial sequence
  synthetic
ggcgcgccagtccttctgcattccctgggccaggcttggcagagagggaagcgggaggacacgaccccagggcattgtgggaacactggcgtcagccactagcaccttcctcctcgtcctttagccgggagcctgtctttgcttgcctttgcctttgaggctctgtggctgtggggctgagtggcatccgactcggaccgatg

SEQ ID NO: 11927 - DNA, 203 bp, Artificial sequence
  synthetic
ggcgcgccagtcctaatccgagccctgggtccatcacagtataaaatctgcaagtagtgctattgttggaatcaccgtacctatttaggtttacgctccaagatcggtggatagcagccctatcaatatctaggagaactgtgctatgtttagaagattaggtagtctctaaacagaacaatttacctcgactcggaccgatg

SEQ ID NO: 11928 - DNA, 203 bp, Artificial sequence
  synthetic
ggcgcgccagtcctgtacgtaacccttgcgcaattagggaacaaatccctctcagcgaaggccgaaaagaggctagccatgcccttagtaggactagcataatgaggggggtagcaacagtggtgagttcgttggatggcttaagccctgagtacagggtagtcgtcagtggttcgacgccttggaatcgactcggaccgatg

SEQ ID NO: 11929 - DNA, 203 bp, Artificial sequence
  synthetic
ggcgcgccagtcctcaaccaccccgacaatcccacagtcgtgctcatctttgtggtgagtatgttgctattatgttgttgttctactggttgctgtggcttctttagttgttttgcatcttctattagaggttgttgtgaatcaactaaacttccttattacgacgttgaaaagatccacatacagtacgactcggaccgatg

SEQ ID NO: 11930 - DNA, 203 bp, Artificial sequence
  synthetic
ggcgcgccagtcctgggactatccgagcagccggtcctccagtggctcatagatgttcagcatgtgggctcaaaatgacagaggctcacaggacacctgcatgcccaaggcactccaccgtatgtgatcaacctggatccagcagtacatgaagttccctttcctgccaatattggtgatgaaatttacgactcggaccgatg

SEQ ID NO: 11931 - DNA, 203 bp, Artificial sequence
  synthetic
ggcgcgccagtccttcgtatgtccgagcagccggtcctccagtggctccgctccccgttctctgtgggctcaaaatgacagaggctcacaggacacctgcatgcccaaggcactccaccgtatgtgatcaacctggatccagcagtacatgaagttccctgggtcaatctcggaggtgatgaaatttacgactcggaccgatg

SEQ ID NO: 11932 - DNA, 203 bp, Artificial sequence
  synthetic
ggcgcgccagtccttgtcaagcccgagcagccggtcctccagtggctccgctccccgttctctgtgggctcaaaatgacagaggctcacaggacacctgcatgcccaaggcactccaccgtatgtgatcaacctggatccagcagtacatgaagttccctttcctgccaatattggtgatgaaatttacgactcggaccgatg

SEQ ID NO: 11933 - DNA, 203 bp, Artificial sequence
  synthetic
ggcgcgccagtcctagaaagacccgagcagccggtcctccagtggctccgctccccgttctctgtgggctcaaaatgacagaggctcacaggacacctgcatgcccaaggcactccaccgtatgtgatcaacctggatccagcagtctggttgccgggacttcctgccaatattggtgatgaaatttacgactcggaccgatg

SEQ ID NO: 11934 - DNA, 203 bp, Artificial sequence
  synthetic
ggcgcgccagtcctgacccaacccgattatccatcgccatttcccctggtagacctggcagatgaggctagaaataccccactggcgacagtgttctagcctgcgtggctgcctgcacaccctatgggtgtgaagccaaacaatggacaaggtgtgaagagccccgtgtgctcgctttgagtcctccgcgactcggaccgatg

SEQ ID NO: 11935 - DNA, 203 bp, Artificial sequence
  synthetic
ggcgcgccagtcctatgacaacccgcccaagcgttttactttgcaaaagtttctgataggcggagcatctagtttcaacttccttttgcagcaagttctttcctgcactaatcacaattcttggaagaggagaactggacgttgtgaacagagttagctggtaaatgtcctcttaaaagatccaaaaacgactcggaccgatg

SEQ ID NO: 11936 - DNA, 203 bp, Artificial sequence
  synthetic
ggcgcgccagtcctacgatatgccgcccgagtggatgagcgagcgagcatagccacttttcagccgcggcccggtcaccaaccaggaccgggatcacgtggctcccagggctgggtgaagaagccgccgggaccgagcgcgccggagaggaggggcgcctggggacagaaggcgacgtcccctgaaatcgactcggaccgatg

SEQ ID NO: 11937 - DNA, 203 bp, Artificial sequence
  synthetic
ggcgcgccagtcctaataggccccgcccgagtggatgagcgagcgagcgacttgtgaaacacgccgcggcccggtcaccaaccaggaccgaagagtaactctcgccagggctgggtgaagaagccgccgggaccgagcgcgccggagaggaggggcgcctggggacagaaggcgacgtcccctgaaatcgactcggaccgatg

SEQ ID NO: 11938 - DNA, 203 bp, Artificial sequence
  synthetic
ggcgcgccagtccttcatcatcccgcccgagtggatgagcgagcgagcgacttgtgaaacacgccgcggcccggtcaccaaccaggaccgggatcacgtggctcccagggctgggtgaagaagccgccgggaccgagcgcgccggagaggaggggcgcctctaccgtattcttaacgtcccctgaaatcgactcggaccgatg

SEQ ID NO: 11939 - DNA, 203 bp, Artificial sequence
  synthetic
ggcgcgccagtcctccttagagccgcccgagtggatgagcgagcgagcgacttgtgaaacacgccgcggcccggtcaccaaccaggaccgggatcacgtggctcccagggctgggtgaagaagccgccgggaccgagcgcgccggagaggaggggcgcctggggacagaaggcgacgtcccctgaaatcgactcggaccgatg

SEQ ID NO: 11940 - DNA, 203 bp, Artificial sequence
  synthetic
ggcgcgccagtcctcgctcgccccgcccgagtggatgagcgagcgagcgacttgtgaaacacgccgcggcccggtcaccaaccaggaccgggatcacgtggctcccagggctgggtgaagaagccgccgggaccgagcgcgccggatgcacatccatggaggggacagaaggcgacgtcccctgaaatcgactcggaccgatg

SEQ ID NO: 11941 - DNA, 203 bp, Artificial sequence
  synthetic
ggcgcgccagtcctcactttccccgcccgagtggatgagcgagcgagcgacttgtgaaacacgccgcggcccggtcaccaaccaggaccgggatcacgtggctcccagggctgggtgacagttggaatgctcccgagcgcgccggagaggaggggcgcctggggacagaaggcgacgtcccctgaaatcgactcggaccgatg

SEQ ID NO: 11942 - DNA, 203 bp, Artificial sequence
  synthetic
ggcgcgccagtcctgagtgacgccgcccgagtggatgagcgagcgagcgacttgtgaaacacgccgcggcccggtcaccaaccaggaccgggatcacgtggctcgtccattccacatgagaagccgccgggaccgagcgcgccggagaggaggggcgcctggggacagaaggcgacgtcccctgaaatcgactcggaccgatg

SEQ ID NO: 11943 - DNA, 203 bp, Artificial sequence
  synthetic
ggcgcgccagtccttggccctaccgcccgagtggatgagcgagcgagcgacttgtgaaacacgccgcggcccggtcgattgaagtttttcggatcacgtggctcccagggctgggtgaagaagccgccgggaccgagcgcgccggagaggaggggcgcctggggacagaaggcgacgtcccctgaaatcgactcggaccgatg

SEQ ID NO: 11944 - DNA, 203 bp, Artificial sequence
  synthetic
ggcgcgccagtcctcgttacccccgccggggcagcctcgtctagcgcgcgccgcgcagacgcccccggagtcgccagctaccgcagccctcgccgcccagtgcccttcggcctcggggttaaaaaggattcaggtctccgcgaagcgggaaagcgcggcggccgccgggattcgggcgccgcggcagccgactcggaccgatg

SEQ ID NO: 11945 - DNA, 203 bp, Artificial sequence
  synthetic
ggcgcgccagtcctggagatcgccgccttctccggtcccctcctcggagtcattttttcctgttccccctctgccgccctttcctcacgcaaatttaagcaactttctcttggaagcgaaggtgtcggctatgagccggagcctccttccttgaatttctccgtggaggacccgccgcgccccccggccgactcggaccgatg

SEQ ID NO: 11946 - DNA, 203 bp, Artificial sequence
  synthetic
ggcgcgccagtcctcgaaaggaccgccttctccggtcccctcctcggagtcattttttcctgttccccctctgccgccctttcctcacgccccgggtgaggcaaaggctcccctcataaaggtgtcggctatgagccggagcctccttccttgaatttctccgtggaggacccgccgcgccccccggccgactcggaccgatg

SEQ ID NO: 11947 - DNA, 203 bp, Artificial sequence
  synthetic
ggcgcgccagtcctagaggtccccgccttctccggtcccctcctcggagtcattttttcctgttccccctctgccgccctttcctcacgccccgggtgaggcaattctcttggaagcgaaggtgtcggctatgagccggagcctccttccttgaatttctccgtggaggacccgataatatgagttatcgactcggaccgatg

SEQ ID NO: 11948 - DNA, 203 bp, Artificial sequence
  synthetic
ggcgcgccagtccttcggcccaccgccttctccggtcccctcctcggataagaacgcgaagattccccctctgccgccctttcctcacgccccgggtgaggcaattctcttggaagcgaaggtgtcggctatgagccggagcctccttccttgaatttctccgtggaggacccgccgcgccccccggccgactcggaccgatg

SEQ ID NO: 11949 - DNA, 203 bp, Artificial sequence
  synthetic
ggcgcgccagtcctccgtccgcccgccttgtccgattggcccgcacgcagtggcgccggtcacgtggggggcgacgtttcgcgccaatttcggttggccggccacagtccaccgcgcggagattctcagcttccccaggagcaagacctctgagcccgccaagcgcggccgcactatgtcgtaagcaccgactcggaccgatg

SEQ ID NO: 11950 - DNA, 203 bp, Artificial sequence
  synthetic
ggcgcgccagtccttggtggttccgcgcgcgcgccccaggccccggcccgggcctcggttccagaagggagaggagcccgccaaggcgcgcaagagagcgggctgcctcgcagtccgagccggagagggagcagcctatttttttcccccggacgggcctccgaaaccatgaactttctgctctcttgcgactcggaccgatg

SEQ ID NO: 11951 - DNA, 203 bp, Artificial sequence
  synthetic
ggcgcgccagtcctgctagtatccgcgcgcgcgccccaggccccggcccgggcctcggttccagaagggagaggagcccgccaaggcgcgcaagagagcgggctgcctcgcagtccgagccggagagggagcgcgagccgcgccggccccggacgggccttgcccttgtccctttttctgctctcttgcgactcggaccgatg

SEQ ID NO: 11952 - DNA, 203 bp, Artificial sequence
  synthetic
ggcgcgccagtcctataccggcccgcgcgcgcgccccaggccccggcccgggcctcggttccagaagggagaggagcccgccaaggcgcgcaagagagcgggctgcctcgcagtccgagccggagagggagcgcgagccgcgccgggtgttagacctggaccgaaaccatgaactttctgctctcttgcgactcggaccgatg

SEQ ID NO: 11953 - DNA, 203 bp, Artificial sequence
  synthetic
ggcgcgccagtcctgattgtagccgcgcgcgcgccccaggccccggcccgggcctcggttcctccctcttagttcacccgccaaggcgcgcaagagagcgggctgcctcgcagtccgagccggagagggagcgcgagccgcgccggccccggacgggcctccgaaaccatgaactttctgctctcttgcgactcggaccgatg

SEQ ID NO: 11954 - DNA, 203 bp, Artificial sequence
  synthetic
ggcgcgccagtcctgagacgaaccgcgcgcgcgccccaggccccggccgtccaagtaaagttagaagggagaggagcccgccaaggcgcgcaagagagcgggctgcctcgcagtccgagccggagagggagcgcgagccgcgccggccccggacgggcctccgaaaccatgaactttctgctctcttgcgactcggaccgatg

SEQ ID NO: 11955 - DNA, 203 bp, Artificial sequence
  synthetic
ggcgcgccagtcctcccttgcaccgcggccgcctcccgccagctcgccaatacatgtttttggcgcgtgagctcaggcgtccccgccccagcttttctcggaaccatgaaccccaactgcgcccggtgcggcaagatcgtgtatcccacggagaaggtgaactgtctggataagttctggcataaagccgactcggaccgatg

SEQ ID NO: 11956 - DNA, 203 bp, Artificial sequence
  synthetic
ggcgcgccagtcctttcttactccgcggccgcctcccgccagctcgcctcggggaacaggacgcgcgtgagctcaggcgtccccgccccagcttttctcggaaccatgaaccccaactgcgcccggtgcggcaagatcgtgtatcccacggagaaggtgaactgtctggataagttctggcataaagccgactcggaccgatg

SEQ ID NO: 11957 - DNA, 203 bp, Artificial sequence
  synthetic
ggcgcgccagtcctaccatcaaccgcggccgcctcccgccagctcgcctcggggaacaggacgcgcgtgagctcaggcgtccccgccccagcttttctcggaacggactctgagccaagcgcccggtgcggcaagatcgtgtatcccacggagaaggtgaactgtctggataagttctggcataaagccgactcggaccgatg

SEQ ID NO: 11958 - DNA, 203 bp, Artificial sequence
  synthetic
ggcgcgccagtcctcctaaaggccgcggtcggcggcagcgctctcctaagctctcgcggctgcgcttcggtcccggtatgaattgtttgccggggtagtgggtgctcctcggccccggacattgcaagccccagaaggcaagactaactcggtgttgctcctcccggcgctgacttcgaggcccggctcgactcggaccgatg

SEQ ID NO: 11959 - DNA, 203 bp, Artificial sequence
  synthetic
ggcgcgccagtcctagcccagaccgcggtcggcggcagcgctctcctaagctctcgcggctgtaaagtatagagtcacccgggccacccacggggtagtgggtgctcctcggccccggacattgcaagccccagaaggcaagactaactcggtgttgctcctcccggcgctgacttcgaggcccggctcgactcggaccgatg

SEQ ID NO: 11960 - DNA, 203 bp, Artificial sequence
  synthetic
ggcgcgccagtcctctgtgaagccgcggtcggcgtagttttcgctgctagctctcgcggctgcgcttcggtcccggacccgggccacccacggggtagtgggtgctcctcggccccggacattgcaagccccagaaggcaagactaactcggtgttgctcctcccggcgctgacttcgaggcccggctcgactcggaccgatg

SEQ ID NO: 11961 - DNA, 203 bp, Artificial sequence
  synthetic
ggcgcgccagtcctaacttgtcccgctgaagacctcggcctgttgttgtgaatcgccagacctttgtaacacccggaagtctgaagcatgtgtttgatgatctcagaggctcagtatccttgtcctgggttggagatagcactggggtcattctagtcttgactaccttccatggttttactaggtaacgactcggaccgatg

SEQ ID NO: 11962 - DNA, 203 bp, Artificial sequence
  synthetic
ggcgcgccagtcctcttccactccgctgaagacctcggcctgttgttgtgaatcgccagacctttgtaacacccggaagtctgaagcatgtgtttgatgatctcagaggctcagtatccttgtcctgggttggagatagcactggggtcattctagtcttgactaccttccatgtaccactggtaattcgactcggaccgatg

SEQ ID NO: 11963 - DNA, 203 bp, Artificial sequence
  synthetic
ggcgcgccagtcctgtcctacaccgctgaagacctcggcctgttgttgtgaatcgccagacctttgtaacacccggaagtctgaagcatgtgtttgatgatctcgtgtcgattcaccgcttgtcctgggttggagatagcactggggtcattctagtcttgactaccttccatgtaccactggtaattcgactcggaccgatg

SEQ ID NO: 11964 - DNA, 203 bp, Artificial sequence
  synthetic
ggcgcgccagtcctaagtgctcccgctgcaggtgtgcggcccagtccgagacagcagatgaggagactgtccttcctgtttcgcagatgaggaaactgaggcttagagaagtttggcaaattggctaagttcaggggcggtgactagggattagtgatatgcttttctaaagagtagaaaagtcgaagcgactcggaccgatg

SEQ ID NO: 11965 - DNA, 203 bp, Artificial sequence
  synthetic
ggcgcgccagtcctacatggagccgctgcaggtgtgcggcccagtccgagacagcagatgaggagactgtccttcctgtttcgcagatgaggaaactgaggcttagagaagtttggcaaattggctaagttcctacagctaattgtactgccccatgcccgcttttctaaagagtagaaaagtcgaagcgactcggaccgatg

SEQ ID NO: 11966 - DNA, 203 bp, Artificial sequence
  synthetic
ggcgcgccagtccttcacatccccgctgcaggtgtgcggcccagtccgagacagcagatgaggagactgtccttcctgtttcgcagatgaggaaactgaggcttagagaagtttggcaccccttactcaacactacagctaattgtgggattagtgatatgcttttctaaagagtagaaaagtcgaagcgactcggaccgatg

SEQ ID NO: 11967 - DNA, 203 bp, Artificial sequence
  synthetic
ggcgcgccagtcctgacagaagccgcttccagctctgttcttggcaagaagattctaatgcccaggaacatggcgctgctctgggggctcctggtgctcagctggtcctgcctgcaaggcccctgctccgtgttctcccctgtgagcgccatggagcccttgggccggcagctaactagcgggccgaacgactcggaccgatg

SEQ ID NO: 11968 - DNA, 203 bp, Artificial sequence
  synthetic
ggcgcgccagtcctcgatgcgcccggcacccagatcgcgcgagacagcggaaggagcaagagtgggaggcgcgcgcggaggccgcgacggacgcaagatggcgattaactggcgtaaactcgtcaatggccagcaaggaggggggtccgagccggcggcggcggcggcagtggtggcagcgggagacacgactcggaccgatg

SEQ ID NO: 11969 - DNA, 203 bp, Artificial sequence
  synthetic
ggcgcgccagtcctggctcctgccggcagtagagagcggactccagccggcggaccctgcagccctcgcctgggacagcggcgcgctgggcaggcgcccaagagagcatcgagcagcggaacccgcgaagccggcccgcagccgcgacccgcgcagcctgccgctctcccgccgatacctttcaactacgactcggaccgatg

SEQ ID NO: 11970 - DNA, 203 bp, Artificial sequence
  synthetic
ggcgcgccagtcctatccgcgtccggcccccaagtcccgcgcgggccgcgagaatagatcaagtcgggccagctgagctatcccgtcagaccgcgccagtttgaatgaaagctctacaagatggcggcggtcggggccgaggcgcgaggagcttggtgtgtgccttgcctagtttcacttgatactctcgactcggaccgatg

SEQ ID NO: 11971 - DNA, 203 bp, Artificial sequence
  synthetic
ggcgcgccagtcctccgaacttccggcccccaagtcccgcgcgggccggccaggggcggggcgtcgggccagctgagctatcccgtcagaccgcgccagtttgaatgaaagctctacaagatggcggcggtcggggccgaggcgcgaggagcttggtgtgcttgcctaggttggtcacttgatactctcgactcggaccgatg

SEQ ID NO: 11972 - DNA, 203 bp, Artificial sequence
  synthetic
ggcgcgccagtcctaatgagaaccggcccccaagtcccgcgcgggccggccaggggcggggcgtcgggccagctgagctatcccgtcagaccgcgccagtttgaatgaaagctctacaagatggcggcggtcggggccgaggcgcggcactgactaacgctgccttgcctagtttcacttgatactctcgactcggaccgatg

SEQ ID NO: 11973 - DNA, 203 bp, Artificial sequence
  synthetic
ggcgcgccagtcctgttcaattccggcccccaagtcccgcgcgggccggccaggggcggggcgtcgggccagctgagctatcccgtcagaccgcgccagtttgaatgaaagctctacaagatggcggcggtcttaattcttttcataggagcttggtgtgtgccttgcctagtttcacttgatactctcgactcggaccgatg

SEQ ID NO: 11974 - DNA, 203 bp, Artificial sequence
  synthetic
ggcgcgccagtcctgatgaatcccggcccccaagtcccgcgcgggccggccaggggcggggcgtcgggccagctgagctatcccgtcagatgctttggcaaacgatgaaagctctacaagatggcggcggtcggggccgaggcgcgaggagcttggtgtgtgccttgcctagtttcacttgatactctcgactcggaccgatg

SEQ ID NO: 11975 - DNA, 203 bp, Artificial sequence
  synthetic
ggcgcgccagtcctcatcccacccggccccgcagccccagcgccttccctgcgccctggtggggacagcagccaggaggacccggccctgccaagcgcctccgaccccgatcatgtttgggccccgaaccccgcgtggcgcccagcctggaagacccggcgggtaccccggccgtgggcgcgctcacccgactcggaccgatg

SEQ ID NO: 11976 - DNA, 203 bp, Artificial sequence
  synthetic
ggcgcgccagtcctgtattcacccggccccgcagccccagcgccttccctgcgccctggtggggacagcagccaggaggacccggccctgccaagcgcctccgattggaggagcccgcgggccccgaaccccgcgtggcgcccagcaacacctggatcttgggtaccccggccgtgggcgcgctcacccgactcggaccgatg

SEQ ID NO: 11977 - DNA, 203 bp, Artificial sequence
  synthetic
ggcgcgccagtcctagttaagaccggccccgcagccccagcgccttccctgcgccctggtggggacagcagccaggaggacccggccctgccaagcgcctccgattggaggagcccgcgggccccgaaccccgcgtggcgcccagcctggaagacgtatgcatgacagttcagtagggcgcgctcacccgactcggaccgatg

SEQ ID NO: 11978 - DNA, 203 bp, Artificial sequence
  synthetic
ggcgcgccagtcctcctctggaccgggaggcaggacagagcggggaaagtgcgcatgcgctgactgagaagaaatatggcttcacagaagcagatggaggtagtgaccaaaggaactgggttccggcgccgccccaagaccatcactggtcttgcggggacctgcgagctgctcagaggaggagatgccgactcggaccgatg

SEQ ID NO: 11979 - DNA, 203 bp, Artificial sequence
  synthetic
ggcgcgccagtccttcggcgtcccgggaggcaggacagagcggggaaagtgcgcatgcgctgactgagtcctcccatggcttcacagaagcagatggaggtagtatttccgttgttatggttccggcgccgccccaagaccatcacttacaccccggggacctgcgagctgctcagaggaggagatgccgactcggaccgatg

SEQ ID NO: 11980 - DNA, 203 bp, Artificial sequence
  synthetic
ggcgcgccagtcctgcttgaggccgggcgagcagagctgcgctgcgggcgtcctgggaagggagatccggagcgaatagggggcttcgcctctggcccagccctcccgctgatcccccagccaggggtccgcaacccttgccgcatccacgaaactttgcccatagcagcgggcgggcactttgcactcgactcggaccgatg

SEQ ID NO: 11981 - DNA, 203 bp, Artificial sequence
  synthetic
ggcgcgccagtcctgttcgcgaccgggcgagcagagctgcgctgcgggcgtcctgggaagggagatccggagcgaatagggggcttcgcctctggcccagccctcccgctgatccccccaggtcttacgtttaacccttgccgcatccacgaaactttgcccatagcagcgggcgggcactttgcactcgactcggaccgatg

SEQ ID NO: 11982 - DNA, 203 bp, Artificial sequence
  synthetic
ggcgcgccagtccttgctcaaaccgggcgagcaggctataaggcgatacgtcctgggaagggagatccggagcgaatagggggcttcgcctctggcccagccctcccgctgatcccccagccaggggtccgcaacccttgccgcatccacgaaactttgcccatagcagcgggcgggcactttgcactcgactcggaccgatg

SEQ ID NO: 11983 - DNA, 203 bp, Artificial sequence
  synthetic
ggcgcgccagtccttcaactggccggggcttagggaaggccgagccagaggcacggcgcctcgtcaaaggggctgcctggaggaggcagcctgtcagctggtgcatcagaggctgtggccaggccagctgggctcggggagcgccagcctgagaggagcgcgtgagcgtcgcgggagcctcgggcacccgactcggaccgatg

SEQ ID NO: 11984 - DNA, 203 bp, Artificial sequence
  synthetic
ggcgcgccagtcctaggccaagccggggcttagggaaggccgagccagcctgggtcaaagaagtcaaaggggctgcctggaggaggcagcctgtcagctggtgcatcagaggctgtggccaggccagctgggctcggggagcgccagcctgagaggagcgtcacccaaggaaccgagcctcgggcacccgactcggaccgatg

SEQ ID NO: 11985 - DNA, 203 bp, Artificial sequence
  synthetic
ggcgcgccagtcctgcgttctgccggggcttagggaaggccgagccagcctgggtcaaagaatgtgtctcaagatactggaggaggcagcctgtcagctggtgcatcagaggctgtggccaggccagctgggctcggggagcgccagcctgagaggagcgcgtgagcgtcgcgggagcctcgggcacccgactcggaccgatg

SEQ ID NO: 11986 - DNA, 203 bp, Artificial sequence
  synthetic
ggcgcgccagtcctctgtcagtccgggtcatgggagaaaccctgcgacaaaacctcctccttttccaagcggctgccgaagatggcggaggtgcaggtcctggtgcttgatggtcgaggccatctcctgggccgcctggcggccatcgtggctaaacagtgaagtacctggctttcctccgcaagcggcgactcggaccgatg

SEQ ID NO: 11987 - DNA, 203 bp, Artificial sequence
  synthetic
ggcgcgccagtcctgtcgatccccggtcccttttcgacaaggacagttccaaatcggaagcttgcttaacacagttctaacagtttgtttgaatagagagcagatctctggaaaaatgaaccaacgaaaaaaggtggttagaccacctttcaatatgctgaaacgcgagagaaaccgcgtatcaaccccgactcggaccgatg

SEQ ID NO: 11988 - DNA, 203 bp, Artificial sequence
  synthetic
ggcgcgccagtcctgtctacttccggttcggtcagctgcgcgcttcgcttctgcggctcagcctccagcccaggtggcgctgtggaccctgcagccgcggagcgaggcagcggggcggctccgtgaccacggcgggcggagcctaggactgagggcgatggctgctgtggccgtggctgttcgcgaggcgactcggaccgatg

SEQ ID NO: 11989 - DNA, 203 bp, Artificial sequence
  synthetic
ggcgcgccagtcctacactctaccgtaccttggctccgaggacgtggtgaaggagctgaagaaggctctgtgcaataagggggccgtcaatgataggctgcgctaccggaatgtcatccagcgagtgattagatctggctctcctggccatcaatacgctgtgcaaagactgctcagaccccaatccacgactcggaccgatg

SEQ ID NO: 11990 - DNA, 203 bp, Artificial sequence
  synthetic
ggcgcgccagtcctgagtacctccgtaccttggctccgaggacgtggtgaaggagctgaagaaggctctgtgcaatcctcacattcaagctgataggctgcgctaccggaatgtcatcatctagtgcccggtatctggctctcctggccatcaatacgctgtgcaaagactgctcagaccccaatccacgactcggaccgatg

SEQ ID NO: 11991 - DNA, 203 bp, Artificial sequence
  synthetic
ggcgcgccagtccttccaaggcccgtaccttggctccgaggacgtggtgaaggagctgaagaaggctctgtgcaatcctcacattcaagctgataggctgcgctaccggaatgtcatccagcgagtgattagatctggctctcctggccatcaatacgctgtgcaaagactgctggccaatgcgcagccgactcggaccgatg

SEQ ID NO: 11992 - DNA, 203 bp, Artificial sequence
  synthetic
ggcgcgccagtcctgttatccaccgtaccttggctccgaggacgtggtgaaggagctgaagaaggctctgtgcaatcctcacattcaagctgataggctgcgctaccggaatgtcatccagcgagtgattagatctggctctcctggccatcaatacgcttcttttgccgctagcagaccccaatccacgactcggaccgatg

SEQ ID NO: 11993 - DNA, 203 bp, Artificial sequence
  synthetic
ggcgcgccagtcctttcgctttccgtaccttggctccgaggacgtggtgaaggagctgaagaaggctctgtgcaatcctcacattcaagctgataggctgcgctaccggaatgtcatccagcgagtgattagccggtctgtcgaacgccatcaatacgctgtgcaaagactgctcagaccccaatccacgactcggaccgatg

SEQ ID NO: 11994 - DNA, 203 bp, Artificial sequence
  synthetic
ggcgcgccagtcctgctgggcgccgtcacgtactcgaggctagctggcccgatttctcctccgggtgatgcttttcctagattattctctgatttggtcgtattgggcgcctggtcaccagggctgcttttaactctggtaaagtggatattgttgccatcaatgaccccttcattgacctcaactaccgactcggaccgatg

SEQ ID NO: 11995 - DNA, 203 bp, Artificial sequence
  synthetic
ggcgcgccagtccttagcctttccgtcctttcaggtgtgtcgtaacgggcaactctgcagcggaaccgactactttgggtgtccgtgtttcattttattcctatactggctgcttatggtgacaattgagagattgttaccatatagctattggattggccatccggtgaccaatagagctattatatcgactcggaccgatg

SEQ ID NO: 11996 - DNA, 203 bp, Artificial sequence
  synthetic
ggcgcgccagtcctcacatacgccgtggatccacgtgctttttcttgtccaatgggagccggctcccgggcgcgaaggggcggggaggaaaggaacgactgtgcgtgacgaaatattcgggcgggacctgcaacgtccgacagaacgaggggacgtaacggaggcaggttggagccgctgccgtcgcccgactcggaccgatg

SEQ ID NO: 11997 - DNA, 203 bp, Artificial sequence
  synthetic
ggcgcgccagtcctctgatattccgtggatccacgtgctttttcttgtccaatgggagccggctcccgggcgcgaaggggcggggaggaaaggaacgactgtgctacgttgccagaaggggcgggacctgcaacgtccgacagaactcactagaagtttagaggcaggttggagccgctgccgtcgcccgactcggaccgatg

SEQ ID NO: 11998 - DNA, 203 bp, Artificial sequence
  synthetic
ggcgcgccagtcctttacaatgccgtggatccacgtgctttttcttgtccaatgggagccgggcggaattgagactggggcggggaggaaaggaacgactgtgctacgttgccagaaggggcgggacctgcaacgtccgacagaacgaggggacgtaacggaggcaggttggagccgctgccgtcgcccgactcggaccgatg

SEQ ID NO: 11999 - DNA, 203 bp, Artificial sequence
  synthetic
ggcgcgccagtcctacaactctccgtggtaaaggtggaaaaggtttgggtaagggaggagctaagcgtcatcgcaaggttttgcgcgataacatccagggcatcactaagccagctatccggcgccttgctcgtcgcggcggtgtcaagcgaatttctggccttatctatgagggataggccttctcacgactcggaccgatg

SEQ ID NO: 12000 - DNA, 203 bp, Artificial sequence
  synthetic
ggcgcgccagtcctatgcggcgccgtggtaaaggtggaaaaggtttgggtaagggaggagctaagcgtcatcgcaaggttttgcgcgataacatccagggcatcactaagccagctatgttttattacatcggtcgcggcggtgtcaagcgaatttctggccttatctatgaggagactcgtggtgttcgactcggaccgatg

SEQ ID NO: 12001 - DNA, 203 bp, Artificial sequence
  synthetic
ggcgcgccagtccttagtgaatccgtggtaaaggtggaaaaggtttgggtaagggaggagctgttatcgggactctggttttgcgcgataacatccagggcatcactaagccagctatccggcgccttgctcgtcgcggcggtgtcaagcgaatttctggccttatctatgaggagactcgtggtgttcgactcggaccgatg

SEQ ID NO: 12002 - DNA, 203 bp, Artificial sequence
  synthetic
ggcgcgccagtcctgctattggcctaaatgaggtagatgctacgtggacgagggcatgccaagacacaccttaaccctagcgggggtcgctagggtgaaatcacaccacgtgatgggagtacgacctgatagggcgctgcagaggcccactattaggctagtataaaaatctctgctgtacatggcaccgactcggaccgatg

SEQ ID NO: 12003 - DNA, 203 bp, Artificial sequence
  synthetic
ggcgcgccagtcctctgccgggcctactttcagaactcacatcctttattcaggcctcggtgggagagcagggggaggggagcaccatcttgcaacacatcagcacccttgagagcatatatcagagggaccccctgaagctggtggccactttcagacaaatacttcaaggagagaaaaaagctgttcgactcggaccgatg

SEQ ID NO: 12004 - DNA, 203 bp, Artificial sequence
  synthetic
ggcgcgccagtcctctaaatgtcctactttcagacactgtccagcaccagggcaaaggccgtggagagcagggggaggggagcaccatcttgcaacacatcagcacccttgagagcatatatcagagggaccccctgaagctggtggccactttcagacaaatacttcaaggagagaaaaaagctgttcgactcggaccgatg

SEQ ID NO: 12005 - DNA, 203 bp, Artificial sequence
  synthetic
ggcgcgccagtcctctgctcctcctactttcagacactgtccagcaccttcaggcctcggtgcccataacattaagggggagcaccatcttgcaacacatcagcacccttgagagcatatatcagagggaccccctgaagctggtggccactttcagacaaatacttcaaggagagaaaaaagctgttcgactcggaccgatg

SEQ ID NO: 12006 - DNA, 203 bp, Artificial sequence
  synthetic
ggcgcgccagtccttatccatgcctactttcagacactgtccagcaccttcaggcctcggtgggagagcagggggaggggagcaccatcttgcaacacatcagcacccttgagagcatatatcagagggaccccctgaagctggtgagacaggatcacgcaatacttcaaggagagaaaaaagctgttcgactcggaccgatg

SEQ ID NO: 12007 - DNA, 203 bp, Artificial sequence
  synthetic
ggcgcgccagtcctcttatacccctactttcagacactgtccagcaccttcaggcctcggtgggagagcagggggaggggagcaccatcttgcaacacatcagcacccttgagagcatatatcagagggaccccctgaagctggtggccactttcagacaaatacttcaaggagagaaaaaagctgttcgactcggaccgatg

SEQ ID NO: 12008 - DNA, 203 bp, Artificial sequence
  synthetic
ggcgcgccagtcctaagccggtcctactttcagacactgtccagcaccttcaggcctcggtgggagagcagggggaggggagcaccatcttgcaacacatcagcacccttgagagcatatatcagagggaccccctgaagctggtggccactttcagacaaatacttcaaggagttgggtttatgccgcgactcggaccgatg

SEQ ID NO: 12009 - DNA, 203 bp, Artificial sequence
  synthetic
ggcgcgccagtcctccgcaggtcctagcacgcggctatgggtgtgaagccaaacaatggacaaggtgtgaagagccccgtgtgctcgctttgagtcctccggcccctgaatgtggctaaccttaaccctgcagctagagcacgtaacccaatgtgtatctagtcgtaatgagcaattgcgggatgggacgactcggaccgatg

SEQ ID NO: 12010 - DNA, 203 bp, Artificial sequence
  synthetic
ggcgcgccagtcctggaacgcccctatttatgctgacagctataggctaacgcccataaagagcagctggggtattccttaggggctgagtctcctggtatccctaagactgggcttggcttaggcactgagattccttctggaaccccaacgccttcgagacggattccgacctgccggctggatggcgactcggaccgatg

SEQ ID NO: 12011 - DNA, 203 bp, Artificial sequence
  synthetic
ggcgcgccagtcctatatctaacctatttatgctgacagctataggctctgcagggccccagctgcgccatcgtaaccttaggggctgagtctcctggtatccctaagactgggcttggcttaggcactgagattccttctggaaccccaacgccttcgagacggattccgacctgccggctggatggcgactcggaccgatg

SEQ ID NO: 12012 - DNA, 203 bp, Artificial sequence
  synthetic
ggcgcgccagtccttacaggcacctatttatgctgacagctataggctctgcagggccccaggcagctggggtattccttaggggctgagcgcgtgacccggagtaagactgggcttggcttaggcactgagattccttctggaaccccaacgccttcgagacggattccgacctgccggctggatggcgactcggaccgatg

SEQ ID NO: 12013 - DNA, 203 bp, Artificial sequence
  synthetic
ggcgcgccagtcctatttatgtcctatttatgctgacagctataggctctgcagggccccaggcagctggggtattccttaggggctgagtctcctggtatccccgtactgatcgcctgcttaggcactgagattccttctggaaccccaacgccttcgagacggattccgacctgccggctggatggcgactcggaccgatg

SEQ ID NO: 12014 - DNA, 203 bp, Artificial sequence
  synthetic
ggcgcgccagtccttggttcaacctatttatgctgacagctataggctctgcagggccccaggcagctggggtattccttaggggctgagtctcctggtatccctaagactgggcttgctaactaagacccaattccttctggaaccccaacgccttcgagacggattccgacctgccggctggatggcgactcggaccgatg

SEQ ID NO: 12015 - DNA, 203 bp, Artificial sequence
  synthetic
ggcgcgccagtcctcacgcctccctatttatgctgacagctataggctctgcagggccccaggcagctggggtattccttaggggctgagtctcctggtatccctaagactgggcttggcttaggcactgagattccttctggaaccccaacgccttcgacttaaccgggagtgtgccggctggatggcgactcggaccgatg

SEQ ID NO: 12016 - DNA, 203 bp, Artificial sequence
  synthetic
ggcgcgccagtccttagatttccctatttatgctgacagctataggctctgcagggccccaggcagctggggtattccttaggggctgagtctcctggtatccctaagactgggcttggcttaggcactgagattccttctggaaccccaacgccttcgagacggattccgaccctattctcattgaacgactcggaccgatg

SEQ ID NO: 12017 - DNA, 203 bp, Artificial sequence
  synthetic
ggcgcgccagtcctgggtccgacctcagcggcttccgtcctgcagcaagtccggaagaaggtccgggggctggagtcctgggacctagctcgggaccggcctggagatggagttcgactgcgagggcctgagacggctgcttggcaagtacaagttcagggacctaactgtggagtcctactaatgatcgactcggaccgatg

SEQ ID NO: 12018 - DNA, 203 bp, Artificial sequence
  synthetic
ggcgcgccagtcctggcgggcacctcagcggcttccgtcctgcagcaagtccggaagaaggtccgggggctggagtcctgggacctagctcgggaccggcctggagatggagttcgactgcgagggcctgagcatttgaaggatggagtacaagttcagggacctaactgtggaagaactaaggaatgcgactcggaccgatg

SEQ ID NO: 12019 - DNA, 203 bp, Artificial sequence
  synthetic
ggcgcgccagtcctgcttaacacctcagcggctttatgaagtgcagctgtccggaagaaggtccgggggctggagtcctgggacctagctcgggaccggcctggagatggagttcgactgcgagggcctgagacggctgcttggcaagtacaagttcagggacctaactgtggaagaactaaggaatgcgactcggaccgatg

SEQ ID NO: 12020 - DNA, 203 bp, Artificial sequence
  synthetic
ggcgcgccagtcctggttgacccctctgagctattccagaagtagtgaggaggcttttttggaggcctaggcttttgcaaaaagctttgcaaagatggataaagcccctggtcagttcgaatctttgcagctaatggaccttctaggtcttgaaaggagtgcctgggggaatattcctctgatgagaacgactcggaccgatg

SEQ ID NO: 12021 - DNA, 203 bp, Artificial sequence
  synthetic
ggcgcgccagtccttctagttgcctctgagctattccagaagtagtgaggaggcttttttggaggcctaggcttttgcaaaaagctttgcaaagatggataaagttttaaacagagaggaatctttgcagctaatggaccttctagactggtccccttacgcctgggggaatattcctctgatgagaacgactcggaccgatg

SEQ ID NO: 12022 - DNA, 203 bp, Artificial sequence
  synthetic
ggcgcgccagtcctccacaccacctctgtagggaagccaagaatgtccaggaggtaccccttcctctcggaagggatctgacctggagacacatcacacgtgctaattctagagatgggtgtttaaaaattgttacagcttccccgaaccaagtggtcttggttttcactttttatcacactgtcaatcgactcggaccgatg

SEQ ID NO: 12023 - DNA, 203 bp, Artificial sequence
  synthetic
ggcgcgccagtcctgatggtgacctctgtagggaagccaagaatgtccaggaggtaccccttcctctcggaagggatctgacctggagacacatcacacgtgctttacacctgtgctttgtaggtgtttcgcttacagcttccccgaaccaagtggtcttggttttcactttttatcacactgtcaatcgactcggaccgatg

SEQ ID NO: 12024 - DNA, 203 bp, Artificial sequence
  synthetic
ggcgcgccagtcctgatcttatcctctgtagggaagccaagaatgtccaggaggtaccccttgtatatcatgaacctctgacctggagacacatcacacgtgctttacacctgtgcttgtgtttaaaaattgttacagcttccccgaaccaagtggtcttggttttcactttttatcacactgtcaatcgactcggaccgatg

SEQ ID NO: 12025 - DNA, 203 bp, Artificial sequence
  synthetic
ggcgcgccagtcctgactaatacctctgtagggactttgtactgactgaggaggtaccccttcctctcggaagggatctgacctggagacacatcacacgtgctttacacctgtgcttgtgtttaaaaattgttacagcttccccgaaccaagtggtcttggttttcactttttatcacactgtcaatcgactcggaccgatg

SEQ ID NO: 12026 - DNA, 203 bp, Artificial sequence
  synthetic
ggcgcgccagtcctcgcgctaacctgaagcggccgggccaggccctgcctcgatcctcagctcgtcctccccgccccgcaccggccttcactctggagcggccccggcagccgcagcaggggcggcggcggcggatcgaggagctccgtgtagaaggggcggagaggctgctgcagtcccgggacaggcgactcggaccgatg

SEQ ID NO: 12027 - DNA, 203 bp, Artificial sequence
  synthetic
ggcgcgccagtccttagtttctcctgaagcggccgggccaggccctgcctcgatcctcagctcgtcctccccgccccgcaccggccttcactctggagcggccccggcagccgcagcaggggcggcggcggcggatcgaggagctctccaggtcgtcccgggagaggctgctgctccagaactctgctcgactcggaccgatg

SEQ ID NO: 12028 - DNA, 203 bp, Artificial sequence
  synthetic
ggcgcgccagtcctggccaaatcctgaagcggccgggccaggccctgcctcgatcctcagctcgtcctccccgccccgcaccggccttcactctggagcggccccggcagccgcagcatacaaacattgcatggatcgaggagctctccaggtcgtcccgggagaggctgctgcagtcccgggacaggcgactcggaccgatg

SEQ ID NO: 12029 - DNA, 203 bp, Artificial sequence
  synthetic
ggcgcgccagtcctttctgttgcctgaagcggccgggccaggccctgcctcgatcctcagcttagatcttgtagatcgcaccggccttcactctggagcggccccggcagccgcagcaggggcggcggcggcggatcgaggagctctccaggtcgtcccgggagaggctgctgcagtcccgggacaggcgactcggaccgatg

SEQ ID NO: 12030 - DNA, 203 bp, Artificial sequence
  synthetic
ggcgcgccagtccttgaagagtcctgaatgcggctaaccttaaccctagagccttatgccacgatccagtggttgtaaggtcgtaatgagcaattccgggacgggaccgactactttgggtgtccgtgtttccgcacaacaacgtgattgtcttatggtcacagcatatatatacatatactgtgatccgactcggaccgatg

SEQ ID NO: 12031 - DNA, 203 bp, Artificial sequence
  synthetic
ggcgcgccagtcctcttgacagcctgaatgcggctaaccttaaccctagagccttatgccacgatccagtggttgtaaggtcgtaatgagcaattccgggacgggaccgactactttgggtgtccgtgtttctcatttttcttcatattgtcttatggtcacagcatatatatacatatactgtgatccgactcggaccgatg

SEQ ID NO: 12032 - DNA, 203 bp, Artificial sequence
  synthetic
ggcgcgccagtcctgtcaaatgcctgaatgcggctaaccttaaccctagagccttatgccacgatccagtggttgtaaggtcgtaatgagcaattccgggacgggaccgactactttgggtgtccgtgtttctcatttttcttcatattgtcttatggtctgcctcgcatgtctcatatactgtgatccgactcggaccgatg

SEQ ID NO: 12033 - DNA, 203 bp, Artificial sequence
  synthetic
ggcgcgccagtccttacgccctcctgaatgcggctaaccttaaccctagagccttatgccacgatccagtggttgtaaggtcgtaatgagcaattccgggacgggaccgactactttgggtgtccgtgtttctcatttttcttcatgacagtaatcctagacagcatatatatacatatactgtgatccgactcggaccgatg

SEQ ID NO: 12034 - DNA, 203 bp, Artificial sequence
  synthetic
ggcgcgccagtcctgacctgaacctgaatgcggctaaccttaaccctagagccttatgccacgatccagtggttgtaaggtcgtaatgaggtggatacacctatgaccgactactttgggtgtccgtgtttctcatttttcttcatattgtcttatggtcacagcatatatatacatatactgtgatccgactcggaccgatg

SEQ ID NO: 12035 - DNA, 203 bp, Artificial sequence
  synthetic
ggcgcgccagtcctagcacttgcctgaatgcggctaaccttaaccctatgaagagcaatgcagatccagtggttgtaaggtcgtaatgagcaattccgggacgggaccgactactttgggtgtccgtgtttctcatttttcttcatattgtcttatggtcacagcatatatatacatatactgtgatccgactcggaccgatg

SEQ ID NO: 12036 - DNA, 203 bp, Artificial sequence
  synthetic
ggcgcgccagtcctgcgcaacgcctgatgtcttcatcattctcaaattcttaggacggtcggattagtttgcctcagctctcggaattggccgcggaaaccgatctgcccgttgtgtttgtgaaacagagaaagataggcggccatggtccaaccttgaaggaggcagcccaatatggcaagaaggtgcgactcggaccgatg

SEQ ID NO: 12037 - DNA, 203 bp, Artificial sequence
  synthetic
ggcgcgccagtcctccgtctatcctgatgtcttcatcattctcaaattcttaggacggtcgggccctggaaggaacgctctcggaattggccgcggaaaccgatgacagatggagagatgtgaaacagagaaagataggcggccatggtccaaccttgaaggaggcagcccaatatggcaagaaggtgcgactcggaccgatg

SEQ ID NO: 12038 - DNA, 203 bp, Artificial sequence
  synthetic
ggcgcgccagtccttacggagtcctgatgtcttcatcattctcaaattcttaggacggtcgggccctggaaggaacgctctcggaattggggagacgcgatatgctgcccgttgtgtttgtgaaacagagaaagataggcggccatggtccaaccttgaaggaggcagcccaatatggcaagaaggtgcgactcggaccgatg

SEQ ID NO: 12039 - DNA, 203 bp, Artificial sequence
  synthetic
ggcgcgccagtcctgtgcagagcctgatgtcttcatcattctcaaatttgctcagtttgaatgccctggaaggaacgctctcggaattggccgcggaaaccgatctgcccgttgtgtttgtgaaacagagaaagataggcggccatggtccaaccttgaaggaggcagcccaatatggcaagaaggtgcgactcggaccgatg

SEQ ID NO: 12040 - DNA, 203 bp, Artificial sequence
  synthetic
ggcgcgccagtcctgtttgtctcctgatgtcttcgaagagggacgcaacttaggacggtcgggccctggaaggaacgctctcggaattggccgcggaaaccgatctgcccgttgtgtttgtgaaacagagaaagataggcggccatggtccaaccttgaaggaggcagcccaatatggcaagaaggtgcgactcggaccgatg

SEQ ID NO: 12041 - DNA, 203 bp, Artificial sequence
  synthetic
ggcgcgccagtcctctaaggtacctgccctccggcccctctgcagctagatttgtacgacgatctcggcaaacatactccacaaaagggggcttcagctccaactctgccagcggagggagtgggtcccaggcccgcaccagcttcagctcagtgacggtgtctcggagcagtggcagtggtggcgggcgactcggaccgatg

SEQ ID NO: 12042 - DNA, 203 bp, Artificial sequence
  synthetic
ggcgcgccagtcctaacactaccctgccctccggcccctctgcagctatgaggtcctccgtcgagatcggcgtgcgctccacaaaagggggcttcagctccaactctgccagcggagggagtgggtcccaggcccgcaccagcttcagctcagtgacggtgtctcggagcagtggcagtggtggcgggcgactcggaccgatg

SEQ ID NO: 12043 - DNA, 203 bp, Artificial sequence
  synthetic
ggcgcgccagtccttcgtgcggcctgccctccggcccctctgcagctatgaggtcctccgtctctcggcaaacatactccacaaaagggggcttcagctccaactctgccagcggagggagtgggtcccaggcccgcaccagcttcagctcagtgacggtgtctcggagcagtggcagtggtggcgggcgactcggaccgatg

SEQ ID NO: 12044 - DNA, 203 bp, Artificial sequence
  synthetic
ggcgcgccagtccttattgtgccctgccctccggcccctctgcagctatgaggtcctccgtctctcggcaaacatactccacaaaaggggttgggctagtggtttctgccagcggagggagtgggtcccaggcccgcaccagcttcagctcagtgacggtgtctcggagcagtggcagtggtggcgggcgactcggaccgatg

SEQ ID NO: 12045 - DNA, 203 bp, Artificial sequence
  synthetic
ggcgcgccagtcctcgcaaagccctgccctccggcccctctgcagctatgaggtcctccgtctctcggcaaacatagctatgtgttatccgcttcagctccaactctgccagcggagggagtgggtcccaggcccgcaccagcttcagctcagtgacggtgtctcggagcagtggcagtggtggcgggcgactcggaccgatg

SEQ ID NO: 12046 - DNA, 203 bp, Artificial sequence
  synthetic
ggcgcgccagtccttccttcagcctgccctccggcccctctgcagctatgaggtcctccgttgggactaccgcaccacttccaaaagggggcttcagctccaactctgccagcggagggagtgggtcccaggcccgcaccagcttcagctcagtgacggtgtctcggagcagtggcagtggtggcgggcgactcggaccgatg

SEQ ID NO: 12047 - DNA, 203 bp, Artificial sequence
  synthetic
ggcgcgccagtcctcctcaaaccctgccctccggggtggactgtttggtgaggtcctccgtctctcggcaaacatactccacaaaagggggcttcagctccaactctgccagcggagggagtgggtcccaggcccgcaccagcttcagctcagtgacggtgtctcggagcagtggcagtggtggcgggcgactcggaccgatg

SEQ ID NO: 12048 - DNA, 203 bp, Artificial sequence
  synthetic
ggcgcgccagtcctatcacgctcctggacatcaagattgccaagggaggagccgacaaacagataggttggagcatgctgcggaaggagatgatggcgatttggcccaatctgtcccagaagacgctagacctgctggtcacacctcacaagtccacggacctcaccgtggggaagatctacgcagcccgactcggaccgatg

SEQ ID NO: 12049 - DNA, 203 bp, Artificial sequence
  synthetic
ggcgcgccagtccttccaatttcctggacatcaagattgccaagggaggagccgacaaacagcagatggacgctgactgcttaggctcattgatggcgatttggcccaatctgtcccagaagacgctagacctgctggtcacacctcacaagtccacggacctcaccgtggggaagatctacgcagcccgactcggaccgatg

SEQ ID NO: 12050 - DNA, 203 bp, Artificial sequence
  synthetic
ggcgcgccagtcctcattgactcctggacatcaagattgccaagggaggagccgacaaacagcagatggacgctgagctgcggaaggagatgatggcgatttggcccaatctgtcccaatctgttaaccgtatgctggtcacacctcacaagtccacggacctcaccgtggggaagatctacgcagcccgactcggaccgatg

SEQ ID NO: 12051 - DNA, 203 bp, Artificial sequence
  synthetic
ggcgcgccagtcctagcgacctcctggacatcaagattgccaagggaggagccgacaaacagcagatggacgctgagctgcggaaggagatgatggcgatttggcccaatctgtcccagaagacgctagacctgctggtcacacctttggctatattatccctcaccgtggggaagatctacgcagcccgactcggaccgatg

SEQ ID NO: 12052 - DNA, 203 bp, Artificial sequence
  synthetic
ggcgcgccagtcctagttagcgcctggagatttgggcgtgcccccgcaagactgctagccgagtagtgttgggtcgcgaaaggccttgtggtactgcctgatagggtgcttgcgagtgagggtccttactcggtagaccgtgcaccatgagcacgaatcctaaacctcaaagaaaaaccaaacgtaaccgactcggaccgatg

SEQ ID NO: 12053 - DNA, 203 bp, Artificial sequence
  synthetic
ggcgcgccagtccttcgccaatcctggagatttgggcgtgcccccgcaagactgctagccgagtagtgttgggtcgcgaaaggccttgtggtactgcctgatagggtgcttgcgagtgccccgggaggtctcgtagaccgtgcaccatgagcacgaatcctaaacctcaaagaaaaaccaaacgtaaccgactcggaccgatg

SEQ ID NO: 12054 - DNA, 203 bp, Artificial sequence
  synthetic
ggcgcgccagtccttcacccgccctggagatttgggcgtgcccccgcaagactgctagccgagtagtgttgggtcgcgaaaggccttgtggtactgcctgatagggtgcttgcgagtgccccgggaggtctcgtagaccgtgcaccatgagcacgaatcctaaacctcaaagaattcattgggaagtacgactcggaccgatg

SEQ ID NO: 12055 - DNA, 203 bp, Artificial sequence
  synthetic
ggcgcgccagtcctcataaatacctggagatttgggcgtgcccccgcaagactgctagccgagtagtgttgggtcgcgaaaggccttgtggtactgcctgatagggtgcttgcgagtgccccgggaggtctcgtagaccgtgcaccgattaacacccgaataaacctcaaagaaaaaccaaacgtaaccgactcggaccgatg

SEQ ID NO: 12056 - DNA, 203 bp, Artificial sequence
  synthetic
ggcgcgccagtcctacattattcctggagatttgggcgtgcccccgcaagactgctagccgagtagtgttgggtcggtttctcagcaaaagtactgcctgatagggtgcttgcgagtgccccgggaggtctcgtagaccgtgcaccatgagcacgaatcctaaacctcaaagaaaaaccaaacgtaaccgactcggaccgatg

SEQ ID NO: 12057 - DNA, 203 bp, Artificial sequence
  synthetic
ggcgcgccagtcctagaagccgcctggagatttgtcatccgtaggcgcagactgctagccgagtagtgttgggtcgcgaaaggccttgtggtactgcctgatagggtgcttgcgagtgccccgggaggtctcgtagaccgtgcaccatgagcacgaatcctaaacctcaaagaaaaaccaaacgtaaccgactcggaccgatg

SEQ ID NO: 12058 - DNA, 203 bp, Artificial sequence
  synthetic
ggcgcgccagtcctagtccgcccctggtggcaatcccttcccttaggagcatgagtgtggtccgacacgatgggtcggcttggctgtggttgctggtttgcttccccctcgcggggggggtgctcttcaactcgcggcaccagtgcttcaatggggaccattatgtgctttccaattgttgttcccgacgactcggaccgatg

SEQ ID NO: 12059 - DNA, 203 bp, Artificial sequence
  synthetic
ggcgcgccagtcctgaacctggcctggtggcaatcccttcccttaggagcatgagtgtggtcgacacattcaccatacgcctcagagaaatgctggtttgcttccccctcgcggggggggtgctcttcaactcgcggcaccagtgcttcaatggggaccattatgtgctttccaattgttgttcccgacgactcggaccgatg

SEQ ID NO: 12060 - DNA, 203 bp, Artificial sequence
  synthetic
ggcgcgccagtcctagagtttacctggtggcaatcccttcccttaggagcatgagtgtggtcgacacattcaccatggcttggctgtggtactgcaccgagaagcccctcgcggggggggtgctcttcaactcgcggcaccagtgcttcaatggggaccattatgtgctttccaattgttgttcccgacgactcggaccgatg

SEQ ID NO: 12061 - DNA, 203 bp, Artificial sequence
  synthetic
ggcgcgccagtccttgaaaccacctggtggcaatcccttcccttaggagcatgagtgtggtcgacacattcaccatggcttggctgtggttgctggtttgcttccccctcgcggggggaagaacgcgttttacgcggcaccagtgcttcaatggggaccattatgtgctttccaattgttgttcccgacgactcggaccgatg

SEQ ID NO: 12062 - DNA, 203 bp, Artificial sequence
  synthetic
ggcgcgccagtcctgcagcctgcctggtggcaatcccttcccttaggagcatgagtgtggtcgacacattcaccatggcttggctgtggttgctggtttgcttccccctcgcggggggggtgctcttcaactatatttcagccgatttcaatggggaccattatgtgctttccaattgttgttcccgacgactcggaccgatg

SEQ ID NO: 12063 - DNA, 203 bp, Artificial sequence
  synthetic
ggcgcgccagtccttgttatggcctggtggcaatcccttcccttaggagcatgagtgtggtcgacacattcaccatggcttggctgtggttgctggtttgcttccccctcgcggggggggtgctcttcaactcgcggcaccagtgccattcgaattctgcttatgtgctttccaattgttgttcccgacgactcggaccgatg

SEQ ID NO: 12064 - DNA, 203 bp, Artificial sequence
  synthetic
ggcgcgccagtcctgcccgtgacctggtggcaatcccttcccttaggagcatgagtgtggtcgacacattcaccatggcttggctgtggttgctggtttgcttccccctcgcggggggggtgctcttcaactcgcggcaccagtgcttcaatggggaccattatgtgctttccaattgttgttcccgacgactcggaccgatg

SEQ ID NO: 12065 - DNA, 203 bp, Artificial sequence
  synthetic
ggcgcgccagtccttgacgggccctgtgaggaactactgtcttcacgcagaaagcgtctagccatggcgttagtatgagtgtcgtgcagcctccaggaccccccctcccgggagagccatagtggtctgcggaaccggtgagtacaccggaattgccaggacgaccgggtcctttcttggataaaccccgactcggaccgatg

SEQ ID NO: 12066 - DNA, 203 bp, Artificial sequence
  synthetic
ggcgcgccagtcctgcgtgtaacctgtgaggaactactgtcttcacgcagaaagcgtctagccatggcgttagtatgagtgtcgtgcagcctccaggaccccccctcccgggagagccatagtggtctgcggaaccggtgagtacaccggaattgccaggcgtcagaacaatgatcttggataaaccccgactcggaccgatg

SEQ ID NO: 12067 - DNA, 203 bp, Artificial sequence
  synthetic
ggcgcgccagtcctctcgttgtcctgtgaggaactactgtcttcacgcagaaagcgtctagccatggcgttagtatgagtgtcgtgcagcctccaggaccccccctcccgggagagcctcgacaagacagtaaaccggtgagtacaccggaattgccaggacgaccgggtcctttcttggataaaccccgactcggaccgatg

SEQ ID NO: 12068 - DNA, 203 bp, Artificial sequence
  synthetic
ggcgcgccagtccttcagaagacctgtgaggaactactgtcttcacgcagaaagcgtctagccatggcgttagtatgagtgtcgtgcagcctccaggaccccccgaggtccatcctgtatagtggtctgcggaaccggtgagtacaccggaattgccaggacgaccgggtcctttcttggataaaccccgactcggaccgatg

SEQ ID NO: 12069 - DNA, 203 bp, Artificial sequence
  synthetic
ggcgcgccagtccttggactgacctgtgaggaactactgtcttcacgcgacggtgtcgggtgcatggcgttagtatgagtgtcgtgcagcctccaggaccccccctcccgggagagccatagtggtctgcggaaccggtgagtacaccggaattgccaggacgaccgggtcctttcttggataaaccccgactcggaccgatg

SEQ ID NO: 12070 - DNA, 203 bp, Artificial sequence
  synthetic
ggcgcgccagtccttctaacgaccttaagtcataatgaatcaattatctgaattacttggatttgatcttaatccataaattataataaatatcaactagcaaatcaatgtcactaacaccattagttaatataaaacttgacagaagataaaaatggggcaaataaatcaattcagccgacccaacccgactcggaccgatg

SEQ ID NO: 12071 - DNA, 203 bp, Artificial sequence
  synthetic
ggcgcgccagtcctgtttggacccttctgatggtaccaccttttagagttcctcctgcagcagcctgcctgcagctgtcctggtagaacagtgtggacattgcagaagctgtcactgccccagaaagaaagcaccccagagccaaggcaaagagtcttgaaagcgccacaagcagcagctgctgagcccgactcggaccgatg

SEQ ID NO: 12072 - DNA, 203 bp, Artificial sequence
  synthetic
ggcgcgccagtcctgcagattcccttctgatggtgaatgggaactccccatgggtctggctcgcctgcctgcagctgtcctggtagaacagtgtggacattgcagaagctgtcactgccccagaaagaaagcaccccagagccaaggcaaagagtcttgaaagcgccacaagcagcagctgctgagcccgactcggaccgatg

SEQ ID NO: 12073 - DNA, 203 bp, Artificial sequence
  synthetic
ggcgcgccagtcctggctttcaccttctgatggtgaatgggaactcccttcctcctgcagcagcctgcctgcagctactagttctttctcgtgtggacattgcagaagctgtcactgccccagaaagaaagcaccccagagccaaggcaaagagtcttgaaagcgccacaagcagcagctgctgagcccgactcggaccgatg

SEQ ID NO: 12074 - DNA, 203 bp, Artificial sequence
  synthetic
ggcgcgccagtcctacagatagccttctgatggtgaatgggaactcccttcctcctgcagcagcctgcctgcagctgtcctggtagaacaagacaacatcattcgaagctgtcactgccccagaaagaaagcaccccagagccaaggcaaagagtcttgaaagcgccacaagcagcagctgctgagcccgactcggaccgatg

SEQ ID NO: 12075 - DNA, 203 bp, Artificial sequence
  synthetic
ggcgcgccagtccttgcgtatcccttctgatggtgaatgggaactcccttcctcctgcagcagcctgcctgcagctgtcctggtagaacagtgtggacattgcagaagctgtcactgccccagaaagaaagcaccccagagccaaggcaaagagtcttgaaagcgccacaagcatagctcctcacctgcgactcggaccgatg

SEQ ID NO: 12076 - DNA, 203 bp, Artificial sequence
  synthetic
ggcgcgccagtccttactaccaccttctgatggtgaatgggaactcccttcctcctgcagcagcctgcctgcagctgtcctggtagaacagtgtggacattgcagaagctgtcactgccccagaaagaaagcaccccagagccaagtgtcctgcctaccgaagcgccacaagcagcagctgctgagcccgactcggaccgatg

SEQ ID NO: 12077 - DNA, 203 bp, Artificial sequence
  synthetic
ggcgcgccagtcctgattagatccttctgatggtgaatgggaactcccttcctcctgcagcagcctgcctgcagctgtcctggtagaacagtgtggacattgcagaagctgtcactgccccagaaagaaagcttatatacttttgagcaaagagtcttgaaagcgccacaagcagcagctgctgagcccgactcggaccgatg

SEQ ID NO: 12078 - DNA, 203 bp, Artificial sequence
  synthetic
ggcgcgccagtcctatagcaggcctttcccctcccttccctatccccgacgaccggatcctgaggaggcagctgcggtggcagctgctgagttctcggtgaaggtatttcatttctcctgtcccctcccctccccaccccatctattaatattattcttttgaagattcttcgtacatgtcatagggtcgactcggaccgatg

SEQ ID NO: 12079 - DNA, 203 bp, Artificial sequence
  synthetic
ggcgcgccagtcctgcgttacccctttcccctcccttccctatccccgacgaccggatcctgaggaggcagctgcggtggcagctgctgagttctcggtgaaggtatttcatttctcctgtcccctcccctcgagcattataagcgtaatattattcttttgaagattcttcgttgtcaagccgccaacgactcggaccgatg

SEQ ID NO: 12080 - DNA, 203 bp, Artificial sequence
  synthetic
ggcgcgccagtcctaactatcgcctttcccctcccttccctatccccgacgaccggatcctgttctaaatatcctcgtggcagctgctgagttctcggtgaaggtatttcatttctcctgtcccctcccctccccaccccatctattaatattattcttttgaagattcttcgttgtcaagccgccaacgactcggaccgatg

SEQ ID NO: 12081 - DNA, 203 bp, Artificial sequence
  synthetic
ggcgcgccagtcctctcagagacgaacccactcagagcagcgatacctagggcggaagtgctctcggcggaagtgatcgctgtgtgaatcgtgggtgggatggccgcgggccgcctctttctaagtcggcttcgagcacccttcagttccatggccaagagcccactcgagggcgtttcctcctccagcgactcggaccgatg

SEQ ID NO: 12082 - DNA, 203 bp, Artificial sequence
  synthetic
ggcgcgccagtcctataaagttcgaatttagcgtttaaccctgcagctagagcacgtaacccaatgtgtatctagtcgtaatgagcaattgcgggatgggaccaactactttgggtgtccgtgtttcactttttcctttatatttgcttatggtgacaatatatacaatatatatattggcaccatggcgactcggaccgatg

SEQ ID NO: 12083 - DNA, 203 bp, Artificial sequence
  synthetic
ggcgcgccagtcctaaggagcgcgacacacatgttccatctgtctctgcctggcaggcgcacgcgcccagcaccctgcctccggcgatgccgccccagcccctctgatggccctcctctctgctgccactcattccagaacaggaggcatgagcccggaacgcgcttgcttttaggagacagccacttcgactcggaccgatg

SEQ ID NO: 12084 - DNA, 203 bp, Artificial sequence
  synthetic
ggcgcgccagtcctgaccactccgaccccagtcgatgtttcttagcggtcgtgtagttatttttatgtcataagtggataatttgttagctcctataacaaaagtctgttgcttgtgtttcacattttggatttcctaatataatgttctctttttagaaaaggtggacaagtcctattttcaagagacgactcggaccgatg

SEQ ID NO: 12085 - DNA, 203 bp, Artificial sequence
  synthetic
ggcgcgccagtcctgtcattctcgaccgcattgcaatccccagcagagacccagtgcatgtggcaggagcggtgagatcactgcctcacggcgatcctggactgacggtcacgactgcctaccctctaaccctgttctgagctgccccttgcccacacaccccaaacctgtgtgcaggatccgcctcccgactcggaccgatg

SEQ ID NO: 12086 - DNA, 203 bp, Artificial sequence
  synthetic
ggcgcgccagtcctctgcaatacgaccgcattgcggcttggttttctcacccagtgcatgtgaggaataattctccatcactgcctcacggcgatcctggactgacggtcacgactgcctaccctctaaccctgttctgagctgccccttgcccacacaccccaaacctgtgtgcaggatccgcctcccgactcggaccgatg

SEQ ID NO: 12087 - DNA, 203 bp, Artificial sequence
  synthetic
ggcgcgccagtcctacttcgaacgaccgcattgcggcttggttttctcacccagtgcatgtggcaggagcggtgagatcactgcctcacggcgatcctggactgacggtcacgactgcctaccctctaaccctgttctgagctgccccttgcccacacaccccaaacctgtgtgcaggatccgcctcccgactcggaccgatg

SEQ ID NO: 12088 - DNA, 203 bp, Artificial sequence
  synthetic
ggcgcgccagtcctctctgatccgaccgcattgcggcttggttttctcacccagtgcatgtggcaggagcggtgagatcactgcctcacggcgatcctggactgacggtcacgactgcctaccctctaaccctgttctgagctgccccttgcccacacaccccaaacctgtgtgtgaataaaagagagcgactcggaccgatg

SEQ ID NO: 12089 - DNA, 203 bp, Artificial sequence
  synthetic
ggcgcgccagtccttgcaggaccgaccgcattgcggcttggttttctcacccagtgcatgtggcaggagcggtgagatcactgcctcacggcgatcctggactgacggtcacgactgcctaccctctaaccctgttctgagctgccgtaaaatacagggtcccaaacctgtgtgcaggatccgcctcccgactcggaccgatg

SEQ ID NO: 12090 - DNA, 203 bp, Artificial sequence
  synthetic
ggcgcgccagtcctatccttcccgaccgcattgcggcttggttttctcacccagtgcatgtggcaggagcggtgagatcactgcctcacggcgatcctggactggaataattccaatactaccctctaaccctgttctgagctgccccttgcccacacaccccaaacctgtgtgcaggatccgcctcccgactcggaccgatg

SEQ ID NO: 12091 - DNA, 203 bp, Artificial sequence
  synthetic
ggcgcgccagtcctgattcgcccgaccgcattgcggcttggttttctcacccagtgcatgtggcaggagcggtgagcctctccagagtacgcgatcctggactgacggtcacgactgcctaccctctaaccctgttctgagctgccccttgcccacacaccccaaacctgtgtgcaggatccgcctcccgactcggaccgatg

SEQ ID NO: 12092 - DNA, 203 bp, Artificial sequence
  synthetic
ggcgcgccagtcctggatgggacgaccgcattgcggcttggttttctcggttcaaaatacacgcaggagcggtgagatcactgcctcacggcgatcctggactgacggtcacgactgcctaccctctaaccctgttctgagctgccccttgcccacacaccccaaacctgtgtgcaggatccgcctcccgactcggaccgatg

SEQ ID NO: 12093 - DNA, 203 bp, Artificial sequence
  synthetic
ggcgcgccagtcctaccaactgcgactcgccctcggccttccgcgccagccgcagccacagcattcctagactgtacagccacagccacagccacagccccaggcatagccttcggcacagccccggctccggctcctgcggcagctcctctgggcaccgtccctgcgccgacatcctggaggttgggcgactcggaccgatg

SEQ ID NO: 12094 - DNA, 203 bp, Artificial sequence
  synthetic
ggcgcgccagtcctggaatcaacgactcgccctcggccttccgcgccagccgcagccacagccgcaacgccacccgcagccacagccacagccacagccccaggcatagccttcggcacagccccggctccggctcctgcggcagctcctctgggcaccgtccctgcgccgacaatagacgtcaccctcgactcggaccgatg

SEQ ID NO: 12095 - DNA, 203 bp, Artificial sequence
  synthetic
ggcgcgccagtcctgcattgtacgactcgccctcggccttccgcgccagccgcagccacagccgcaacgccacccgcagccacagccacagccacagccccaggcatagccttcggcacagccccggctccggctcctgcggcagctcctctgggcaccgtccctgcgccgacatcctggaggttgggcgactcggaccgatg

SEQ ID NO: 12096 - DNA, 203 bp, Artificial sequence
  synthetic
ggcgcgccagtcctaactgattcgagatgccacgtggacgagggcatgcccaaagcacatcttaacctgagcgggggtcgcccaggtaaaagcagttttaaccgactgttacgaatacagcctgatagggtgggttttcattgggatgtattgctactaaaaatctctgctgtacatggcacatggagcgactcggaccgatg

SEQ ID NO: 12097 - DNA, 203 bp, Artificial sequence
  synthetic
ggcgcgccagtcctggcacacgcgatctcttgtcagatctcattaaataagcgtgcccatgtcaagattccctgttatccatgcttgtgagtgtggtttaatcataatcttgtattttactttccacacttttcatctctctgccagtgacgtgttggttgtcctcagcgtccctcccataggtcgcacgactcggaccgatg

SEQ ID NO: 12098 - DNA, 203 bp, Artificial sequence
  synthetic
ggcgcgccagtccttcgatcgtcgatctcttgtcagatctcattaaatctaaactttttaaacaagattccctgttatccatgcttgtgacctgacaaccgctttaatcttgtattttactttccacacttttcatctctctgccagtgacgtgttggttgtcctcagcgtccctcccataggtcgcacgactcggaccgatg

SEQ ID NO: 12099 - DNA, 203 bp, Artificial sequence
  synthetic
ggcgcgccagtcctgatccagacgatctcttgtcagatctcattaaatctaaactttttaaacaagattccctgttatccatgcttgtgagtgtggtttaatcacgcatggccggccgactttccacacttttcatctctctgccagtgacgtgttggttgtcctcagcgtccctcccataggtcgcacgactcggaccgatg

SEQ ID NO: 12100 - DNA, 203 bp, Artificial sequence
  synthetic
ggcgcgccagtccttggagtagcgatctcttgtccttagaatggttcgctaaactttttaaacaagattccctgttatccatgcttgtgagtgtggtttaatcataatcttgtattttactttccacacttttcatctctctgccagtgacgtgttggttgtcctcagcgtccctcccataggtcgcacgactcggaccgatg

SEQ ID NO: 12101 - DNA, 203 bp, Artificial sequence
  synthetic
ggcgcgccagtcctacttgtcacgattgtgttaggccgttctcagcgctgcccgaccccgctcgcgcgccctcccgccgccagtcccggcagcgccctcagttgtcctccgactcgccctcggccttccgcgccagccgcagccacagccgcaacgccacccgcagccacagccacagccacagcccccgactcggaccgatg

SEQ ID NO: 12102 - DNA, 203 bp, Artificial sequence
  synthetic
ggcgcgccagtccttttacgaccgatttaaactagccgccggcgctcgcaggccgcggatgaagaagaaaacccggcgccgctcgacccggagcgaggagttgacccggagcgaggagttgaccctgagtgaggaagcgacctggagtgaagaggcgacccagagtgaggaggcgacccagggcgaagcgactcggaccgatg

SEQ ID NO: 12103 - DNA, 203 bp, Artificial sequence
  synthetic
ggcgcgccagtcctgtcgtcaacgcaaagccggtggcgcccggaggctaagtctcagatcccgcccgcgtcagagcctcgccctgtcaccaggctggagtacagtggcgcgatctcggctcactgcaacttccacctgctgggttcaagcaattcttctgacctcagtgaccgaaggaagagaccaagcgactcggaccgatg

SEQ ID NO: 12104 - DNA, 203 bp, Artificial sequence
  synthetic
ggcgcgccagtccttttgtccccgcaaagccggtggcgcccggaggctctggtacccttctcgcccgcgtcagagcctcgccctgtcaccaggctggagtacagtggcgcgatctcggctcactgcaacttccacctgctgggttcaagcaattcttctgacctcagtgaccgaaggaagagaccaagcgactcggaccgatg

SEQ ID NO: 12105 - DNA, 203 bp, Artificial sequence
  synthetic
ggcgcgccagtcctcagacccacgcaaagccggtggcgcccggaggctgcacggagagcggtaagatttctgccctctcgccctgtcaccaggctggagtacagtggcgcgatctcggctcactgcaacttccacctgctgggttcaagcaattcttctgacctcagtgaccgaaggaagagaccaagcgactcggaccgatg

SEQ ID NO: 12106 - DNA, 203 bp, Artificial sequence
  synthetic
ggcgcgccagtcctcgcactgtcgcaaagccggtggcgcccggaggctgcacggagagcggtaatgaatatccgttctcgccctgtcaccaggctggagtacagtggcgcgatctcggctcactgcaacttccacctgctgggttcaagcaattcttctgacctcagtgaccgaaggaagagaccaagcgactcggaccgatg

SEQ ID NO: 12107 - DNA, 203 bp, Artificial sequence
  synthetic
ggcgcgccagtcctctactgcgcgcaaagccggtggcgcccggaggctgcacggagagcggtgcccgcgtcagagcaggaagtgacgcataggctggagtacagtggcgcgatctcggctcactgcaacttccacctgctgggttcaagcaattcttctgacctcagtgaccgaaggaagagaccaagcgactcggaccgatg

SEQ ID NO: 12108 - DNA, 203 bp, Artificial sequence
  synthetic
ggcgcgccagtcctatacgtctcgcaaagccggtggcgcccggaggctgcacggagagcggtgcccgcgtcagagcctcgccctgtcaccaggctggagtacagtggcgcgatctcggctcactgcaacttccacctgctgggttcaagcaattcttctggtaatgacatggctaggaagagaccaagcgactcggaccgatg

SEQ ID NO: 12109 - DNA, 203 bp, Artificial sequence
  synthetic
ggcgcgccagtcctatggctcccgcaaagccggtggcgcccggaggctgcacggagagcggtgcccgcgtcagagcctcgccctgtcaccaggctggagtacagtggcgcgatctcggctcactgcaacttccacctgctgggttcaagcaattcttctggtgaaccgataacgaggaagagaccaagcgactcggaccgatg

SEQ ID NO: 12110 - DNA, 203 bp, Artificial sequence
  synthetic
ggcgcgccagtcctggtgatatcgcaaagccggtggcgcccggaggctgcacggagagcggtgcccgcgtcagagcctcgccctgtcaccaggctggagtacagtggcgcgatctcggctcactgcaacttccacctgctgggttctttactgctgcagcacctcagtgaccgaaggaagagaccaagcgactcggaccgatg

SEQ ID NO: 12111 - DNA, 203 bp, Artificial sequence
  synthetic
ggcgcgccagtcctctccgtgccgcaaagccggtggcgcccggaggctgcacggagagcggtgcccgcgtcagagcctcgccctgtcaccaggctggagtacagtggcgcgatctcggctcactgcaacttctggtattcataactaagcaattcttctgacctcagtgaccgaaggaagagaccaagcgactcggaccgatg

SEQ ID NO: 12112 - DNA, 203 bp, Artificial sequence
  synthetic
ggcgcgccagtcctcatatcttcgcactgcttgacggcagcggtgtccgccccacggccggcgttgccggggtaacggcgagcgcgtggggccaagaaagaatacctcctctgaaaaagaaggagtagcagattccatgccccaaagaggaaaagaagagtgtatgagacttacgagtctccattgcccgactcggaccgatg

SEQ ID NO: 12113 - DNA, 203 bp, Artificial sequence
  synthetic
ggcgcgccagtcctcaccacaacgcactgcttgacggcagcggtgtccgccccacggccggcgttgccggggtaacggcgagcgcgtggggccaagaaagaatacctcctctgaaaaatggcagaagcagttttccatgccccaaagaggaaaagaagagtgtatgagacttactctcgaaggcatagcgactcggaccgatg

SEQ ID NO: 12114 - DNA, 203 bp, Artificial sequence
  synthetic
ggcgcgccagtcctcgtttgttcgcactgcttgacggcagcggtgtccgccccacggccggcgttgccggggtaacttaatcgagaacccgccaagaaagaatacctcctctgaaaaatggcagaagcagttttccatgccccaaagaggaaaagaagagtgtatgagacttacgagtctccattgcccgactcggaccgatg

SEQ ID NO: 12115 - DNA, 203 bp, Artificial sequence
  synthetic
ggcgcgccagtcctaaatggcacgcactgcttgacggcagcggtgtcctttaggaccaaatggttgccggggtaacggcgagcgcgtggggccaagaaagaatacctcctctgaaaaatggcagaagcagttttccatgccccaaagaggaaaagaagagtgtatgagacttacgagtctccattgcccgactcggaccgatg

SEQ ID NO: 12116 - DNA, 203 bp, Artificial sequence
  synthetic
ggcgcgccagtcctatggtagtcgcagtccagagggctgcgctgctcggggtaagtatccaaagaagggggtgacgctgggcagcggcgaggagcgcgccgctgcctctggcgggctttcggcttgaggggcaaggtgaagagcgcaccggccgtggggtttaccgagctggatttgtatgttgcacccgactcggaccgatg

SEQ ID NO: 12117 - DNA, 203 bp, Artificial sequence
  synthetic
ggcgcgccagtcctactctgttcgcagtccagagggctgcgctgctcgtcccctcggctggcagaagggggtgacgctgggcagcggcgacacatcgaggttcccctctggcgggctttcggcttgaggggcaaggtgaagagcgcaccggccgtggggtttaccgagctggatttgtatgttgcacccgactcggaccgatg

SEQ ID NO: 12118 - DNA, 203 bp, Artificial sequence
  synthetic
ggcgcgccagtccttttgaaatcgcagtccagagggctgcgctgctcgtcccctcggctggcagaagggggtgacgctgggcagcggcgaggagcgcgccgctgcctctggcgggctttcggcttgaggggcaaggtgaagagcgcaccggccgtggggtttaccgagctggatcccccataaatgttcgactcggaccgatg

SEQ ID NO: 12119 - DNA, 203 bp, Artificial sequence
  synthetic
ggcgcgccagtcctccggctgacgcagtccagagggctgcgctgctcgtcccctcggctggcagaagggggtgacgctgggcagcggcgaggagcgcgccgctgcctctggcgggctttcggcttgaggggcaaggtgaagagcgcaccggccgtggggtttaccgagctggatttgtatgttgcacccgactcggaccgatg

SEQ ID NO: 12120 - DNA, 203 bp, Artificial sequence
  synthetic
ggcgcgccagtcctccacttggcgcagtccagagggctgcgctgctcgtcccctcggctggcagaagggggtgacgggcttagctcatagggagcgcgccgctgcctctggcgggctttcggcttgaggggcaaggtgaagagcgcaccggccgtggggtttaccgagctggatttgtatgttgcacccgactcggaccgatg

SEQ ID NO: 12121 - DNA, 203 bp, Artificial sequence
  synthetic
ggcgcgccagtccttactctatcgccaacaaggcaatgtcaatcacttcttgtttactccgaaccccagaatccattaagaaaaacttaggagacaggtataatattctcatacctgtccattcaccttggacttaaagagagacaatcattcagccccgtccaagacacacctgagtggccagaacccgactcggaccgatg

SEQ ID NO: 12122 - DNA, 203 bp, Artificial sequence
  synthetic
ggcgcgccagtcctggcacggacgccaacaaggcaatgtcaatcacttgaatgcaggggtagaccccagaatccatgcgtctgggacatagagacaggtataatattctcatacctgtccattcaccttggacttaaagagagacaatcattcagccccgtccaagacacacctgagtggccagaacccgactcggaccgatg

SEQ ID NO: 12123 - DNA, 203 bp, Artificial sequence
  synthetic
ggcgcgccagtcctactggtttcgccaacaaggcaatgtcaatcacttgaatgcaggggtagaccccagaatccattaagaaaaacttagcttgggtcggattgattctcatacctgtccattcaccttggacttaaagagagacaatcattcagccccgtccaagacacacctgagtggccagaacccgactcggaccgatg

SEQ ID NO: 12124 - DNA, 203 bp, Artificial sequence
  synthetic
ggcgcgccagtccttgtaagagcgccaacaaggcaatgtcaatcacttgaatgcaggggtagaccccagaatccattaagaaaaacttaggagacaggtataatattctcatacctgtccattcaccttggacttaaagagagacaatcattcagccccgtccaagacacacctcgtccttagcccggcgactcggaccgatg

SEQ ID NO: 12125 - DNA, 203 bp, Artificial sequence
  synthetic
ggcgcgccagtcctagcgaaaccgccaacaaggcaatgtcaatcacttgaatgcaggggtagaccccagaatccattaagaaaaacttaggagacaggtataatattctcatacctgtccattcaccttggacttaaagagagacacaggacagtatggctccaagacacacctgagtggccagaacccgactcggaccgatg

SEQ ID NO: 12126 - DNA, 203 bp, Artificial sequence
  synthetic
ggcgcgccagtcctcctagtgacgccaacaaggcaatgtcaatcacttgaatgcaggggtagaccccagaatccattaagaaaaacttaggagacaggtataatccaacgggcttatcccattcaccttggacttaaagagagacaatcattcagccccgtccaagacacacctgagtggccagaacccgactcggaccgatg

SEQ ID NO: 12127 - DNA, 203 bp, Artificial sequence
  synthetic
ggcgcgccagtccttaataggccgccaacaaggctcgacgttatgggagaatgcaggggtagaccccagaatccattaagaaaaacttaggagacaggtataatattctcatacctgtccattcaccttggacttaaagagagacaatcattcagccccgtccaagacacacctgagtggccagaacccgactcggaccgatg

SEQ ID NO: 12128 - DNA, 203 bp, Artificial sequence
  synthetic
ggcgcgccagtccttatgacaccgccagtcggagcccccggcccagcgtggtccgcctccctctgggcgtccacctgcccggagtactgccagcgggcatgacctcattctgtacatagccgccgccggcgctcgcaggccgcggatgaagaagaaaacccggcgccgctcgacccggagcgaggagtcgactcggaccgatg

SEQ ID NO: 12129 - DNA, 203 bp, Artificial sequence
  synthetic
ggcgcgccagtccttatgtactcgccccgacccgcttactccgagtaaccgcgcctgccccgccaggcgaagcgaggcgacccgcgtgcggccatggcttcgctgctgggagcctacccttggcccgagggtctcgagtgcccggccctggacgccgagctgtcggatggacaatcgccgccggccgtcgactcggaccgatg

SEQ ID NO: 12130 - DNA, 203 bp, Artificial sequence
  synthetic
ggcgcgccagtcctcctataatcgccccgacccgtgcgagggccaggtaatgcttaaatttcccaggcgaagcgaggcgacccgcgtgcggccatggcttcgctgctgggagcctacccttggcccgagggtctcgagtgcccggccctggacgccgagctgtcggatggacaatcgccgccggccgtcgactcggaccgatg

SEQ ID NO: 12131 - DNA, 203 bp, Artificial sequence
  synthetic
ggcgcgccagtccttacaatgacgccccgacccgtgcgagggccaggtccgcgcctgccccgccaggcgaagcgagattgattaacccttgccatggcttcgctgctgggagcctacccttggcccgagggtctcgagtgcccggccctggacgccgagctgtcggatggacaatcgccgccggccgtcgactcggaccgatg

SEQ ID NO: 12132 - DNA, 203 bp, Artificial sequence
  synthetic
ggcgcgccagtccttccaaacgcgccctgcccccagccccgccactcccaggctcctcgggactcggcgggtcctcactcactcgaacccggggaccggctgtgcagagaacttcagccaaagcatctgagacgggaagcagaaaaaggagggacagtttggagaagaaaaacgcagctgtgtacgcccgactcggaccgatg

SEQ ID NO: 12133 - DNA, 203 bp, Artificial sequence
  synthetic
ggcgcgccagtcctagtagttccgccctgcccccagccccgccactcccaggctcctcgggactcggcgggtcctcctgggagtctcggaggggaccggctgtgcagagaacttcagccaaagcatctgagacgggaagcagaaaaaggagggacagtttcctattctctggtacagctgtgtacgcccgactcggaccgatg

SEQ ID NO: 12134 - DNA, 203 bp, Artificial sequence
  synthetic
ggcgcgccagtcctgttacaatcgccctgcccccagccccgccactcccaggctcctcgggactcggcgggtcctcctgggagtctcggaggggaccggctgtgcagagaacttcagccaaagcatctgagacgggaagcagaaaaaggagggacagtttggagaagaaaaacgcagctgtgtacgcccgactcggaccgatg

SEQ ID NO: 12135 - DNA, 203 bp, Artificial sequence
  synthetic
ggcgcgccagtcctgcgacagccgccctgcccccagccccgccactccggaaaagtgttcatctcggcgggtcctcctgggagtctcggaggggaccggctgtgcagagaacttcagccaaagcatctgagacgggaagcagaaaaaggagggacagtttggagaagaaaaacgcagctgtgtacgcccgactcggaccgatg

SEQ ID NO: 12136 - DNA, 203 bp, Artificial sequence
  synthetic
ggcgcgccagtcctcacggatgcgccgccatgctcttcttttttctataggtgctgctgctgaggaccttccagggccgcacgctgcggatcgtgcgcgagcactacctgcggccctgcgtgccctgccacagcccgctctgcccgcagcccgccgcctgcagccacgatgggaaactcttgtctagtcgactcggaccgatg

SEQ ID NO: 12137 - DNA, 203 bp, Artificial sequence
  synthetic
ggcgcgccagtcctttgacgcacgccgccatgctgcagaagcgggagaaggtgctgctgctgaggaccttccagggccgcacgctgcggagatcatcttccatttacctgcggccctgcgtgccctgccacagcccgctctgcccgcagcccgccgcctgcagccacgatgggaaactcttgtctagtcgactcggaccgatg

SEQ ID NO: 12138 - DNA, 203 bp, Artificial sequence
  synthetic
ggcgcgccagtcctcgacatttcgccgccatgctgcagaagcgggagaaggtgctgctgctgaggaccttccagggccgcacgctgcggatcgtgcgcgagcactacctgcggccctgcgtgccctgccacagcccgctctgcccgcagcccgccgcctgcagccacgatgggagctcgcgtcgagtgcgactcggaccgatg

SEQ ID NO: 12139 - DNA, 203 bp, Artificial sequence
  synthetic
ggcgcgccagtcctggttagtccgccgccatgctgcagaagcgggagaaggtgctgctgctgaggaccttccagggccgcacgctgcggatcgtgcgcgagcactacctgcggccctgcgtgccctgccacagcccgctctgcccgggaataattatggtcagccacgatgggaaactcttgtctagtcgactcggaccgatg

SEQ ID NO: 12140 - DNA, 203 bp, Artificial sequence
  synthetic
ggcgcgccagtcctgcgcccagcgccgccatgctgcagaagcgggagaaggtgctgctgctgaggaccttccagggccgcacgctgcggatcgtgcgcgagcactacctgcggccctgcgtgccctgccacatttactagaaaggtcagcccgccgcctgcagccacgatgggaaactcttgtctagtcgactcggaccgatg

SEQ ID NO: 12141 - DNA, 203 bp, Artificial sequence
  synthetic
ggcgcgccagtccttcaccgctcgccgccatgctgcagaagcgggagaaggtgctgctgctgaggaccttccagggccgcacgctgcggatcgtgcgcgagcactacctgcggccctggcattagctaattcgcccgctctgcccgcagcccgccgcctgcagccacgatgggaaactcttgtctagtcgactcggaccgatg

SEQ ID NO: 12142 - DNA, 203 bp, Artificial sequence
  synthetic
ggcgcgccagtcctacttataccgccgccgcagcaattactttgaggccccccgccgggtgcctaagcaggcccggcgcggccccaggacttgggaccctggaggactgacgctgctggcctgggcgtccccttccgctgagccatggcgactcccgacgtgagtgtgcacatggaggaggtggtggtcgactcggaccgatg

SEQ ID NO: 12143 - DNA, 203 bp, Artificial sequence
  synthetic
ggcgcgccagtcctggattatccgccgccgcagctcccgacgccgccgcccccgccgggtgcctaagcaggcccggcgcggccccaggacttgggaccctggaggactgacgctgctggcctgggcgtccccttccgctgagccatcctcctgtttctgctgagtgtgcacatggaggaggtggtggtcgactcggaccgatg

SEQ ID NO: 12144 - DNA, 203 bp, Artificial sequence
  synthetic
ggcgcgccagtcctagattaaacgccgccgcagctcccgacgccgccgcccccgccgggtgcctaagcaggcccggcgcggccccaggacttgggaccctggaggactgacgctgctggcctgggcgtccccttccgctgagccatggcgactcccgacgtgagtgtgcacatggaggaggtggtggtcgactcggaccgatg

SEQ ID NO: 12145 - DNA, 203 bp, Artificial sequence
  synthetic
ggcgcgccagtcctcactcgaacgccgccgcagctcccgacgccgccgcccgtcggcaccgcctaagcaggcccggcgcggccccaggacttgggaccctggaggactgacgctgctggcctgggcgtccccttccgctgagccatggcattgatggacgtgagtgtgcacatggaggaggtggtggtcgactcggaccgatg

SEQ ID NO: 12146 - DNA, 203 bp, Artificial sequence
  synthetic
ggcgcgccagtcctttctcggccgccgggcgcacacactcgcacccgcgcacgcaccgccagcaggcagcggccaccgccgcgatgctcgcccgcgggttggggaagtttcccgccggcctcggccgcgggcacccgtgctcccaggtgtagcgcccccggaatcgtttacgttccggcgcctccagccgactcggaccgatg

SEQ ID NO: 12147 - DNA, 203 bp, Artificial sequence
  synthetic
ggcgcgccagtcctgtgcgaatcgccgggcgcacacactcgcacccgcgcacgcaccgccagcaggcagcggccaccgccgcgatgctcgcccgcgggttggggaagtttcccgccggtaggccgaatactaacccgtgctcccaggtgtagcgcccccgcgcggcgcgggcggccggcgcctccagccgactcggaccgatg

SEQ ID NO: 12148 - DNA, 203 bp, Artificial sequence
  synthetic
ggcgcgccagtccttccctgtacgcctcggaattctccaaggattttctgccgtctcttggcaaaaatggcaaataatgatgctgttctgaagagactggagcagaagggtgcagaggcagatcaaatcattgaatatcttaagcagcaagtttctctacttaaggagaaagcaattttgcaggcaaccgactcggaccgatg

SEQ ID NO: 12149 - DNA, 203 bp, Artificial sequence
  synthetic
ggcgcgccagtccttatactgtcgcgaagacgcaaataaaaaatattgcatacgttgacgaaacaaattttcgttgcatacccaataaaagattattatattgcataccttttcttgccataccatttagccgatcaattgtgctcggcaacagtatatttgtggtgtgccaaccaacaaccaatgagcgactcggaccgatg

SEQ ID NO: 12150 - DNA, 203 bp, Artificial sequence
  synthetic
ggcgcgccagtcctaagagacacgcgccgggcgcagggagctgagtggacggctcgagacggcggcgcgtgcagcacacgggtgcgtttccgagttggcagagcagggctgcatttccagcaggagctgcgagcacagtgctggctcacaacaagatgctcaaggtgtcagccgtactgtgtgtgtgtcgactcggaccgatg

SEQ ID NO: 12151 - DNA, 203 bp, Artificial sequence
  synthetic
ggcgcgccagtcctggacaacccgcgccgggcgcagggagctgagtggacggctcgagacggcggcgcgtgcagcagctccagaaagcagcgagttggcagagcagggctgcatttccagcaggagctgcgagcacagtgctggctcacaacaagatgcttggcacacggcgtttactgtgtgtgtgtcgactcggaccgatg

SEQ ID NO: 12152 - DNA, 203 bp, Artificial sequence
  synthetic
ggcgcgccagtcctaattcgttcgcgccgggcgcagggagctgagtggacggctcgagacggcggcgcgtgcagcagctccagaaagcagcgagttggcagagcagggctgcatttccagcaggagctgcgagcacagtgctggctggtgctttcgaatgcaaggtgtcagccgtactgtgtgtgtgtcgactcggaccgatg

SEQ ID NO: 12153 - DNA, 203 bp, Artificial sequence
  synthetic
ggcgcgccagtcctccgctgcccgcgccgggcgcagggagctgagtggacggctcgagacggcggcgcgtgcagcagctccagaaagcagcgagttggcagagcagggctgcatttccttgccacatgataggcacagtgctggctcacaacaagatgctcaaggtgtcagccgtactgtgtgtgtgtcgactcggaccgatg

SEQ ID NO: 12154 - DNA, 203 bp, Artificial sequence
  synthetic
ggcgcgccagtcctagtattaacgcgccgggcgcagggagctgagtggctactcgttttgatcggcgcgtgcagcagctccagaaagcagcgagttggcagagcagggctgcatttccagcaggagctgcgagcacagtgctggctcacaacaagatgctcaaggtgtcagccgtactgtgtgtgtgtcgactcggaccgatg

SEQ ID NO: 12155 - DNA, 203 bp, Artificial sequence
  synthetic
ggcgcgccagtcctactgcgtgcgcgccgggcgccaaaccggatccaaacggctcgagacggcggcgcgtgcagcagctccagaaagcagcgagttggcagagcagggctgcatttccagcaggagctgcgagcacagtgctggctcacaacaagatgctcaaggtgtcagccgtactgtgtgtgtgtcgactcggaccgatg

SEQ ID NO: 12156 - DNA, 203 bp, Artificial sequence
  synthetic
ggcgcgccagtccttaagattgcgcgcgcgagagaagagagtattctcgcgagaagtccaggggtggccgtgatggcggcggcaggagcaggacctggccaggaagcgggtgccgggcctggcccaggagcgccaattcggagttaaggggcagaagagggggagatgaagccggtggcagcgggagccgactcggaccgatg

SEQ ID NO: 12157 - DNA, 203 bp, Artificial sequence
  synthetic
ggcgcgccagtcctgcacctcacgcgcgcgagagaagagagtattctcgcgagaagtccaggggtggccgtgatggcggcggcaggagcaggacctggccaggaagcgggtgccgggcctggcccaggagcggtcgcaaatgcaacaggggcagaagaggccacttaacttaaagtggcagcgggagccgactcggaccgatg

SEQ ID NO: 12158 - DNA, 203 bp, Artificial sequence
  synthetic
ggcgcgccagtcctgggagccacgcgcgcgagagaagagagtattctcgcgagaagtccaggggtggccgtgatggcggcggcaggagcaggacctggccaggaagcgggtgccgggcctggcccaggagcggtcgcaaatgcaacaggggcagaagagggggagatgaagccggtggcagcgggagccgactcggaccgatg

SEQ ID NO: 12159 - DNA, 203 bp, Artificial sequence
  synthetic
ggcgcgccagtccttgtcgtttcgcgctcacgtccgcgtccccaagggctgcgctccctcaagcgcagtgcccagaactcggagccagcccggcccgggggaccctgctggccaaggaggtcgtcagtccgggaaaccaccattatcccggaggaccgaagcttccggacgacgaggaaccgcccaaccgactcggaccgatg

SEQ ID NO: 12160 - DNA, 203 bp, Artificial sequence
  synthetic
ggcgcgccagtcctgcggatctcgcgctcacgtccgcgtccccaagggctgcgctccctcaagcgcagtgcccagaactcggagccagcccggcccgggggaccctgctggccaaggaggtcgtcagtccggtcttgtcttccagacccggaggaccgaagcttccggacgacgaggaaccgcccaaccgactcggaccgatg

SEQ ID NO: 12161 - DNA, 203 bp, Artificial sequence
  synthetic
ggcgcgccagtcctattgtcttcgcgctcacgtccgcgtccccaagggctgcgctccctcaagcgcagtgcccagaactcggagccagcccggcccgggggaccctgctggccaaggaggtcgtcagtccggtcttgtcttccagacccggaggaccgaagcttccggacgacgtacttatagggtctcgactcggaccgatg

SEQ ID NO: 12162 - DNA, 203 bp, Artificial sequence
  synthetic
ggcgcgccagtcctcacctggtcgcgctcacgtccgcgtccccaagggctgcgctccctcaagcgcagtgcccagaactcggagccagcccggcccgggggaccctgctggccaaggaggtcgtcagtccggtcttgtcttccagatgtcagtatttttggcttccggacgacgaggaaccgcccaaccgactcggaccgatg

SEQ ID NO: 12163 - DNA, 203 bp, Artificial sequence
  synthetic
ggcgcgccagtcctgttgtaaccgcgggcagcggagcgggcgccaggcacagaaccgtcccagcgctaccgggcgtcggccctgggcagtgacggggttcgggtgaccatggagagtgcgctcaccgcccgtgaccgggtgggggtgcaggatttcgtgctgctggagaacttcaccagcgaggccgccgactcggaccgatg

SEQ ID NO: 12164 - DNA, 203 bp, Artificial sequence
  synthetic
ggcgcgccagtcctgcgcatgccgcgggcagcggagcgggcgccaggccggccgggcaggatgcgctaccgggcgtcggccctgggcagtcgaatctaaactcggaccatggagagtgcgctcaccgcccgtgaccgggtgggggtgcaggatttcgtgctgctggagaacttcaccagcgaggccgccgactcggaccgatg

SEQ ID NO: 12165 - DNA, 203 bp, Artificial sequence
  synthetic
ggcgcgccagtcctgtgtttagcgcgggcagcggagcgggcgccaggccggccgggcaggatgcgctaccgggcgtttcgatgcccatacgacggggttcgggtgaccatggagagtgcgctcaccgcccgtgaccgggtgggggtgcaggatttcgtgctgctggagaacttcaccagcgaggccgccgactcggaccgatg

SEQ ID NO: 12166 - DNA, 203 bp, Artificial sequence
  synthetic
ggcgcgccagtcctgggtaaggcgcgggcagcggtctaattttgcaaacggccgggcaggatgcgctaccgggcgtcggccctgggcagtgacggggttcgggtgaccatggagagtgcgctcaccgcccgtgaccgggtgggggtgcaggatttcgtgctgctggagaacttcaccagcgaggccgccgactcggaccgatg

SEQ ID NO: 12167 - DNA, 203 bp, Artificial sequence
  synthetic
ggcgcgccagtcctcgtgtcatcgcggggaggggagggcgttagccagcgtggcgctggctcccggaatatggagccctgggcgcgggggcggcgtgtcaggtggttgcggagctggtaagaatcatattctaagaactcagccacgttaccgctttgattggtgctgggtcctgaacagaagatgtccgactcggaccgatg

SEQ ID NO: 12168 - DNA, 203 bp, Artificial sequence
  synthetic
ggcgcgccagtccttgcttgtgcgcggggaggggagggcgttagccagcgtggcgctggctcccggaatatggagccctgggcgcgggggcggcgtgtcaggtggttgcggagctggtaagaatcatattctaagaactcagccactcaggtatccaccatggtgctgggtccttgcggagttccaaacgactcggaccgatg

SEQ ID NO: 12169 - DNA, 203 bp, Artificial sequence
  synthetic
ggcgcgccagtcctggaggcagcgcggggaggggagggcgttagccagttattgttgtcaagccggaatatggagccctgggcgcgggggcggcgtgtcaggtggttgcggagctggtaagaatcatattctaagaactcagccactcaggtatccaccatggtgctgggtcctgaacagaagatgtccgactcggaccgatg

SEQ ID NO: 12170 - DNA, 203 bp, Artificial sequence
  synthetic
ggcgcgccagtcctcgcaatcgcgcggggaggggttaaataggtgagacgtggcgctggctcccggaatatggagccctgggcgcgggggcggcgtgtcaggtggttgcggagctggtaagaatcatattctaagaactcagccactcaggtatccaccatggtgctgggtcctgaacagaagatgtccgactcggaccgatg

SEQ ID NO: 12171 - DNA, 203 bp, Artificial sequence
  synthetic
ggcgcgccagtcctccgtggtgcgcggtaagcgcgacgaatgttcaggagctaaccgcacccggttcagctcgcctttcttggccagaggcgccggttggactcacgggcggggcatgatggtggtgggtacgggcacctcgctggcgctctcctccctcctgtccctgctgctctttgctgggatgccgactcggaccgatg

SEQ ID NO: 12172 - DNA, 203 bp, Artificial sequence
  synthetic
ggcgcgccagtcctcttcagatcgcggtaagcgctgacgcatgcgcatagctaaccgcacccggttcagctcgcctgcacctcggtcaggcgccggttggactcacgggcggggcatgatggtggtgggtacgggcacctcgctggcgctcgttctattcctgtccctgctgctctttgctgggatgccgactcggaccgatg

SEQ ID NO: 12173 - DNA, 203 bp, Artificial sequence
  synthetic
ggcgcgccagtcctcggcctcccgcggtaagcgctgacgcatgcgcatagctaaccgcacccggttcagctcgcctgcacctcggtcaggcgccggttggactcacgggcggggcatgatggtggtgggtacgggcacctcgctggcgctctcctccctcctgtccctgctgctctttgctgggatgccgactcggaccgatg

SEQ ID NO: 12174 - DNA, 203 bp, Artificial sequence
  synthetic
ggcgcgccagtcctgcgtaattcgcggtaagcgctgacgcatgcgcatagctaaccgcacccggttcagctcgcctttcttggccagaggcgccggttggactcacgggcggggcatgatggtggtgggtacataattaatttcaacgctctcctccctcctgtccctgctgctctttgctgggatgccgactcggaccgatg

SEQ ID NO: 12175 - DNA, 203 bp, Artificial sequence
  synthetic
ggcgcgccagtccttcaacctacgcggtaagcgctgacgcatgcgcatagctaaccgcacccggttcagctcgcctttcttggccagaggcgccggttggactcacgggcggggcatgatggtggtgggtacgggcacctcgctggcgctcgttctattcctgtccctgctgctctttgctgggatgccgactcggaccgatg

SEQ ID NO: 12176 - DNA, 203 bp, Artificial sequence
  synthetic
ggcgcgccagtcctaggcgtaccgcggtaagcgctgacgcatgcgcatagctaaccgcacccggttcagctcgcctttcttggccagaggcgccggttggactcacgggcggggcatgatggtggtgggtacgggcacctcgctggcgctctcctccctcctgtccctgctgctggagttcccctgctcgactcggaccgatg

SEQ ID NO: 12177 - DNA, 203 bp, Artificial sequence
  synthetic
ggcgcgccagtcctaaccgacgcgcggtaagcgctgacgcatgcgcatagctaaccgcacccggttcagctcgcctttcttggccagaggcgccggttggactcacgggcggggcatgatggtggtgggtacgggcacctcgctgggagcgatacgagctctgtccctgctgctctttgctgggatgccgactcggaccgatg

SEQ ID NO: 12178 - DNA, 203 bp, Artificial sequence
  synthetic
ggcgcgccagtcctgtgatacgcgcggtaagcgctgacgcatgcgcatagctaaccgcacccggttcagctcgcctttcttggccagaggtcagttgactgaaaacgggcggggcatgatggtggtgggtacgggcacctcgctggcgctctcctccctcctgtccctgctgctctttgctgggatgccgactcggaccgatg

SEQ ID NO: 12179 - DNA, 203 bp, Artificial sequence
  synthetic
ggcgcgccagtcctttcgtctgcgcggtaagcgctgacgcatgcgcatagctaaccgcacccttacgtatctctgattcttggccagaggcgccggttggactcacgggcggggcatgatggtggtgggtacgggcacctcgctggcgctctcctccctcctgtccctgctgctctttgctgggatgccgactcggaccgatg

SEQ ID NO: 12180 - DNA, 203 bp, Artificial sequence
  synthetic
ggcgcgccagtcctttcatgttcgcggtaagcgctgacgcatgcgcatgtgcgttgatgtttggttcagctcgcctttcttggccagaggcgccggttggactcacgggcggggcatgatggtggtgggtacgggcacctcgctggcgctctcctccctcctgtccctgctgctctttgctgggatgccgactcggaccgatg

SEQ ID NO: 12181 - DNA, 203 bp, Artificial sequence
  synthetic
ggcgcgccagtcctgacggcggcgctatactgaagacgaaacaaattttcgttgcatacccaataaaagattattatattgcatacccgtttttaataaaatacattgcataccctcttttaataaaaaatattgcatacgttgacgaaacaaattttcgttgcatacccaataaaagattattatatcgactcggaccgatg

SEQ ID NO: 12182 - DNA, 203 bp, Artificial sequence
  synthetic
ggcgcgccagtcctcaggaaatcgctcagcagggacgtatgacactccagctctgtggtatctgattgttgttgaaccgtctctaagacggtgatactataagtcgtggtttgtgtgtttgtttgttaccttgtgtttgttcgtcacttgtcgacagcgccctgcgaattggtgtacccacaccgcgccgactcggaccgatg

SEQ ID NO: 12183 - DNA, 203 bp, Artificial sequence
  synthetic
ggcgcgccagtccttccgacggcgctcagcaggggacgccctggtctgagctctgtggtatcaaggaagctgctcgccgtctctaagacggtgatactataagtcgtggtttgtgtgtttgtttgttaccttgtgtttgttcgtcacttgtcgacagcgccctgcgaattggtgtacccacaccgcgccgactcggaccgatg

SEQ ID NO: 12184 - DNA, 203 bp, Artificial sequence
  synthetic
ggcgcgccagtccttcatgtaccgctcagcaggggacgccctggtctgagctctgtggtatctgattgttgttgaaccgtctctaagacgaacgacgacggttacgtggtttgtgtgtttgtttgttaccttgtgtttgttcgtcacttgtcgacagcgccctgcgaattggtgtacccacaccgcgccgactcggaccgatg

SEQ ID NO: 12185 - DNA, 203 bp, Artificial sequence
  synthetic
ggcgcgccagtccttatgcttccgctcagcaggggacgccctggtctgagctctgtggtatctgattgttgttgaaccgtctctaagacggtgatactataagtcgtggtttgtgtgtttgtttgttaccttgtgtttgttcgtcacttgtcgacagcgcaagatcggggtacttacccacaccgcgccgactcggaccgatg

SEQ ID NO: 12186 - DNA, 203 bp, Artificial sequence
  synthetic
ggcgcgccagtccttgaatgtacgctcagcaggggacgccctggtctgagctctgtggtatctgattgttgttgaatgcggggagcacacgtgatactataagtcgtggtttgtgtgtttgtttgttaccttgtgtttgttcgtcacttgtcgacagcgccctgcgaattggtgtacccacaccgcgccgactcggaccgatg

SEQ ID NO: 12187 - DNA, 203 bp, Artificial sequence
  synthetic
ggcgcgccagtcctatgacctacgctcattctaaggcgggctcttgggtcttttttagcgccatctgctcgcggcgccgcctcctgctcctcccgctgctgctgccgctgccgccctgagtcactgcctgcgcagctccggccgcctggctccccatactagtcgccgatatttggagttcttacaaccgactcggaccgatg

SEQ ID NO: 12188 - DNA, 203 bp, Artificial sequence
  synthetic
ggcgcgccagtcctgtctgagtcgctccggcaaccttgttgtggaacgtgcgcgcaggctgggctgcaggctctcggctgcagcgctgggtgtcttcaggcctatggagagcagcttgcgtgggctgggcctgcagtacctggtttgcatagatgattggcaggtggatctaggatccggcttccaaccgactcggaccgatg

SEQ ID NO: 12189 - DNA, 203 bp, Artificial sequence
  synthetic
ggcgcgccagtccttgtcccagcgctccggcaacgccaaccgctccgcgagttatcttacaagctgcaggctctcggctgcagcgctgggtgtcttcaggcctatggagagcagcttgcgtgggctgggcctgcagtacctggtttgcatagatgattggcaggtggatctaggatccggcttccaaccgactcggaccgatg

SEQ ID NO: 12190 - DNA, 203 bp, Artificial sequence
  synthetic
ggcgcgccagtcctgcatgtcgcgctccggcaacgccaaccgctccgctgcgcgcaggctgggctgcaggctctcgaaactgtgaggacctgtcttcaggcctatggagagcagcttgcgtgggctgggcctgcagtacctggtttgcatagatgattggcaggtggatctaggatccggcttccaaccgactcggaccgatg

SEQ ID NO: 12191 - DNA, 203 bp, Artificial sequence
  synthetic
ggcgcgccagtcctgcccttagcgctccggcaacgccaaccgctccgctgcgcgcaggctgggctgcaggctctcggctgcagcgctgggtgtcttcaggcctatggagagcagcttgcgtgggctgggcctgcagtacctggtttagcagctaatgactcaggtggatctaggatccggcttccaaccgactcggaccgatg

SEQ ID NO: 12192 - DNA, 203 bp, Artificial sequence
  synthetic
ggcgcgccagtccttctatatccgctccggcaacgccaaccgctccgctgcgcgcaggctgggctgcaggctctcggctgcagcgctgggtgtcttcaggcctatggagagcagcttgcgtgggctgggcctgcagtacctggtttgcatagatgattggttaccaagaaccttatccggcttccaaccgactcggaccgatg

SEQ ID NO: 12193 - DNA, 203 bp, Artificial sequence
  synthetic
ggcgcgccagtccttattaagtcgctccggcaacgccaaccgctccgctgcgcgcaggctgggctgcaggctctcggctgcagcgctgggtgtcttcaggcctatggagagcagcttgtcctcatattctaagcagtacctggtttgcatagatgattggcaggtggatctaggatccggcttccaaccgactcggaccgatg

SEQ ID NO: 12194 - DNA, 203 bp, Artificial sequence
  synthetic
ggcgcgccagtcctaggctcttcgctccggcaacgccaaccgctccgctgcgcgcaggctggtgactttatgaaatgctgcagcgctgggtgtcttcaggcctatggagagcagcttgcgtgggctgggcctgcagtacctggtttgcatagatgattggcaggtggatctaggatccggcttccaaccgactcggaccgatg

SEQ ID NO: 12195 - DNA, 203 bp, Artificial sequence
  synthetic
ggcgcgccagtcctcgataacgcgctcctagagctcgggccgtggctccaactttggccaaccttttggctccgagggcagtcgctgggcttccgagaggggttcgggctgcgtaggggcgctttgttttgttcggttttgtttttttgagagtgcgagagaggcggtcgtgcagacccgggagaaagcgactcggaccgatg

SEQ ID NO: 12196 - DNA, 203 bp, Artificial sequence
  synthetic
ggcgcgccagtcctattggacccgctcctagagctcgggccgtggctcgtcggggtctgtgtcttttggctccgagggcagtcgctgggcttccgagaggggttcgggctgcgtaggggcgctttgttttgttcggttttgtttttaaattgacttataggaggcggtcgtgcagacccgggagaaagcgactcggaccgatg

SEQ ID NO: 12197 - DNA, 203 bp, Artificial sequence
  synthetic
ggcgcgccagtcctccaacggccgctcctagagctcgggccgtggctcgtcggggtctgtgtcttttggctccgagggcagtcgctgggcttccgagaggggttcgggctgcgtaggggcgctttgttttgttcggttttgtttttttgagagtgcgagacgcctctagaccgtgacccgggagaaagcgactcggaccgatg

SEQ ID NO: 12198 - DNA, 203 bp, Artificial sequence
  synthetic
ggcgcgccagtcctggtttcggcgctcctagagctcgggccgtggctcgtcggggtctgtgtcttttggctccgagggcagtcgctgggcttccgagaggggttcgggctgcgtagggtgataggtagccactcggttttgtttttttgagagtgcgagagaggcggtcgtgcagacccgggagaaagcgactcggaccgatg

SEQ ID NO: 12199 - DNA, 203 bp, Artificial sequence
  synthetic
ggcgcgccagtccttcgagagacgctgggtaaccgaggaagccttaaaggccgcgaggaggagggaaaaggcgagcaaaaaggaagagtgggaggaggaggggaagcggcgaaggaggaagaggaggaggaggaagaggggagcacaaaggatccaggtctcccgacgggaggttaataccaagaacccgactcggaccgatg

SEQ ID NO: 12200 - DNA, 203 bp, Artificial sequence
  synthetic
ggcgcgccagtcctgctacggtcgctgggtaacctctatccgagccgcggccgcgaggaggacaacggctttcgaaaaaaaggaagagtgggaggaggaggggaagcggcgaaggaggaagaggaggaggaggaagaggggagcacaaaggatccaggtctcccgacgggaggttaataccaagaacccgactcggaccgatg

SEQ ID NO: 12201 - DNA, 203 bp, Artificial sequence
  synthetic
ggcgcgccagtcctaatcgaaccgctgggtaacctctatccgagccgcggccgcgaggaggagggaaaaggcgagcaaaaaggaagagtgggaggaggaggggaagcggcgaaggaggaagaggaggaggaggaagaggggagcacaaaggatccaggtctcccgacgggaggttaataccaagaacccgactcggaccgatg

SEQ ID NO: 12202 - DNA, 203 bp, Artificial sequence
  synthetic
ggcgcgccagtcctctggataacgctgggtaacctctatccgagccgctcatagccccgtatgggaaaaggcgagcaaaaaggaagagtgggaggaggaggggaagcggcgaaggaggaagaggaggaggaggaagaggggagcacaaaggatccaggtctcccgacgggaggttaataccaagaacccgactcggaccgatg

SEQ ID NO: 12203 - DNA, 203 bp, Artificial sequence
  synthetic
ggcgcgccagtcctcgaagatgcggcatgcactgacctggctttaatttcagggaagagtcgcgcccccggggagggagcagcactggcccattctgcagatggggacatcgagtcacgggctggctacgaactcctcgggggcgaaggtggcggagagggatgggttccaggacgtcctggcgcccgcgactcggaccgatg

SEQ ID NO: 12204 - DNA, 203 bp, Artificial sequence
  synthetic
ggcgcgccagtcctggcatgtccggcatgcactgcgggccgccgggcctcagggaagagtcgcgcccccggggagggagcagcactggcccattctgcagatggggacatcgagtcacgggctggctacgaactcctcgggggcgaaggtggcggagagggatgggttccaggatccaagattatgaacgactcggaccgatg

SEQ ID NO: 12205 - DNA, 203 bp, Artificial sequence
  synthetic
ggcgcgccagtcctttctaaaccggcatgcactgcgggccgccgggcctcagggaagagtcgcgcccccggggagggagcagcactggcccattctgcagatggggacatcgagtcacgggctggctacgaactcctcgggggcgagttgcaaatgtcctgatgggttccaggacgtcctggcgcccgcgactcggaccgatg

SEQ ID NO: 12206 - DNA, 203 bp, Artificial sequence
  synthetic
ggcgcgccagtcctcacgtcagcggccccgcccccgccgttcgcgctccactgttagattccagccagcccccgaccccgggccacctgggcccccgggttccgccggcactctcgccaccaccgcgtgggtctgacaagatgtaccaggtcccactaccactggatcgggatgggaccctggtacggcgactcggaccgatg

SEQ ID NO: 12207 - DNA, 203 bp, Artificial sequence
  synthetic
ggcgcgccagtcctgctaagtacggccccgcccccgccgttcgcgctctgaccagcccgcagagccagcccccgaccccgggccacctgggcccccgggttccgagctgtggtattggaccaccgcgtgggtctgacaagatgtaccaggtcccactaccactggatcgggatgggaccctggtacggcgactcggaccgatg

SEQ ID NO: 12208 - DNA, 203 bp, Artificial sequence
  synthetic
ggcgcgccagtcctaaccagatcggccccgcccccgccgttcgcgctctgaccagcccgcagagccagcccccgaccccgggccacctgggcccccgggttccgccggcactctcgccaccaccgcgtgggtctgacaagatgtaccaggtcccactacccactccagccttaaggaccctggtacggcgactcggaccgatg

SEQ ID NO: 12209 - DNA, 203 bp, Artificial sequence
  synthetic
ggcgcgccagtccttctctagtcggccccgcccccgccgttcgcgctctgaccagcccgcagcatgtcaattaaggcccgggccacctgggcccccgggttccgccggcactctcgccaccaccgcgtgggtctgacaagatgtaccaggtcccactaccactggatcgggatgggaccctggtacggcgactcggaccgatg

SEQ ID NO: 12210 - DNA, 203 bp, Artificial sequence
  synthetic
ggcgcgccagtcctgtgttcgtcggcccgttaaatggccgccatgtgcttcccgaaggtcctctctgatgacatgaagaagctgaaggcccgaatgcaccaggccatagaaagattttatgataaaatgcaaaatgcagaatcaggacgtggacaggacgacttcaaagagggctacctggagacagtcgactcggaccgatg

SEQ ID NO: 12211 - DNA, 203 bp, Artificial sequence
  synthetic
ggcgcgccagtcctcgcagaatcggcgcggcaaattgcaacagtttggaagcaagtgctgtgtgtcctagtctaagggtttcgtgttccgtcacgagattccattctacaaacgccttactcgaggttccgtctcgtgtttgtgtggaagcaaagttctgtctttgtggaaaccagtaactgttcctacgactcggaccgatg

SEQ ID NO: 12212 - DNA, 203 bp, Artificial sequence
  synthetic
ggcgcgccagtccttcatagtgcggcggcggtagattagggccgcgggtcggagcactcaccgccgctgggggaccctgtcggaagcaactgccgccgccgcctctttcatctcttctggggcaggggccagccgtgctgcgccgccatccataagtagacctttttggagcctcaccagccaattcacgactcggaccgatg

SEQ ID NO: 12213 - DNA, 203 bp, Artificial sequence
  synthetic
ggcgcgccagtcctgaggcacccggcggcggtagattagggccgcgggtcggagcactcaccgccgctgggggacctgtaacatgagggatgccgccgccgcctctttcatctcttctggggcaggggccagggccaggttttacacatccataagtagacctttttggagcctcaccagccaattcacgactcggaccgatg

SEQ ID NO: 12214 - DNA, 203 bp, Artificial sequence
  synthetic
ggcgcgccagtcctttaggttccggctcccagggttttaaaaaatgtggggagccctggaggcgcagccccaccccggccggcgcggctcgctcccacgcccccgccgcggcctcgctggagcggacggactgagtcagagggggcgccagcgctgcaggagctgacatggacccaaatcctcgggcccgactcggaccgatg

SEQ ID NO: 12215 - DNA, 203 bp, Artificial sequence
  synthetic
ggcgcgccagtcctaacctcctcggctctccgcgccttcttttctccgcgcgcccggcgcgaagcctgcgattcgtgagccgagcgcagagcgcagagccgagtggcgcacgctgggcagtggcctgggcaaccccaaacgcagccagagccctcacccgagtccgctggcccgcgcactcccggacccgactcggaccgatg

SEQ ID NO: 12216 - DNA, 203 bp, Artificial sequence
  synthetic
ggcgcgccagtcctggttccctcggctctccgcgccttcttttctccgcgcgcccggcgcgaagcctgcgattcgtgagccgagcgcagagcgcagagccgagtggcgcacgctgggcagtggcctgggcaaccccaaacgcagccagagccctcacccgagtccgctggcccgcggggaagaggacccgactcggaccgatg

SEQ ID NO: 12217 - DNA, 203 bp, Artificial sequence
  synthetic
ggcgcgccagtccttataacctcggctctccgcgctcctccctctccgcgcgcccggcgcgaagcctgcgattcgtatcgtagcaatctcgcgcagagccgagtggcgcacgctgggcagtggcctgggcaaccccaaacgcagccagagccctcacccgagtccgctggcccgcgcactcccggacccgactcggaccgatg

SEQ ID NO: 12218 - DNA, 203 bp, Artificial sequence
  synthetic
ggcgcgccagtcctaagggcgtcggctctccgcgctcctccctctccgcgcgcccggcgcgaagcctgcgattcgtgagccgagcgcagagcgcagagccgagttcaatcgtgatattagtggcctgggcaaccccaaacgcagccagagccctcacccgagtccgctggcccgcgcactcccggacccgactcggaccgatg

SEQ ID NO: 12219 - DNA, 203 bp, Artificial sequence
  synthetic
ggcgcgccagtcctagatatcacggctctccgcgctcctccctctccgcgcgcccggcgcgaagcctgcgattcgtgagccgagcgcagattcggacctatgcgggcgcacgctgggcagtggcctgggcaaccccaaacgcagccagagccctcacccgagtccgctggcccgcgcactcccggacccgactcggaccgatg

SEQ ID NO: 12220 - DNA, 203 bp, Artificial sequence
  synthetic
ggcgcgccagtcctttgctaaccggctctgggtggccgaggcggcagctgcgcggcggcaccggggcggctgcggcgcgctcggagccccattttgctagcagacgggcagctcggtgtgcgcccccgcgagagccggggccccaggcccgccggacaccatgaaccacctgaacgtgctggccaaagcgactcggaccgatg

SEQ ID NO: 12221 - DNA, 203 bp, Artificial sequence
  synthetic
ggcgcgccagtcctctatcttccggctgcctggtccgccggaggaccacggctcgccagggctgcggaggaccgaccgtccccacgcctgccgccccgcgaccccgaccgccagcatgatcgccgcgcagctcctggcctattacttcacggagctgaaggatgaccaggtcaaaaagattgacaagtcgactcggaccgatg

SEQ ID NO: 12222 - DNA, 203 bp, Artificial sequence
  synthetic
ggcgcgccagtcctgcgcactacgggaaaagaccaacagaaagacttgaccctcttaggtgtcatacctaagatcagtgtgttttttgtgtccaattcttttatcaccaaaaaagagaagaaatattgcagtgaatgaagattcctctgcattttagcactgctttttcaactgtagttggcttttgacgactcggaccgatg

SEQ ID NO: 12223 - DNA, 203 bp, Artificial sequence
  synthetic
ggcgcgccagtccttacctgcgcgggactcctgctcctcacttgtgtccccaatggggctagctcgggtccacaacagctgccgatcaatggggtctttgtctttgtttcatgggtgtccagattttatcaattaaagcctgtgggaactgccagctcggcaagaggtaggcttggtctgcgccgatacgactcggaccgatg

SEQ ID NO: 12224 - DNA, 203 bp, Artificial sequence
  synthetic
ggcgcgccagtcctgcaccagtcgggagctttccggagctgctggtactcccgattggagacgtagaaccgttactctagtgcacggggcgcggccgccgtgaccctctcggggatcccacgatgttcttctacctgagcaagaaaatttccattcccaataacgtgaagctgcagtgtgtatcctggcgactcggaccgatg

SEQ ID NO: 12225 - DNA, 203 bp, Artificial sequence
  synthetic
ggcgcgccagtcctgtttctggcgggagctttccggagctgctggtactcccgattggagacgtagaaccgttacttgtcgagggccttagcggccgccgtgaccctctcggggatcccacgatgttcttctacctgagcaagaaaatttccattcccaataacgtgaagctgcagtgtgtatcctggcgactcggaccgatg

SEQ ID NO: 12226 - DNA, 203 bp, Artificial sequence
  synthetic
ggcgcgccagtccttttctgcacgggagctttccggagctgctggtactcccgattggagacgtagaaccgttacttgtcgagggccttagcggccgccgtgaccctctcggggatcccacgatgttcttctacctgagcaagaaaatttccattcccaataacgtgaagctgcttccatccgaagaccgactcggaccgatg

SEQ ID NO: 12227 - DNA, 203 bp, Artificial sequence
  synthetic
ggcgcgccagtcctcctctccgcgggagctttccggagctgctggtactcccgattggagacgtagaaccgttacttgtcgagggccttagcggccgccgtgaccctctcggggatcccacgatgttcttctacctgagcaagaaatgactagcaattggtaacgtgaagctgcagtgtgtatcctggcgactcggaccgatg

SEQ ID NO: 12228 - DNA, 203 bp, Artificial sequence
  synthetic
ggcgcgccagtcctttctggaacgggagctttccggagctgctggtactcccgattggagacgtagaaccgttacttgtcgagggccttagcggccgccgtgaccctctcggggatcccacgatgttcttctcaagttcgcctcctatttccattcccaataacgtgaagctgcagtgtgtatcctggcgactcggaccgatg

SEQ ID NO: 12229 - DNA, 203 bp, Artificial sequence
  synthetic
ggcgcgccagtcctattagaaacgggagggggaaggacccccaccgctgcccttcccggggaggcgggaaatgcatatccaggtatgttcccgcggcggcctacagccggggtagcccaagaaccttcgggtgagggcgggtggcattttcttttcctataccgatcatggcagtccttctgctcctacgactcggaccgatg

SEQ ID NO: 12230 - DNA, 203 bp, Artificial sequence
  synthetic
ggcgcgccagtccttacttcttcgggagggggaaggacccccaccgctgcccttcccggggaggcgggaaatgcatggggccacccagctccgcggcggcctacagccggggtagcccaagaaccttcgggtgagggcgggtggcattttcttttcctataccgatcatggcagtccttctgctcctacgactcggaccgatg

SEQ ID NO: 12231 - DNA, 203 bp, Artificial sequence
  synthetic
ggcgcgccagtccttggcgccgcgggagggggaaggacccccaccgctgcccttcccggggaggcgggaaatgcatggggccacccagctgtcacagccttcgaagccggggtagcccaagaaccttcgggtgagggcgggtggcattttcttttcctataccgatcatggcagtccttctgctcctacgactcggaccgatg

SEQ ID NO: 12232 - DNA, 203 bp, Artificial sequence
  synthetic
ggcgcgccagtcctaatccgagcgggagggggaattgtgtgtcagatggcccttcccggggaggcgggaaatgcatggggccacccagctccgcggcggcctacagccggggtagcccaagaaccttcgggtgagggcgggtggcattttcttttcctataccgatcatggcagtccttctgctcctacgactcggaccgatg

SEQ ID NO: 12233 - DNA, 203 bp, Artificial sequence
  synthetic
ggcgcgccagtcctcggcagcgcgggatgctgccttcccatatgaagcaatccttcaacaccgacttaggttcaattttctcatcatttactgttgtaattcaatcttactaaagttattccgatatttaagaaaaaataacctttatataatgtaacaatactattaagattatgatataggccagacgactcggaccgatg

SEQ ID NO: 12234 - DNA, 203 bp, Artificial sequence
  synthetic
ggcgcgccagtcctgtacgtaacgggcgcgcttccgcctgtgtggaggaaaccccacccaacggctgccacggcatggagaatggctccgcttctgttgcagctggcggtgctcggcgcggcgctggcggccgcagccctcgtactgatttccatcgttgcatttacaactgctacaaaaatgccagccgactcggaccgatg

SEQ ID NO: 12235 - DNA, 203 bp, Artificial sequence
  synthetic
ggcgcgccagtcctgttcataccgggcgcgcttccgcctgtgtggaggtgcgggattgggcgcaactagtgtaagaggagaatggctccgcttctgttgcagctggcggtgctcggcgcggcgctggcggccgcagccctcgtactgatttccatcgttgcatttacaactgctacaaaaatgccagccgactcggaccgatg

SEQ ID NO: 12236 - DNA, 203 bp, Artificial sequence
  synthetic
ggcgcgccagtcctcaaccacccgggcgcgcttccgcctgtgtggaggtgcgggattgggcgggctgccacggcataacagggaaaggttcttctgttgcagctggcggtgctcggcgcggcgctggcggccgcagccctcgtactgatttccatcgttgcatttacaactgctacaaaaatgccagccgactcggaccgatg

SEQ ID NO: 12237 - DNA, 203 bp, Artificial sequence
  synthetic
ggcgcgccagtccttcataaatcgggcgcgcttccgcctgtgtggaggtgcgggattgggcgggctgccacggcatggagaatggctccgcttctgttgcagctggcggtgctcggcggctgctgtttacaggcagccctcgtactgatttccatcgttgcatttacaactgctacaaaaatgccagccgactcggaccgatg

SEQ ID NO: 12238 - DNA, 203 bp, Artificial sequence
  synthetic
ggcgcgccagtcctcgctcgcccgggctgagtaaatgcaggatgaaataccgaaacgcggtctttctctagacgcgtcttgctgggagagtgtccgttgcttcccgtccgtgtcgcggccctgcggttggcggcctcctcgtggagcggagcaaggccaggcggcccctgctcgagtcccgcgtcgcccgactcggaccgatg

SEQ ID NO: 12239 - DNA, 203 bp, Artificial sequence
  synthetic
ggcgcgccagtcctgagtgacgcgggctgagtaataaattccccccgcaccgaaacgcggtctttctctagacgcgtcttgctgggagaggacttcgactaattcgtccgtgtcgcggccctgcggttggcggcctcctcgtggagcggagcaaggccaggcggcccctgctcgagtcccgcgtcgcccgactcggaccgatg

SEQ ID NO: 12240 - DNA, 203 bp, Artificial sequence
  synthetic
ggcgcgccagtcctactgtaagcgggctgagtaataaattccccccgcaccgaaacgcggtctttctctagacgcgtcttgctgggagagtgtccgttgcttcccgtccgtgtcgcggccctgcggttggcggcctcctcgtggagcggagcaaggccagttttagaactactaagtcccgcgtcgcccgactcggaccgatg

SEQ ID NO: 12241 - DNA, 203 bp, Artificial sequence
  synthetic
ggcgcgccagtcctctggaaggcgggctgagtaataaattccccccgcaccgaaacgcggtctttctctagacgcgtcttgctgggagagtgtccgttgcttcccgtccgtgtcgcggccctgcggttggcggcctcctcgtggagttccaattataatagcggcccctgctcgagtcccgcgtcgcccgactcggaccgatg

SEQ ID NO: 12242 - DNA, 203 bp, Artificial sequence
  synthetic
ggcgcgccagtccttcgggcttcgggctgagtaataaattccccccgccatttgctaatcattttctctagacgcgtcttgctgggagagtgtccgttgcttcccgtccgtgtcgcggccctgcggttggcggcctcctcgtggagcggagcaaggccaggcggcccctgctcgagtcccgcgtcgcccgactcggaccgatg

SEQ ID NO: 12243 - DNA, 203 bp, Artificial sequence
  synthetic
ggcgcgccagtcctgacgataacggggagctttctggcgcccgaacagggacctgaaagcgaaagggaaaccagaggagctctctcgacgcaggactcggcttgctgaagcgcgcacggcaagaggcgaggggcggcgactggtgagtacgccaaaaattttgactagcggaggctagaaggagagagcgactcggaccgatg

SEQ ID NO: 12244 - DNA, 203 bp, Artificial sequence
  synthetic
ggcgcgccagtccttgtattcccggtgcctaaggccgcgctgccgggctcgagcggaggcggcgcaggcgctgaggctggcgcggagcggctagaactagcgtagtgcggaaagcgctaggtccagccctgctgggagttttctgccacacagatttgcggaagaacctgaccgtggacgagggcacccgactcggaccgatg

SEQ ID NO: 12245 - DNA, 203 bp, Artificial sequence
  synthetic
ggcgcgccagtccttcggcccacggtggaaaggtccattgcaatccctccaggaagcggccgcatgctgacattagtccatagacggctccccccggtggatcccgtggcgattcctgaaaaaagctgcatgcccaagaccagacgccagcgaactcgccgagcacgccgcaacagaccaccaacacccgactcggaccgatg

SEQ ID NO: 12246 - DNA, 203 bp, Artificial sequence
  synthetic
ggcgcgccagtcctccctgccgcggtggaaaggtccattgcaatccctccaggaagcggccggggcagccttgctcctggcgcgtcaactcccccggtggatcccgtggcgattcctgaaaaaagctgcatgcccaagaccagacgccagcgaactcgccgagcacgccgcaacagaccaccaacacccgactcggaccgatg

SEQ ID NO: 12247 - DNA, 203 bp, Artificial sequence
  synthetic
ggcgcgccagtcctgacagggtcggtggaaaggtccattgcaatccctccaggaagcggccggggcagccttgctctccatagacggctccccccggtggatcccgtggcgattcctgaaaaaagctgcatgcccaagaccagacgagtctcggagttatgagcacgccgcaacagaccaccaacacccgactcggaccgatg

SEQ ID NO: 12248 - DNA, 203 bp, Artificial sequence
  synthetic
ggcgcgccagtcctgaattaatcggtggaaaggtccattgcaatccctccaggaagcggccggggcagccttgctctccatagacggctccccccggtggatcccgtggcgattcctgaaaaaagctgcatgcccaagaccagacgccagcgaactcgccgagcacgccgcaacagaccaccaacacccgactcggaccgatg

SEQ ID NO: 12249 - DNA, 203 bp, Artificial sequence
  synthetic
ggcgcgccagtcctccgtccgccggtggaaaggtccattgcaatccctccaggaagcggccggggcagccttgctctccatagacggctccccccggtggatcccgtggcgattcctgttgtccttgcacatcccaagaccagacgccagcgaactcgccgagcacgccgcaacagaccaccaacacccgactcggaccgatg

SEQ ID NO: 12250 - DNA, 203 bp, Artificial sequence
  synthetic
ggcgcgccagtcctcgacggcacggtggaaaggtccattgcaatccctccaggaagcggccggggcagccttgctctccatagacggctcggattctgtctatacgtggcgattcctgaaaaaagctgcatgcccaagaccagacgccagcgaactcgccgagcacgccgcaacagaccaccaacacccgactcggaccgatg

SEQ ID NO: 12251 - DNA, 203 bp, Artificial sequence
  synthetic
ggcgcgccagtcctgggttgcgcggtggagtccatccttgcggagctcgccgcctgattctaggctggtcactactccgagcctgtgacgtttgcggcagccaggccgtcgacgatgcccagtgaaactctctgggaaattgcaaaagctgaagtggaaaaaaggggaattaatggaagtgaaggtgacgactcggaccgatg

SEQ ID NO: 12252 - DNA, 203 bp, Artificial sequence
  synthetic
ggcgcgccagtcctttcattaacggtgttcctggcctcggcgctccggactcccaagtctccgccggaccctcctttggatattcctcgtgtctccgattctgagacagagggggaagacggtggggcctccccacctgccccgcagaagatgcagttctttggccgcctggtcaataccttcagtggcgactcggaccgatg

SEQ ID NO: 12253 - DNA, 203 bp, Artificial sequence
  synthetic
ggcgcgccagtcctcaaatcggcggttgcgggactattttgcaaatattttgagagacattgatttttctccccgtgctcccccgttcttccctgcggagtgcgctgcgccgcccagccctgtcgccccccggaggtgatccctccctcctgcctgcccgccagcctgacctgtgcccggctcgcgggcgactcggaccgatg

SEQ ID NO: 12254 - DNA, 203 bp, Artificial sequence
  synthetic
ggcgcgccagtccttattccgacgtagagggggttacgcgggtggctggacctacatgcttcctgctgtggctgtctcggaacccgtggtcctccgcttcatgattttctgccgtctcttggcaaaaatggcaaataatgatgctgttctgaagagactggagcagaagggtgcagaggcagatcaaacgactcggaccgatg

SEQ ID NO: 12255 - DNA, 203 bp, Artificial sequence
  synthetic
ggcgcgccagtccttggtggttcgtatattgtcgagcacagacagattgacctattggggtgtttcgcgagtgtgagagggaagcgccgcggcctgtatttctagacctgcccttcgcctggttcgtggcgccttgtgaccccgggcccctgccgcctgcaagtcggaaattgcgctgtgctcctgtgcgactcggaccgatg

SEQ ID NO: 12256 - DNA, 203 bp, Artificial sequence
  synthetic
ggcgcgccagtcctataccggccgtattcaacaaggggctgaaggatgcccagaaggtaccccattgtatgggatctgatctggggcctcggtgcacatgctttacatgtgtttagtcgaggttaaaaaacgatagtagtagtgctaccacggggacgtggttttcctttgaaaaacacgatgataatcgactcggaccgatg

SEQ ID NO: 12257 - DNA, 203 bp, Artificial sequence
  synthetic
ggcgcgccagtcctggcgaagacgtattcaacaaggggctgaaggatgcccagaaggtaccccattgtatgggatctgatctggggcctcggtgcacatgctttacatgtgtttagtcgaggttaaaaaacgtctaggccccccgaaccacggggacgtggttttcctttgaaaaacacgatgataatcgactcggaccgatg

SEQ ID NO: 12258 - DNA, 203 bp, Artificial sequence
  synthetic
ggcgcgccagtcctcgtagggccgtattcaacaatcatggcccacgaccccagaaggtaccccattgtatgggatctgatctggggcctcggtgcacatgctttacatgtgtttagtcgaggttaaaaaacgtctaggccccccgaaccacggggacgtggttttcctttgaaaaacacgatgataatcgactcggaccgatg

SEQ ID NO: 12259 - DNA, 203 bp, Artificial sequence
  synthetic
ggcgcgccagtccttctggagccgtctatctaaggaaaacagggtgggagagctgcctctctttgaacctctcccaggaccaactctaacccagggaggcaaacttggtcgatgtaagcggtggcttggagacagaatcatctaatggaaaagatacactagaaggtgctggggatacatcagaggtgcgactcggaccgatg

SEQ ID NO: 12260 - DNA, 203 bp, Artificial sequence
  synthetic
ggcgcgccagtcctagtgaattcgtgctgttcccgccaattcctgtggcttgagcctagcgagcgagttccgcgctcaatggagacgtttgaccccaccgagctgcccgagctgcttaaactttattaccggaggctctttccctactctcagtactatcgctggctcaactacggtggagtgataaacgactcggaccgatg

SEQ ID NO: 12261 - DNA, 203 bp, Artificial sequence
  synthetic
ggcgcgccagtcctacacgacccgtgctgttcccgccaattcctgtggtaatccttaccgtggcgagttccgcgctcaatggagacgtttatgggagaatctgagcccgagctgcttaaactttattaccggaggctctttccctactctcagtactatcgctggctcaactacggtggagtgataaacgactcggaccgatg

SEQ ID NO: 12262 - DNA, 203 bp, Artificial sequence
  synthetic
ggcgcgccagtccttagaactacgtgctgttcccgccaattcctgtggtaatccttaccgtggcgagttccgcgctcaatggagacgtttgaccccaccgagctgcccgagctgcttaaactttattaccgggacgcggccagtctctctcagtactatcgctggctcaactacggtggagtgataaacgactcggaccgatg

SEQ ID NO: 12263 - DNA, 203 bp, Artificial sequence
  synthetic
ggcgcgccagtcctttcttactcgtggtatgacagggtagcctggcagtgtcagaagtctgaacccagcatagtggtcagcaggcaggacgaatcacactgaatgcaaaccacagggtttcgcagcgtggtaaaagaaatcattgagtcccccgccttcagaagagggtgcattttcaggaggaagcgcgactcggaccgatg

SEQ ID NO: 12264 - DNA, 203 bp, Artificial sequence
  synthetic
ggcgcgccagtcctaacgatttcgtggtttgtgtcacgcgagacccgattgtgtttgttcgtcacttgtcgacagcgccctgcgaattggtgtacccacaccgcgcggcttgcgaataatactttggagagtcttttgcctccagtgtcttccgtttgtactcgtcctcctctccctctccggccgggcgactcggaccgatg

SEQ ID NO: 12265 - DNA, 203 bp, Artificial sequence
  synthetic
ggcgcgccagtccttgagtgatcgtggtttgtgtgtttgtttgttaccggtatagcaaaaagcacttgtcgacagcgccctgcgaattggtgtacccacaccgcgcggcttgcgaataatactttggagagtcttttgcctccagtgtcttccgtttgtactcgtcctcctctccctctccggccgggcgactcggaccgatg

SEQ ID NO: 12266 - DNA, 203 bp, Artificial sequence
  synthetic
ggcgcgccagtcctaccatcaacgtggtttgtgtgtttgtttgttaccttgtgtttgttcgtcacttgtcgacagcgccctgcgaattggcccggatgaggttggcggcttgcgaataatactttggagagtcttttgcctccagtgtcttccgtttgtactcgtcctcctctccctctccggccgggcgactcggaccgatg

SEQ ID NO: 12267 - DNA, 203 bp, Artificial sequence
  synthetic
ggcgcgccagtcctagctgcggcgtggtttgtgtgtttgtttgttaccttgtgtttgttcgtcacttgtcgacagcgccctgcgaattggtgtacccacaccgcgcggcttgcgaataatactttggagagtcttttgcctccagtgtcttccgtttgtactcgtcctcctctcttcaatgcttaccacgactcggaccgatg

SEQ ID NO: 12268 - DNA, 203 bp, Artificial sequence
  synthetic
ggcgcgccagtcctcttatgtgcgtggtttgtgtgtttgtttgttaccttgtgtttgttcgtcacttgtcgacagcgccctgcgaattggtgtacccacaccgcgcggcttgcgaataatactttggagagtcttttgcctccagtgtcttccgtttgtatagaagagaaaagtcctctccggccgggcgactcggaccgatg

SEQ ID NO: 12269 - DNA, 203 bp, Artificial sequence
  synthetic
ggcgcgccagtcctcctaaaggcgtgtgaggtctactggtttgctactttaccaactggtcccaggaccggcaggaaccaggaaaattcacccctgagaatattgaccccttcctatgctctcatctcatctattcattcgccagcatcgaaaacaacaaggttatcatcaaggacaagagtgaagtgcgactcggaccgatg

SEQ ID NO: 12270 - DNA, 203 bp, Artificial sequence
  synthetic
ggcgcgccagtccttcgttatacgttccctccctccggcgagggccgcctttataacaactgctcagagtgcgagggcgggatagctgtccaaggtctcccccaaggaatgtccctaagcctgctgccctcttgcgcgcgggaagcagcaccaagttcacggccaacgccttggcactagggtccagacgactcggaccgatg

SEQ ID NO: 12271 - DNA, 203 bp, Artificial sequence
  synthetic
ggcgcgccagtcctattcaccccgttccctccctccggcgagggccgcctttataacaactgctcagagtgcgagggcgggatagctgtccaaggtctcccccagcactgaggagctcgcctgctgccctcttgcgcgcgggaagcagcaccaagttcacggccaacgccttggcactagggtccagacgactcggaccgatg

SEQ ID NO: 12272 - DNA, 203 bp, Artificial sequence
  synthetic
ggcgcgccagtcctaacttgtccgttccctccctccggcgagggccgcctttataacaactgctcagagtgcgagggcgggatagctgtccaaggtctcccccagcactgaggagctcgcctgctgccctcttgcgcgcgggaagccagcatgttaaacgggccaacgccttggcactagggtccagacgactcggaccgatg

SEQ ID NO: 12273 - DNA, 203 bp, Artificial sequence
  synthetic
ggcgcgccagtcctaggtattgcgttccctccctccggcgagggccgcctttataacaactgtgggacaacatgaagcgggatagctgtccaaggtctcccccagcactgaggagctcgcctgctgccctcttgcgcgcgggaagcagcaccaagttcacggccaacgccttggcactagggtccagacgactcggaccgatg

SEQ ID NO: 12274 - DNA, 203 bp, Artificial sequence
  synthetic
ggcgcgccagtcctttgcgctccgttcgccccacatttgcaatcttacgggaccgcggcccaggctgaagctcagggccctgtctgctctgtggactcaacagtttgtggcaagacaagctcagaactgagaagctgtcaccacagtagcttggagctcggcggcacaaccagcaccatctggtcgcgcgactcggaccgatg

SEQ ID NO: 12275 - DNA, 203 bp, Artificial sequence
  synthetic
ggcgcgccagtcctgtcctacacgttcgccccacctggtatagaaatcgggaccgcggcccaggctgaagctcagggccctgtctgctctgtggactcaacagtttgtggcaagacaagctcagaactgagaagctgtcaccacagtagcttggagctcggcggcacaaccagcaccatctggtcgcgcgactcggaccgatg

SEQ ID NO: 12276 - DNA, 203 bp, Artificial sequence
  synthetic
ggcgcgccagtcctaatttcatcgttcgccccagggaccggcaggcgggggaccgcggcccaggctgaagctcagggccctgtctgctctgtggactcaacagtacactaactccaccgctcagaactgagaagctgtcaccacagtagcttggagctcggcggcacaaccagcaccatctggtcgcgcgactcggaccgatg

SEQ ID NO: 12277 - DNA, 203 bp, Artificial sequence
  synthetic
ggcgcgccagtcctgacgcgtacgttcgccccagggaccggcaggcgggggaccgcggcccaggctgaagctcagggccctgtctgctctgtggactcaacagtttgtggcaagacaagctcagaactgagaagctgtcaccacagtagcttggagctcgctaattgcttattgaccatctggtcgcgcgactcggaccgatg

SEQ ID NO: 12278 - DNA, 203 bp, Artificial sequence
  synthetic
ggcgcgccagtcctacggattacgttcgccccagggaccggcaggcgggggaccgcggcccaggctgaagctcagggccctgtctgctctgtggactcaacagtttgtggcaagacaagctcagaactgagaagctgtcaccacagtagcttggagctcggcggcacaaccagcaccatctggtcgcgcgactcggaccgatg

SEQ ID NO: 12279 - DNA, 203 bp, Artificial sequence
  synthetic
ggcgcgccagtccttcatcggacgttcgccccagggaccggcaggcgggggaccgcggcccatctgtcgcggagttgccctgtctgctctgtggactcaacagtttgtggcaagacaagctcagaactgagaagctgtcaccacagtagcttggagctcggcggcacaaccagcaccatctggtcgcgcgactcggaccgatg

SEQ ID NO: 12280 - DNA, 203 bp, Artificial sequence
  synthetic
ggcgcgccagtcctaccggcagcgttcgccccagggaccggcaggcgggtaggtagtaagtgggctgaagctcagggccctgtctgctctgtggactcaacagtttgtggcaagacaagctcagaactgagaagctgtcaccacagtagcttggagctcggcggcacaaccagcaccatctggtcgcgcgactcggaccgatg

SEQ ID NO: 12281 - DNA, 203 bp, Artificial sequence
  synthetic
ggcgcgccagtcctagatcacccgttgccaagggtgaatctagactgggctgttctctgtgttaaaccaatcagttgcgaccttctcttaacagtgtgaagtgagggggtctctctccctccttctccttcctctgtgattcaccttcctttttaccctgccctgcggcggctccgccccttaccttccgactcggaccgatg

SEQ ID NO: 12282 - DNA, 203 bp, Artificial sequence
  synthetic
ggcgcgccagtcctcgatgcgcctaaaggtctcccctcccacctgcatgctggattcggtaatggcctcagcccttgccaactctgcctcttcccccgctgactgggcctctgcagagatgtgggcagctggtcaggatggccattcgggctcagcacagcaacgcagcccagactcagactggggaacgactcggaccgatg

SEQ ID NO: 12283 - DNA, 203 bp, Artificial sequence
  synthetic
ggcgcgccagtcctacaagaatctaaaggtctcccctcccacctgcattgctctacaatctgtggcctcagcccttgccaactctgcctccgtgaagatcataagggcctctgcagagatgtgggcagctggtcaggatggccattcgggctcagcacagcaacgcagcccagactcagactggggaacgactcggaccgatg

SEQ ID NO: 12284 - DNA, 203 bp, Artificial sequence
  synthetic
ggcgcgccagtcctgcttcttcctaaaggtctcccctcccacctgcattgctctacaatctgtggcctcagcccttgccaactctgcctcttcccccgctgactgggcctctgcagagatgtgggcagctggtcaggatggccattcgggctcagcacagtggaaagtagttttctcagactggggaacgactcggaccgatg

SEQ ID NO: 12285 - DNA, 203 bp, Artificial sequence
  synthetic
ggcgcgccagtcctttgtatcgctaaagtaccgctcctacaggtacccgcacgtaaccttcagagagtgcggatctgagtaggagaccgtggtgcactgctttacagatgcagcccggtttaaaaagcgtctatgcccctacagggtagcggtgggccgcgccctttccttttaaaactacttgttctcgactcggaccgatg

SEQ ID NO: 12286 - DNA, 203 bp, Artificial sequence
  synthetic
ggcgcgccagtcctactatgacctaacatatgtcatggaggtggcagcgggtaccgagtggcggctgcagcagcgactcctctgagctgagtttgaggccgtccccgactccttcctcccccttccctcccccttttttttgttttccgttcccctttcccctcccttccctatccccgacgaccggacgactcggaccgatg

SEQ ID NO: 12287 - DNA, 203 bp, Artificial sequence
  synthetic
ggcgcgccagtcctccttatctctaactttaggtccaggagtgcgatcgcctgcggatctgcagctgggcaccggccgcaacgcccgccccgcgacggcagggaataaaggctcagggaccggcagttctactctagagcccaccagcctctcagagcctccggtgactggcctgtgtctccccctggcgactcggaccgatg

SEQ ID NO: 12288 - DNA, 203 bp, Artificial sequence
  synthetic
ggcgcgccagtcctcatcccacctacaggggagtaactcgaggaggcgaaagtcctggagcctccagagggctgtcggcgcagtagcagcgagcagcagagtccgcacgctccggcgaggggcagaagagcgcgagggagcgcggggcagcagaagcgagagccgagcgcggacccagccaggacccacgactcggaccgatg

SEQ ID NO: 12289 - DNA, 203 bp, Artificial sequence
  synthetic
ggcgcgccagtcctgtattcacctacaggggagttttgttgaagttgcaaagtcctggagcccgagagaacgaaatggcgcagtagcagcgagcagcagagtccgcacgctccggcgaggggcagaagagcgcgagggagcgcggggcagcagaagcgagagccgagcgcggacccagccaggacccacgactcggaccgatg

SEQ ID NO: 12290 - DNA, 203 bp, Artificial sequence
  synthetic
ggcgcgccagtcctgcaattccctacaggggagttttgttgaagttgccctcaatccccaaatccagagggctgtcggcgcagtagcagcgagcagcagagtccgcacgctccggcgaggggcagaagagcgcgagggagcgcggggcagcagaagcgagagccgagcgcggacccagccaggacccacgactcggaccgatg

SEQ ID NO: 12291 - DNA, 203 bp, Artificial sequence
  synthetic
ggcgcgccagtcctatatccttctacctattaaatattgccaaagggaaaaaggatagcccaaaggacaagaaaacacttctcactatgaattggtttggaagtaacttcttcaggtgtcctgaggatctttccttactcaacatatactcacctctgttgtcacacatgtcatctgaagatgaacatcgactcggaccgatg

SEQ ID NO: 12292 - DNA, 203 bp, Artificial sequence
  synthetic
ggcgcgccagtcctcctctggactaccttggctggattttggttacgctataattgtaactgttttctgtttggacaacatcaaaaacatccattgcacaatggggcagttcattagcttcatgcaagaaataccaacctttttgcaggaggctctgaacattgctcttgttgcagtcagtctcattgcgactcggaccgatg

SEQ ID NO: 12293 - DNA, 203 bp, Artificial sequence
  synthetic
ggcgcgccagtcctttgcgtgtctactagatgaaccggtgccaggttcttggagctgtgaggtgttcagcattatttaagatcacctatgcatcatctgaagccacagtcccaggtcatcttcatcaccttccccagtggaatgcctcctgtgttaaagcccacaacaacccctgtggaggaacaacccgactcggaccgatg

SEQ ID NO: 12294 - DNA, 203 bp, Artificial sequence
  synthetic
ggcgcgccagtcctaggatagactagactagcacgcagcgggcgggcactttgcactggaacttacaacacccgagcaaggacgcgactctcccgacgcggggaggctattctgcccatttggggacacttccccgccgctgccaggacccgcttctctgaaaggctctccttgcagctgcttagacgcgactcggaccgatg

SEQ ID NO: 12295 - DNA, 203 bp, Artificial sequence
  synthetic
ggcgcgccagtccttcggcgtcctagatccccgcaagctaggccagctcctcccactgcctcccttcctctttctcctcctcttactcctcagggaaatatgtgtggctgtctacaggatgggggacaccctgagccccggacatggcaaccacagagagagcagcccttttctttcccccttggaggcgactcggaccgatg

SEQ ID NO: 12296 - DNA, 203 bp, Artificial sequence
  synthetic
ggcgcgccagtcctggatgcttctagatccccgcaagctaggccagctcctcccactgcctcccttcctctttctcctcctcttactcctttccagccagacctgaatatatctatccatgggggacaccctgagccccggacatggcaaccacagagagagcagcccttttctttcccccttggaggcgactcggaccgatg

SEQ ID NO: 12297 - DNA, 203 bp, Artificial sequence
  synthetic
ggcgcgccagtcctatatgaacctagatccccgcaagctaggccagctcctcccactgcctcccttcctctttctcctcctcttactcctttccagccagaccttggctgtctacaggatgggggacaccctgagccccggacatgcacgagtggacctcagcagcccttttctttcccccttggaggcgactcggaccgatg

SEQ ID NO: 12298 - DNA, 203 bp, Artificial sequence
  synthetic
ggcgcgccagtcctcgtgacgactagatccccgcaagctaggccagctcctcccactgcctcccttcctctttctcctcctcttactcctttccagccagaccttggctgtctacaggatgggggacaccctgagccccggacatggcaaccacagagagagcagcccttttctacgatagaacttttcgactcggaccgatg

SEQ ID NO: 12299 - DNA, 203 bp, Artificial sequence
  synthetic
ggcgcgccagtcctatgttgttctagatccccgcaagctaggccagctcctcccactgcctcccttcctctttctctcttaaaactcaagttccagccagaccttggctgtctacaggatgggggacaccctgagccccggacatggcaaccacagagagagcagcccttttctttcccccttggaggcgactcggaccgatg

SEQ ID NO: 12300 - DNA, 203 bp, Artificial sequence
  synthetic
ggcgcgccagtcctcgagcccgctagatccccgcaagctaggccagctcctcccactgcctctaagtgagcacgcgctcctcttactcctttccagccagaccttggctgtctacaggatgggggacaccctgagccccggacatggcaaccacagagagagcagcccttttctttcccccttggaggcgactcggaccgatg

SEQ ID NO: 12301 - DNA, 203 bp, Artificial sequence
  synthetic
ggcgcgccagtcctcaagcgatctagatccccgcctagccccgaccggcctcccactgcctcccttcctctttctcctcctcttactcctttccagccagaccttggctgtctacaggatgggggacaccctgagccccggacatggcaaccacagagagagcagcccttttctttcccccttggaggcgactcggaccgatg

SEQ ID NO: 12302 - DNA, 203 bp, Artificial sequence
  synthetic
ggcgcgccagtcctcagtacagctagattgtgtagggtcctttcttggataaacccgctcaatgcctggagatttgggcgtgcccccgcaagactgctagccgagtagtgttgggtcgcgaaaggccttgtggtactgcctgatagggtgcttgcgagtgccccgggaggtctcgtagaccgtgcacccgactcggaccgatg

SEQ ID NO: 12303 - DNA, 203 bp, Artificial sequence
  synthetic
ggcgcgccagtcctttggaatcctagtattgaaccgacactcactcgttacttggcatgtacacctgattagttagcccttgtggatacgccactgccgctcaggtacagtaggacataccccaaatattgggttccactcgtagagaagaaaattagtggcgaaacgtacggtttatgtcaaaggagcgactcggaccgatg

SEQ ID NO: 12304 - DNA, 203 bp, Artificial sequence
  synthetic
ggcgcgccagtcctacggttatctagtattgaactttagtgatgagtgtacttggcatgtacacctgattagttagcccttgtggatacgccactgccgctcaggtacagtaggacataccccaaatattggagcttggagaagaggaagaaaattagtggcgaaacgtacggtttatgtcaaaggagcgactcggaccgatg

SEQ ID NO: 12305 - DNA, 203 bp, Artificial sequence
  synthetic
ggcgcgccagtcctgcgatgcactagtattgaactttagtgatgagtgtacttggcatgtacacctgattagttagcccttgtggatacgccactgccgctcaggtacagtaggacatctgatggcggaaacgttccactcgtagagaagaaaattagtggcgaaacgtacggtttatgtcaaaggagcgactcggaccgatg

SEQ ID NO: 12306 - DNA, 203 bp, Artificial sequence
  synthetic
ggcgcgccagtcctccaaccagctagtcatcaaaccagggtaacagaggagggagctgggtcctgtttactcccagtcctgccgatgaggattctgaccgtagacactgaattgtcccgtacctatccgtgctctttctgtgttctcaccagggctgagctcgaactgccacctctgccagcaggacccgactcggaccgatg

SEQ ID NO: 12307 - DNA, 203 bp, Artificial sequence
  synthetic
ggcgcgccagtcctaggccaagctagtcgaatacccccaagtcctgcaaaggggtgcaagcctagttccaaccctgccgggctgaggcatgagtaggggctgtatttgcgtgcaggcgggcccccaaagcttccactcgctgccttaaaacgccaacccagcctctcagacaatgctgccctcccactcgactcggaccgatg

SEQ ID NO: 12308 - DNA, 203 bp, Artificial sequence
  synthetic
ggcgcgccagtcctcgttctacctataatcagtgcacctgggcaaacgacgcccacgtacggtccacgtcgcccttcaatgtctctcttgaccaataggcgtagccggcgagttgacaaggaccagtgggggccgggggcttggagagggactccaagtcccgcccttcccggtgggccgggaaatgccgactcggaccgatg

SEQ ID NO: 12309 - DNA, 203 bp, Artificial sequence
  synthetic
ggcgcgccagtcctctgtcagtctatcagcccgctttaattgcaaacacaaagcgactgttgttgtgcaattaaaggatagtgatattaatgaaatggtgcttagtcttgttaggagtggtaagttgcttgtaaggggtaatggcaagtgtttgagttttagtaatcatttagtctcaactaaataaacgactcggaccgatg

SEQ ID NO: 12310 - DNA, 203 bp, Artificial sequence
  synthetic
ggcgcgccagtcctaagaggatctatgagaatgatgatgatgctacagactaaaatatatcgggaggaatttaacaggatacttggacaatagaagccagatcaaaagtaagaaaaacttagggtgaatgacaattcacagatcagctcaaccagacaccaccagcatacacgaaaccaaccttcacacgactcggaccgatg

SEQ ID NO: 12311 - DNA, 203 bp, Artificial sequence
  synthetic
ggcgcgccagtcctgagtacctctatgagaatgatgatgatgctacagcggctgcagggataggaggaatttaacaggatacttggacaacttgctagttccgcaaagtaagaaaaacttagggtgaatgacaattcacagatcagctcaaccagacaccaccagcatacacgaaaccaaccttcacacgactcggaccgatg

SEQ ID NO: 12312 - DNA, 203 bp, Artificial sequence
  synthetic
ggcgcgccagtcctcggccgttctatgagaatgatgatgatgctacagcggctgcagggataggaggaatttaacaggatacttggacaatagaagccagatcaaaagtaagaaaaacttagggtgaatgacaattcacagatcagctcaaccagacaccaccagcatacacgaaaccaaccttcacacgactcggaccgatg

SEQ ID NO: 12313 - DNA, 203 bp, Artificial sequence
  synthetic
ggcgcgccagtcctgagcgcacctatgagaatgatgatgatgctacagcggctgcagggataggaggaatttaacaggatacttggacaatagaagccagatcaaaagtaagaaaaacttagggtgaatgactcgcttgtttctgtctcaaccagacaccaccagcatacacgaaaccaaccttcacacgactcggaccgatg

SEQ ID NO: 12314 - DNA, 203 bp, Artificial sequence
  synthetic
ggcgcgccagtcctgctgggcgctcaacaaaaagccaccgacattaagagagagagtattgctgcttagttaactgcaggccctatttagaccccataattcttatctgcaacagcattcctgtatcatccagggcaccggtggacttggtgaggattgagttgacctcatcattagagaccagactccgactcggaccgatg

SEQ ID NO: 12315 - DNA, 203 bp, Artificial sequence
  synthetic
ggcgcgccagtcctcacatacgctcaacaaaaagccaccgacattaagagagagagtattgctgcttagttaactgcaggccctatttagggttaccgcccaggatctgcaacagcattcctgtatcatccagggcaccggtggacttggtgaggattgacggtctaaatgtcgtagagaccagactccgactcggaccgatg

SEQ ID NO: 12316 - DNA, 203 bp, Artificial sequence
  synthetic
ggcgcgccagtcctagcttcccctcaacaaaaagccaccgacattaagagagagagtattgctgcttagttaactgcaggccctatttagggttaccgcccaggatctgcaacagcattcctgtatcatccagggcaccggtggacttggtgaggattgagttgacctcatcatacacataattgaagcgactcggaccgatg

SEQ ID NO: 12317 - DNA, 203 bp, Artificial sequence
  synthetic
ggcgcgccagtcctgagtaaacctcaacaaaaagccaccgacattaagagagagagtattgctgcttagttaactgtttaggaagaccctggttaccgcccaggatctgcaacagcattcctgtatcatccagggcaccggtggacttggtgaggattgagttgacctcatcattagagaccagactccgactcggaccgatg

SEQ ID NO: 12318 - DNA, 203 bp, Artificial sequence
  synthetic
ggcgcgccagtcctgtaatggactcaccgaggcgagtcgctgtgtgttcctgcctccggcgatgccgccccagcccctctgatggccctcctctctgctgccactcattccagaacaggaggcatgagcccggaacgcgcttgcttttaggagacagccactttctgtgtggtacgctggattcaaggcgactcggaccgatg

SEQ ID NO: 12319 - DNA, 203 bp, Artificial sequence
  synthetic
ggcgcgccagtcctgtagaggcctcaccgaggcgcacgcgcccagcaccctgcctccggcgatgccgccccagcccctctgatggccctcctctctgctgccactcattccagaacaggaggcatgagcccggaacgcgcttgcttgacacgtgattgttctttctgtgtggtacgctggattcaaggcgactcggaccgatg

SEQ ID NO: 12320 - DNA, 203 bp, Artificial sequence
  synthetic
ggcgcgccagtcctaaagacgactcaccgaggcgcacgcgcccagcaccctgcctccggcgatgccgccccagcccctctgatggccctcctctctgctgccactcattccagaacaggaggcatgagcccggaacgcgcttgcttttaggagacagccactttctgtgtggtacgctggattcaaggcgactcggaccgatg

SEQ ID NO: 12321 - DNA, 203 bp, Artificial sequence
  synthetic
ggcgcgccagtcctaaacagtgctcaccgaggcgcacgcgcccagcaccctgcctccggcgatgccgccccagcccctctgatggccctctggatgatctatcgtcattccagaacaggaggcatgagcccggaacgcgcttgcttttaggagacagccactttctgtgtggtacgctggattcaaggcgactcggaccgatg

SEQ ID NO: 12322 - DNA, 203 bp, Artificial sequence
  synthetic
ggcgcgccagtcctctgccgggctcaccgaggcgcacgcgcccagcaccctgcctccggcgatgccgccccagcccgatacgccatttatctctctgctgccactcattccagaacaggaggcatgagcccggaacgcgcttgcttttaggagacagccactttctgtgtggtacgctggattcaaggcgactcggaccgatg

SEQ ID NO: 12323 - DNA, 203 bp, Artificial sequence
  synthetic
ggcgcgccagtcctctaaatgtctcaccgaggcgcacgcgcccagcacgtcagaatgaatcctgccgccccagcccctctgatggccctcctctctgctgccactcattccagaacaggaggcatgagcccggaacgcgcttgcttttaggagacagccactttctgtgtggtacgctggattcaaggcgactcggaccgatg

SEQ ID NO: 12324 - DNA, 203 bp, Artificial sequence
  synthetic
ggcgcgccagtcctccagtggtctcagtgccagaggaggggattcccggcgccgggggacagagccccttttttctgggcatacgttcttctttctgctggggagcctcttgtgtccagcctaggcccgcgtgcagcgccgacggatgaccgtcttcttggcaagaaagtgaataaacttaattgagacgactcggaccgatg

SEQ ID NO: 12325 - DNA, 203 bp, Artificial sequence
  synthetic
ggcgcgccagtcctaagccggtctcagtgccagaggaggggattcccggcgccgggggacagagccccttttttcttttgccgaaagaccctttctgctggggagcctcttgtgtccagcctaggcccgcgtgcagcgccgacggatgaccgtcttcttgcggtctggacaggaaaacttaattgagacgactcggaccgatg

SEQ ID NO: 12326 - DNA, 203 bp, Artificial sequence
  synthetic
ggcgcgccagtcctggaacgccctcagtgccagaggaggggattcccggcgccgggggacagctttataggggagctttgccgaaagaccctttctgctggggagcctcttgtgtccagcctaggcccgcgtgcagcgccgacggatgaccgtcttcttggcaagaaagtgaataaacttaattgagacgactcggaccgatg

SEQ ID NO: 12327 - DNA, 203 bp, Artificial sequence
  synthetic
ggcgcgccagtcctatatctaactcagtgccagatagtcaccaaggaagcgccgggggacagagccccttttttcttttgccgaaagaccctttctgctggggagcctcttgtgtccagcctaggcccgcgtgcagcgccgacggatgaccgtcttcttggcaagaaagtgaataaacttaattgagacgactcggaccgatg

SEQ ID NO: 12328 - DNA, 203 bp, Artificial sequence
  synthetic
ggcgcgccagtcctatttatgtctccagttgggacaagtcccaatccaagtgaacgtgtagcgccgcatttaaatgatgccgttcaatcatgagacataaagaaaaaatcaagccagaacaagcttaggatcacaatacaacacagaaccccagctgctatcataactgttctctggccgctcgaaagcgactcggaccgatg

SEQ ID NO: 12329 - DNA, 203 bp, Artificial sequence
  synthetic
ggcgcgccagtcctcacgcctcctccagttgggacaagtcccaatccatcattcgagaacaagccgcatttaaatgatgccgttcaatcatgagacataaagaaaaaatcaagccagaacaagcttaggatcacaatacaacacagaaccccagctgctacgcccgtgagctgttggccgctcgaaagcgactcggaccgatg

SEQ ID NO: 12330 - DNA, 203 bp, Artificial sequence
  synthetic
ggcgcgccagtcctcataacgcctccagttgggacaagtcccaatccatcattcgagaacaagccgcatttaaatgatgccgttcaatcatgagacataaagaaaaaatcaagccagaacaagcttaggatcacaatacaacacagctttaggctctgactcataactgttctctggccgctcgaaagcgactcggaccgatg

SEQ ID NO: 12331 - DNA, 203 bp, Artificial sequence
  synthetic
ggcgcgccagtcctgtcgcagcctccagttgggacaagtcccaatccatcattcgagaacaagccgcatttaaatgatgccgttcaatcatgagacataaagaagcgtgattagatcgacaagcttaggatcacaatacaacacagaaccccagctgctatcataactgttctctggccgctcgaaagcgactcggaccgatg

SEQ ID NO: 12332 - DNA, 203 bp, Artificial sequence
  synthetic
ggcgcgccagtcctgcacaggactccagttgggacaagtcccaatccatcattcgagaacaagccgcatttaaatggaagtcccagtgattgagacataaagaaaaaatcaagccagaacaagcttaggatcacaatacaacacagaaccccagctgctatcataactgttctctggccgctcgaaagcgactcggaccgatg

SEQ ID NO: 12333 - DNA, 203 bp, Artificial sequence
  synthetic
ggcgcgccagtcctttactgtcctcccctggtgcggcccgaggcaagcccaccgaggtgaccacccctcgacgccgcttggagatcccgggcatccaccctgcgccccgagcagctgatacccagggaggtgaattccgtatgagagggcgcggggtcgccggaagccaggcgggagccccggctgctcgactcggaccgatg

SEQ ID NO: 12334 - DNA, 203 bp, Artificial sequence
  synthetic
ggcgcgccagtcctctcgtgacctcccctggtgcggcccgaggcaagcccaccgaggtgaccacccctcgacgccgcttggagatcccggtgcgttttagccgaccccgagcagctgatacccagggaggtgtcaggacctgcccggggcgcggggtcgccggaagccaggcgggagccccggctgctcgactcggaccgatg

SEQ ID NO: 12335 - DNA, 203 bp, Artificial sequence
  synthetic
ggcgcgccagtcctcgggcgcactccctttctccctccatccttccacttcccctgctcggccccgccgtcaggcccacaggtgtcagattgccgtcatcaggttccccttctcccttcttggcactttcctttcgaaccatccttctggacaaactttgatggagaatttcacaccacgctggaaaacgactcggaccgatg

SEQ ID NO: 12336 - DNA, 203 bp, Artificial sequence
  synthetic
ggcgcgccagtccttcgcttcgctccctttctccctccatccttccacttcccctgctcggccccgccgtcaggccgggtcccccttccctgccgtcatcaggtgttagaaagtgaggcttggcactttcctttcgaaccatccttctggacaaactttgatggagaatttcacaccacgctggaaaacgactcggaccgatg

SEQ ID NO: 12337 - DNA, 203 bp, Artificial sequence
  synthetic
ggcgcgccagtcctcaactgacctccctttctccctccatccttccacttcccctgctcggccccgccgtcaggccgggtcccccttccctgccgtcatcaggttccccttctcccactgcaaggtcttcctttcgaaccatccacagaatgttgctttgatggagaatttcacaccacgctggaaaacgactcggaccgatg

SEQ ID NO: 12338 - DNA, 203 bp, Artificial sequence
  synthetic
ggcgcgccagtcctggaaagtgctccctttctccctccatccttccacttcccctgctcggccccgccgtcaggccgggtcccccttccctgccgtcatcaggttccccttctcccactgcaaggtcttcctttcgaaccatccttctggacaaactttgatggagaatttcacaccacgctggaaaacgactcggaccgatg

SEQ ID NO: 12339 - DNA, 203 bp, Artificial sequence
  synthetic
ggcgcgccagtcctgcctcactctccctttctccctccatccttccacttcccctgctcggccccgccgtcaggccgggtcccccttccctgccgtcatcaggttccccttctcccttagctatttaacttcttcgaaccatccttctggacaaactttgatggagaatttcacaccacgctggaaaacgactcggaccgatg

SEQ ID NO: 12340 - DNA, 203 bp, Artificial sequence
  synthetic
ggcgcgccagtcctgatcgccgctccctttctccctccatccttccacttcccctgctcggccccgccgtcaggccgggtcccccttccctgccgtcatcaggttccccttctcccttcttggcactttcctgaaatcaagatgcactggacaaactttgatggagaatttcacaccacgctggaaaacgactcggaccgatg

SEQ ID NO: 12341 - DNA, 203 bp, Artificial sequence
  synthetic
ggcgcgccagtccttgagcgtgctccctttctccctccatccttccacttcccctgctcggccccgccgtcaggccgggtcccccttccctgccgtcatcaggttccccttctcccttcttggcactttcctttcgaaccatccacagaatgttgctttgatggagaatttcacaccacgctggaaaacgactcggaccgatg

SEQ ID NO: 12342 - DNA, 203 bp, Artificial sequence
  synthetic
ggcgcgccagtcctcaatcattctccctttctccctccatccttccacttcccctgctcggccccgccgtcaggccgggtcccccttccctgccgtcatcaggttccccttctcccttcttggcactttcctttcgaaccatccttctggacaaactttgatggagaatttcacaccacgctggaaaacgactcggaccgatg

SEQ ID NO: 12343 - DNA, 203 bp, Artificial sequence
  synthetic
ggcgcgccagtcctccacaccactccctttctccctccatccttccacttcccctgctcggccccgccgtcaggccgggtcccccttccctgccgtcatcaggttccccttctcccttcttggcactttcctttcgaaccatccttctggacaaactttgatggagaatttcactaattcgattccctcgactcggaccgatg

SEQ ID NO: 12344 - DNA, 203 bp, Artificial sequence
  synthetic
ggcgcgccagtcctactcgctcctccctttctccctccatccttccacttcccctgctcggccccgccgtcaggccgggtcccccttccctgccgtcatcaggttccccttctcccttcttggcactttcctttcgaaccatccttctggacaaactttggaatccgtcgagtgaccacgctggaaaacgactcggaccgatg

SEQ ID NO: 12345 - DNA, 203 bp, Artificial sequence
  synthetic
ggcgcgccagtcctgggcgatactccctttctccctccatccttccacttcccctgctcggcgtgattaggttctggggtcccccttccctgccgtcatcaggttccccttctcccttcttggcactttcctttcgaaccatccttctggacaaactttgatggagaatttcacaccacgctggaaaacgactcggaccgatg

SEQ ID NO: 12346 - DNA, 203 bp, Artificial sequence
  synthetic
ggcgcgccagtcctgggaagctctccgacgtgcttactgttggcagcagcacaatgtttgggctaagacctggtcttgaaagcgccacaagcagcagctgctgagccatggctgaaggggaaatcaccaccttcacagccctgaccgagaagtttaatctgcctccagggaattacaagaagcccaaacgactcggaccgatg

SEQ ID NO: 12347 - DNA, 203 bp, Artificial sequence
  synthetic
ggcgcgccagtcctggccaaatctcctcctcgagcctgggaccgccgcgctcccgccgccgctatccaggtagagtactcccggcccgtgccgcgccctcccgcgtccgcagccggctcggcttcctgcccacccagacgtcgcttctcccgggctcccggtgtcggctccgcgcggagggagaggaacgactcggaccgatg

SEQ ID NO: 12348 - DNA, 203 bp, Artificial sequence
  synthetic
ggcgcgccagtccttgtgtgggctcctttcgaggccccatcaagaacacccaagtttgctcggtcatctgctgcgtcctcttcctgctcttcattctaggttacatcgtggtggggattgtggcctggttgtatggagacccccggcaagtcctctaccccaggaactctactggggcctactgtggccgactcggaccgatg

SEQ ID NO: 12349 - DNA, 203 bp, Artificial sequence
  synthetic
ggcgcgccagtcctagttggtactcctttcgaggccccatcaagaacagaagctgcacagatgtcatctgctgcgtaggaagggccacagtcattctaggttacatcgtggtggggattgtggcctggttgtatggagacccccggcaagtcctctaccccaggaactctactggggcctactgtggccgactcggaccgatg

SEQ ID NO: 12350 - DNA, 203 bp, Artificial sequence
  synthetic
ggcgcgccagtcctgaggagttctcctttcgaggccccatcaagaacagaagctgcacagatgtcatctgctgcgtcctcttcctgctcttcattctaggttacatcgtggtggggattgtggcctggttgtatggagacccccggcaagtcctctacccgttatgtatagtgagggcctactgtggccgactcggaccgatg

SEQ ID NO: 12351 - DNA, 203 bp, Artificial sequence
  synthetic
ggcgcgccagtccttgaagagtctcctttcgaggccccatcaagaacagaagctgcacagatgtcatctgctgcgtcctcttcctgctcttcattctaggttacatcgtggtggggattgtggcctggttgtatggagacccccgggggcaaagggctgtcaggaactctactggggcctactgtggccgactcggaccgatg

SEQ ID NO: 12352 - DNA, 203 bp, Artificial sequence
  synthetic
ggcgcgccagtcctcgagtaacctcctttcgaggccccatcaagaacagaagctgcacagatgtcatctgctgcgtcctcttcctgctcttcattctaggttacggtaataccaacggtgtggcctggttgtatggagacccccggcaagtcctctaccccaggaactctactggggcctactgtggccgactcggaccgatg

SEQ ID NO: 12353 - DNA, 203 bp, Artificial sequence
  synthetic
ggcgcgccagtcctgtcaaatgctcctttcgagggttttcaggaccttgaagctgcacagatgtcatctgctgcgtcctcttcctgctcttcattctaggttacatcgtggtggggattgtggcctggttgtatggagacccccggcaagtcctctaccccaggaactctactggggcctactgtggccgactcggaccgatg

SEQ ID NO: 12354 - DNA, 203 bp, Artificial sequence
  synthetic
ggcgcgccagtccttacgccctctcgaaggcaggagcgaccggcgcctcctcgaccctgactggagaaggaggaatcgcgccaggcggagcgtcaggtcccgttttcctctccggcgtctccaatacaaagattacggtgcagaaggaaattgcactcgtctcctccgcgcccccggtacccaacacacgactcggaccgatg

SEQ ID NO: 12355 - DNA, 203 bp, Artificial sequence
  synthetic
ggcgcgccagtcctgacctgaactcgaaggcaggagcgaccggcgcctttggctgaggaggaaagagcacctcccccgcgccaggcggagcgtcaggtcccgttttcctctccggcgtctccaatacaaagattacggtgcagaaggaaattgcactcgtctcctccgcgcccccggtacccaacacacgactcggaccgatg

SEQ ID NO: 12356 - DNA, 203 bp, Artificial sequence
  synthetic
ggcgcgccagtcctattacggactcgaaggcaggagcgaccggcgcctttggctgaggaggaggagaaggaggaatcgcgccaggcggagcgtcaggtcccgttttcctctccggcgttcatgggcacttagttacggtgcagaaggaaattgcactcgtctcctccgcgcccccggtacccaacacacgactcggaccgatg

SEQ ID NO: 12357 - DNA, 203 bp, Artificial sequence
  synthetic
ggcgcgccagtcctcgattccactcgcctgagggatgctggatctgcaatgatagaattggcctgccacagacattggtatttaagttgaagagcagaattcacaatgattctgctgcagagagctttaatgcactccccgtatgcgggcacagttcaattgcttcagggggaacacacagcagggagcgactcggaccgatg

SEQ ID NO: 12358 - DNA, 203 bp, Artificial sequence
  synthetic
ggcgcgccagtcctgtttgtctctcgcctgagggatgctggatctgcaatgatagaattggcctgccacagacattggtatttaagttgaagagcagaattcacaatgattctgctgcagagagctttaatggcaatgagactctggggcacagttcaatacagagtcaaatctcacacagcagggagcgactcggaccgatg

SEQ ID NO: 12359 - DNA, 203 bp, Artificial sequence
  synthetic
ggcgcgccagtcctctaaggtactcgcctgagggatgctggatctgcaatgatagaattggcctgccacagacattggtatttaagttgaagagcagaattcacaatgattctgctgcagagagctttaatggcaatgagactctggggcacagttcaattgcttcagggggaacacacagcagggagcgactcggaccgatg

SEQ ID NO: 12360 - DNA, 203 bp, Artificial sequence
  synthetic
ggcgcgccagtcctcggtcatcctcgcctgagggatgctggatctgcaatgatagaattggcctgccacagacattggtatttaagttgaagagcagaattcacccgccactaaaataagagagctttaatggcaatgagactctggggcacagttcaattgcttcagggggaacacacagcagggagcgactcggaccgatg

SEQ ID NO: 12361 - DNA, 203 bp, Artificial sequence
  synthetic
ggcgcgccagtcctcaattgtgctcgcctgagggatgctggatctgcaatgatagaattggcctgccacagacattggtatttaagttgagttcgtactggtgtaatgattctgctgcagagagctttaatggcaatgagactctggggcacagttcaattgcttcagggggaacacacagcagggagcgactcggaccgatg

SEQ ID NO: 12362 - DNA, 203 bp, Artificial sequence
  synthetic
ggcgcgccagtccttcgtgcggctcgcctgagggatgctggatctgcaatgatagaattggcgaaatgggctatccggtatttaagttgaagagcagaattcacaatgattctgctgcagagagctttaatggcaatgagactctggggcacagttcaattgcttcagggggaacacacagcagggagcgactcggaccgatg

SEQ ID NO: 12363 - DNA, 203 bp, Artificial sequence
  synthetic
ggcgcgccagtcctcgtgcagtctcgcctgagggatgctggatctgcatacgcgacgacaagctgccacagacattggtatttaagttgaagagcagaattcacaatgattctgctgcagagagctttaatggcaatgagactctggggcacagttcaattgcttcagggggaacacacagcagggagcgactcggaccgatg

SEQ ID NO: 12364 - DNA, 203 bp, Artificial sequence
  synthetic
ggcgcgccagtccttgcgttagctcgcctgaggggatagttccagtttatgatagaattggcctgccacagacattggtatttaagttgaagagcagaattcacaatgattctgctgcagagagctttaatggcaatgagactctggggcacagttcaattgcttcagggggaacacacagcagggagcgactcggaccgatg

SEQ ID NO: 12365 - DNA, 203 bp, Artificial sequence
  synthetic
ggcgcgccagtcctcgaggtatctcgcggctataaggggcggaggctgggcggcgttgctctgcgctctgcggctgacggcgcttttgtccgtaacgagcctctcctttcagaaggagaaggcagctctgtttctctgcagaggagtagggtcctttcagccatgaagcatgtgttgaacctctacctcgactcggaccgatg

SEQ ID NO: 12366 - DNA, 203 bp, Artificial sequence
  synthetic
ggcgcgccagtccttccttcagctcgcggctataaggggcggaggctgggcggcgttgctctgcgctctgcggctgacggcgcttttgtctccgggtccagaggcctttcagaaggagaaggcagctctgtttctctgcagaggagtagggtcctttcagagtccctagtcccattgaacctctacctcgactcggaccgatg

SEQ ID NO: 12367 - DNA, 203 bp, Artificial sequence
  synthetic
ggcgcgccagtcctcctcaaacctcgcggctataaggggcggaggctgggcggcgttgctctgcgctctgcggctgacggcgcttttgtctccgggtccagaggcctttcagaaggagaaggcagctctgtttctctgcagaggagtagggtcctttcagccatgaagcatgtgttgaacctctacctcgactcggaccgatg

SEQ ID NO: 12368 - DNA, 203 bp, Artificial sequence
  synthetic
ggcgcgccagtccttccaatttctcgcggctataaggggcggaggctgggcggcgttgctctgcgctctgcggctgacggcgcttttgtctccgggtccagagggggcctgttctttcaaggcagctctgtttctctgcagaggagtagggtcctttcagccatgaagcatgtgttgaacctctacctcgactcggaccgatg

SEQ ID NO: 12369 - DNA, 203 bp, Artificial sequence
  synthetic
ggcgcgccagtccttacgaaagctcgcggctcacggcgctcctggggcccatttacggtactcctgcccggcggccctatgccgggggtgccgctcagctggctctggacaagtcagattcccacccctctgacgctctgaccaggaaaaaaccggccaaggcggaatctaagtcctttgctgtgggacgactcggaccgatg

SEQ ID NO: 12370 - DNA, 203 bp, Artificial sequence
  synthetic
ggcgcgccagtcctacattattctcggcaggaagagaccgacccgccacccgccgtagcccgcgcgcccctggcactcaatccccgccatgtgggggctcctgctcgccctggccgccttcgcatgacaatacggcccggctctgggggcgcccaggaactcggtgctgggcctcgcgcagcccgggacgactcggaccgatg

SEQ ID NO: 12371 - DNA, 203 bp, Artificial sequence
  synthetic
ggcgcgccagtcctacgcgcctctcggcaggaagagaccgacccgccacccgccgtagcccgcgcgcccctggcactcaatccccgccatgtgggggctcctgctcgccctggccgccttcgcgccggccgtaatgattcagtaacgggcgcccaggaactcggtgctgggcctcgcgcagcccgggacgactcggaccgatg

SEQ ID NO: 12372 - DNA, 203 bp, Artificial sequence
  synthetic
ggcgcgccagtcctagaagccgctcggcaggaagagaccgacccgccacccgccgtagcccgcgcgcccctggcactcaatccccgccatgtgggggctcctgctcgccctggccgccttcgcgccggccgtcggcccggctctggatcattaagacttgtcggtgctgggcctcgcgcagcccgggacgactcggaccgatg

SEQ ID NO: 12373 - DNA, 203 bp, Artificial sequence
  synthetic
ggcgcgccagtcctgtactttgctcggcaggaagagaccgacccgccacccgccgtagcccgcgcgcccctggcactcaatccccgccatgtgggggctcctgctcgccctggccgccttcgcgccggccgtcggcccggctctgggggcgcccaggaacagatgctctaatgacgcgcagcccgggacgactcggaccgatg

SEQ ID NO: 12374 - DNA, 203 bp, Artificial sequence
  synthetic
ggcgcgccagtcctagtccgccctcggcaggaagagaccgacccgccacccgccgtagcccgcgcgcccctggcactcaatccccgccatgtgggggctcctgctcgccctggccgccttcgcgccggccgtcggcccggctctgggggcgcccaggaactcggtgctgggcctgcgtatcgtactagcgactcggaccgatg

SEQ ID NO: 12375 - DNA, 203 bp, Artificial sequence
  synthetic
ggcgcgccagtcctgcccgtgactcgtgtttatggggtttcccctggaaaatggtgagggacgattggcatgctacaggctgttgctgacggcaaggctcatttcactgagtcagtgaagccagtgctcgacctgacaaattcaatcctgtgtcgggtggaatgaataacatgtcttctgctgcgccccgactcggaccgatg

SEQ ID NO: 12376 - DNA, 203 bp, Artificial sequence
  synthetic
ggcgcgccagtccttcctggctctcgtgtttatggggtttcccctggactcgttcataacctcgggtcgtaagccgaggctgttgctgacggcaaggctcatttcactgagtcagtgaagccagtgctcgacctgacaaattcaatcctgtgtcgggtggaatgaataacatgtcttctgctgcgccccgactcggaccgatg

SEQ ID NO: 12377 - DNA, 203 bp, Artificial sequence
  synthetic
ggcgcgccagtcctgcgtgtaactcgtgtttatggggtttcccctggactcgttcataacctgattggcatgctacaggctgttgctgacggcaaggctcatttcactgagtcagtgaagccagtgctcgacctgacaaattcaatcctgtgtcgggtggttatggagcagaaccttctgctgcgccccgactcggaccgatg

SEQ ID NO: 12378 - DNA, 203 bp, Artificial sequence
  synthetic
ggcgcgccagtccttcagaagactcgtgtttatggggtttcccctggactcgttcataacctgattggcatgctacgattctcgcggagaggcaaggctcatttcactgagtcagtgaagccagtgctcgacctgacaaattcaatcctgtgtcgggtggaatgaataacatgtcttctgctgcgccccgactcggaccgatg

SEQ ID NO: 12379 - DNA, 203 bp, Artificial sequence
  synthetic
ggcgcgccagtcctatcttagcctctaagcgagctgtgtgtgggcggatgcgagtggccggagaccagggcccaacataaacaagctttggagacaaacaaccttatgacctgtcagccctgacaaaggtcagctagccccttgaggacatcagctttggcctcagggtcctaatggcagcagaaccacgactcggaccgatg

SEQ ID NO: 12380 - DNA, 203 bp, Artificial sequence
  synthetic
ggcgcgccagtcctctgtgggcctctaatggccatcctttccattggatcaaacccgctcaatgcctggagatttgggcgtgcccccgcaagactgctagccgagtagcgttgggttgcgaaaggccttgtggtactgcctgatagggtgcttgcgagtgccccgggaggtctcgtagaccgtgcaaccgactcggaccgatg

SEQ ID NO: 12381 - DNA, 203 bp, Artificial sequence
  synthetic
ggcgcgccagtcctggctttcactctcacgcattttagtgtcatgaattagtgtttcaaatcagttgcatatcaattaagaaaaacttaggagacaggtatagaacctctctttcagataactggtcaattaaggacagaaattctgtttctcaaatccgctagcctttgtcaatagatgagtggattcgactcggaccgatg

SEQ ID NO: 12382 - DNA, 203 bp, Artificial sequence
  synthetic
ggcgcgccagtcctgctctatactctcacgcattttagtgtcatgaattagtgtttcaaatcagttgcatatcaattaagaaaaacttaggagacaggtatagaacctctctttcagataactggtcaattaccccagagttgctcgtttctcaaatccgctagcctttgtcaaagaggacacaagcacgactcggaccgatg

SEQ ID NO: 12383 - DNA, 203 bp, Artificial sequence
  synthetic
ggcgcgccagtccttgtgaacactctgatcctctacaactcttgaaacacagatttcccacaagtctcctcttcgtcatcaagcaaccaccgcatccagcatcaagcccacctgaaatgcgacggtctccatctctggccgaacgatatcggtagttaattaaaacttagggtgcaagatcatccacacgactcggaccgatg

SEQ ID NO: 12384 - DNA, 203 bp, Artificial sequence
  synthetic
ggcgcgccagtcctgacatattctctgatcctctacaactcttgaaacacagatttcccacaagtctcctcttcgtgtctcttactattacgcatccagcatcaagcccacctgaaattgtctccggcttccctctggccgaacgatatcggtagttaattaaaacttagggtgcaagatcatccacacgactcggaccgatg

SEQ ID NO: 12385 - DNA, 203 bp, Artificial sequence
  synthetic
ggcgcgccagtcctgcctggtcctctgatcctctctgtggaaccgccaacagatttcccacaagtctcctcttcgtcatcaagcaaccaccgcatccagcatcaagcccacctgaaattgtctccggcttccctctggccgaacgatatcggtagttaattaaaacttagggtgcaagatcatccacacgactcggaccgatg

SEQ ID NO: 12386 - DNA, 203 bp, Artificial sequence
  synthetic
ggcgcgccagtcctaagtctgactctgcggccaaaagccacgtggataagatccacctttgtgtgcggtgcaacccagaagggggtcgaccttggtgacactctagtgaacccctgaatggcaatctcaagcgcctctgtagggaagccaagaatgtccaggaggtaccccttcctctcggaagggatcgactcggaccgatg

SEQ ID NO: 12387 - DNA, 203 bp, Artificial sequence
  synthetic
ggcgcgccagtcctagtctacactctgcggccaaaagccacgtggataagatccacctttgtgtgcggtgcaaccccagcaccctggtttcttggtgacactctagtgaacccctgaatggcaatctcaagcgcctctgtagggaaagactagcccggatggaggtaccccttcctctcggaagggatcgactcggaccgatg

SEQ ID NO: 12388 - DNA, 203 bp, Artificial sequence
  synthetic
ggcgcgccagtcctataaagttctctgcggccaaaagccacgtggataagatccacctttgtgtgcggtgcaaccccagcaccctggtttcttggtgacactctagtgaacccctgaatggcaatctcaagctttatccctacctcgccaagaatgtccaggaggtaccccttcctctcggaagggatcgactcggaccgatg

SEQ ID NO: 12389 - DNA, 203 bp, Artificial sequence
  synthetic
ggcgcgccagtcctaaggagcgctctgcggccaaaagccacgtggataagatccacctttgtgtgcggtgcaaccccagcaccctggtttcttggtgacactctcaaccggattgtcctggcaatctcaagcgcctctgtagggaagccaagaatgtccaggaggtaccccttcctctcggaagggatcgactcggaccgatg

SEQ ID NO: 12390 - DNA, 203 bp, Artificial sequence
  synthetic
ggcgcgccagtcctgtcattctctctgcggccaagcctactaatcgcgagatccacctttgtgtgcggtgcaaccccagcaccctggtttcttggtgacactctagtgaacccctgaatggcaatctcaagcgcctctgtagggaagccaagaatgtccaggaggtaccccttcctctcggaagggatcgactcggaccgatg

SEQ ID NO: 12391 - DNA, 203 bp, Artificial sequence
  synthetic
ggcgcgccagtcctctgcaatactcttatcccgcgtaccctgctctacttagatcttgtttatttgtagtttccttttcaagtcagtggatctcagcgatgtacgctcaatgattccaatttttctgttcttgccttcaggttgtctattacactttcatgtcctctggacttaactctgtttcccatcgactcggaccgatg

SEQ ID NO: 12392 - DNA, 203 bp, Artificial sequence
  synthetic
ggcgcgccagtcctcggatcgcctcttgagactggccgaaaggcagccacggggccaccaaggcggcgcagcgctgagaaactatctttcaaaaatccttcgggtgacccctggtggcaatcccttcccttaggagcatgagtgtggtcgacacattcaccatggcttggctgtggttgctggtttgccgactcggaccgatg

SEQ ID NO: 12393 - DNA, 203 bp, Artificial sequence
  synthetic
ggcgcgccagtccttgcaggacctcttgagactggccgaaaggcagccacggggccaccaaggcggcgcagcgctgcatgcggcaaggggaaaaatccttcgggtgacccctggtggcaatcccttcccttaggagcatgagtgtggtcgacacattcaccatggcttggctgtggttgctggtttgccgactcggaccgatg

SEQ ID NO: 12394 - DNA, 203 bp, Artificial sequence
  synthetic
ggcgcgccagtcctggatgggactcttgagactggccgaaaggcagccacggggccaccaaggcggcgcagcgctgcatgcggcaagggggtgttgagacaaattgacccctggtggcaatcccttcccttaggagcatgagtgtggtcgacacattcaccatggcttggctgtggttgctggtttgccgactcggaccgatg

SEQ ID NO: 12395 - DNA, 203 bp, Artificial sequence
  synthetic
ggcgcgccagtcctagccagcactgaaacaagaagtttgtgcctactcaacagctttgaaagagcacttcccaacgctgctagtagtcttataggcggcatcaactgtactgtgagattgcccggtacagcagcagttgtattctttattagcttggtagatcattttctctcgctcttttttttaatcgactcggaccgatg

SEQ ID NO: 12396 - DNA, 203 bp, Artificial sequence
  synthetic
ggcgcgccagtcctggaatcaactgaaacaagaagtttgtgcctactcaacagctttgaaagagcacttcccaacgctgctagtagtctttgttttcttcagtgctgtactgtgagattgcccggtacagcagcagttgtattcttccgacttggacgtcatcattttctctcgctcttttttttaatcgactcggaccgatg

SEQ ID NO: 12397 - DNA, 203 bp, Artificial sequence
  synthetic
ggcgcgccagtcctaatcacttctgaaacaagaagtttgtgcctactcaacagctttgaaagagcacttcccaacgctgctagtagtctttgttttcttcagtgctgtactgtgagattgcccggtacagcagcagttgtattctttattagcttggtagatcattttctctcggatgcccggccggccgactcggaccgatg

SEQ ID NO: 12398 - DNA, 203 bp, Artificial sequence
  synthetic
ggcgcgccagtcctcaggtacactgaatgtggctggatcgctaagcttagctagagcacgtaacccaatgtgtatctagtcgtaatgagcaattgcgggatgggaccaactactttgggtgtccgtgtttcactttttcctttatatttgcttatggtgacaatatatacaatatatatattggcacccgactcggaccgatg

SEQ ID NO: 12399 - DNA, 203 bp, Artificial sequence
  synthetic
ggcgcgccagtcctctatacaactgagcagccagtaggggagagagcaacccgttgggctttagcaccagctccctcctgcctgaagatgttccaccaaatttgggcagctctgctctacttctatggtattatccttaactccatctaccagtgccctgagcacagtcaactgacaactctgggcgtcgactcggaccgatg

SEQ ID NO: 12400 - DNA, 203 bp, Artificial sequence
  synthetic
ggcgcgccagtcctaacgcggcctgagcagccagtaggggagagagcagttaaggcacacagagcaccagctccctcctgcctgaagatgttccaccaaatttgccttctaacctgagacttctatggtattatccttaactccatctaccagtgccctgagcacagtcaactgacaactctgggcgtcgactcggaccgatg

SEQ ID NO: 12401 - DNA, 203 bp, Artificial sequence
  synthetic
ggcgcgccagtccttcgatcgtctgagcagccagtaggggagagagcagttaaggcacacagagcaccagctccctcctgcctgaagatgttccaccaaatttgggcagctctgctctacttctatggtattatccttaactccatagttgtaaaaatgtagcacagtcaactgacaactctgggcgtcgactcggaccgatg

SEQ ID NO: 12402 - DNA, 203 bp, Artificial sequence
  synthetic
ggcgcgccagtcctgatccagactgagcagccagtaggggagagagcagttaaggcacacagagcaccagctccctcctgcctgaagatgttccaccaaatttgggcagctctgctctacttctatggtattatccttaactccatctaccagtgccctgagcacagtcaactgacaactctgggcgtcgactcggaccgatg

SEQ ID NO: 12403 - DNA, 203 bp, Artificial sequence
  synthetic
ggcgcgccagtcctcccatttgctgagcagccagtaggggagagagcagttaaggcacacagagcaccagctccctcctgcctgaagatgttccaccaaatttgggcagctctgctctacttctatggtattatccttaactccatctaccagtgccctggattggccagctgtacaactctgggcgtcgactcggaccgatg

SEQ ID NO: 12404 - DNA, 203 bp, Artificial sequence
  synthetic
ggcgcgccagtcctgggccggcctgagcagccagtaggggagagagcagttaaggcacacagctgtggtttattaacctgcctgaagatgttccaccaaatttgggcagctctgctctacttctatggtattatccttaactccatctaccagtgccctgagcacagtcaactgacaactctgggcgtcgactcggaccgatg

SEQ ID NO: 12405 - DNA, 203 bp, Artificial sequence
  synthetic
ggcgcgccagtcctccagagaactgaggcccgggcactgagctgccataccccgaaagcaggatggagctggagtgaggtggaggggccgcaagctgctgaccggcgtgtggaacactggtggtttgcagatcactgaggctggacaacgttcatggctctcgggtagaacctagtgaaacggccagacgactcggaccgatg

SEQ ID NO: 12406 - DNA, 203 bp, Artificial sequence
  synthetic
ggcgcgccagtcctcagacccactgatattaatatccctgatttacccatttgtgtgtatgatccgctaccagttattttgcttggcattcttttgggcgttgcgattgtaattattgtagttttgttgttatattttatggtggaagcgcgccgctttttgcatgatgcttagaccataatctaaaccgactcggaccgatg

SEQ ID NO: 12407 - DNA, 203 bp, Artificial sequence
  synthetic
ggcgcgccagtccttacataacctgatattaatatccctgatttacccatttgtgtgtatgatccgctaccagttattttgcttggcattcttttgggcgttgcgattgtaattattgtagttttgttgttatattttatggtggataatgttactaggctgcatgatgcttaggatgacggtacgtgcgactcggaccgatg

SEQ ID NO: 12408 - DNA, 203 bp, Artificial sequence
  synthetic
ggcgcgccagtcctccgccatgctgcagccgccgattttaaatcagcgcagtcagcagctcggcgccacctccggtcggcgactgcggcgggctcgacgaggcggctgacggggcggcggcgggaagacggccgggtgcgccttggggtttagtggcggcttctccatgggtccagccagccgcttcccgactcggaccgatg

SEQ ID NO: 12409 - DNA, 203 bp, Artificial sequence
  synthetic
ggcgcgccagtcctatacgtctctgcagccgccgccgccggccgccttcagtcagcagctcggcgccacctccggtcggcgactgcggcgggctcgacgaggcggctgacggggcggcatacatttagtcttcgggtgcgccttggggtttagtggcggcttctccatgggtccagccagccgcttcccgactcggaccgatg

SEQ ID NO: 12410 - DNA, 203 bp, Artificial sequence
  synthetic
ggcgcgccagtcctctccgtgcctgcagccgccgccgccggccgccttcagtcagcagctcggcgccacctccggtcggcgactgcggcgggctcgacgaggcggctgacggggcggcggcgggaagacggccgggtgcgccttggggtttagtggcggcttctccatgggtccccgtgttgttccttcgactcggaccgatg

SEQ ID NO: 12411 - DNA, 203 bp, Artificial sequence
  synthetic
ggcgcgccagtcctgtttaaagctgccacagaaacgcttaggactcccattcccatggagaaactcctagatgaggttcttgcccccggtgggccttataacttaaccgtcggcagttgggtaagagaccacgtccgatcaattgtcgagggcgcgtgggaagtgcgcgatgttgttaccgctgcccacgactcggaccgatg

SEQ ID NO: 12412 - DNA, 203 bp, Artificial sequence
  synthetic
ggcgcgccagtcctatcccgtgctgccctaaaatagcttcccatgtgagggctagagaaaggaaaagattagacccgttgctacgctagaagagaaagtgaaggagggcaggggagggggacagcgagccattgagcgatctttgtcaagcatcccagaagactgcgccatggggctcagcgacggggcgactcggaccgatg

SEQ ID NO: 12413 - DNA, 203 bp, Artificial sequence
  synthetic
ggcgcgccagtcctatgttccactgccctaaaatagcttcccatgtgagggctagagaaaggaaaagattagaccctccctggatgagagagagaaagtgaaggagggcaggggagggggacagcgagccattgagcgatctttgtcaagcatcccagaactactgctagcaccgctcagcgacggggcgactcggaccgatg

SEQ ID NO: 12414 - DNA, 203 bp, Artificial sequence
  synthetic
ggcgcgccagtcctcaccacaactgccctaaaatagcttcccatgtgagggctagagaaaggaaaagattagaccctccctggatgagagagagaaagtgaaggtctcgccctccaacggacagcgagccattgagcgatctttgtcaagcatcccagaagactgcgccatggggctcagcgacggggcgactcggaccgatg

SEQ ID NO: 12415 - DNA, 203 bp, Artificial sequence
  synthetic
ggcgcgccagtcctcgtttgttctgccctaaaatagcttcccatgtgagggctagagaaaggcccgcggatatggttccctggatgagagagagaaagtgaaggagggcaggggagggggacagcgagccattgagcgatctttgtcaagcatcccagaagactgcgccatggggctcagcgacggggcgactcggaccgatg

SEQ ID NO: 12416 - DNA, 203 bp, Artificial sequence
  synthetic
ggcgcgccagtccttggcattcctgccctaaaatcatcaaggtcaactgggctagagaaaggaaaagattagaccctccctggatgagagagagaaagtgaaggagggcaggggagggggacagcgagccattgagcgatctttgtcaagcatcccagaagactgcgccatggggctcagcgacggggcgactcggaccgatg

SEQ ID NO: 12417 - DNA, 203 bp, Artificial sequence
  synthetic
ggcgcgccagtcctatggtagtctgccggccggcactagtctttgacgccgccccgcttccgcccgctgtcctgctgcacgaacccttccaactctcctttcctcccccacccttgagttacccctctgtctttcctgctgttgcgcgggtgctcccacagcggagcggagattacagagccgccgggcgactcggaccgatg

SEQ ID NO: 12418 - DNA, 203 bp, Artificial sequence
  synthetic
ggcgcgccagtcctactctgttctgccggccggcggccccgcgctcgcccgccccgcttccgaagatccgaggtgagcacgaacccttccaactctcctttcctcccccacccttgagttacccctctgtctttcctgctgttgcgcgggtgctcccacagcggagcggagattacagagccgccgggcgactcggaccgatg

SEQ ID NO: 12419 - DNA, 203 bp, Artificial sequence
  synthetic
ggcgcgccagtcctccggctgactgccggccggcggccccgcgctcgcccgccccgcttccgcccgctgtcctgctgcacgaacccttccaactctcctttcctcccccacccttgagttacccctctgtctttcctgctgttgcgcgggtgctcccacagcggagcggagattacagagccgccgggcgactcggaccgatg

SEQ ID NO: 12420 - DNA, 203 bp, Artificial sequence
  synthetic
ggcgcgccagtcctccacttggctgccggccggcggccccgcgctcgcccgccccgcttccgcccgctgtcctgctgcacgaacccttccttgctatacgcaaacccccacccttgagttacccctctgtctttcctgctgttgcgcgggtgctcccacagcggagcggagattacagagccgccgggcgactcggaccgatg

SEQ ID NO: 12421 - DNA, 203 bp, Artificial sequence
  synthetic
ggcgcgccagtcctaatattctctgccggccggcggccccgcgctcgcccgccccgcttccgcccgctgtcctgcttactttgattccataactctcctttcctcccccacccttgagttacccctctgtctttcctgctgttgcgcgggtgctcccacagcggagcggagattacagagccgccgggcgactcggaccgatg

SEQ ID NO: 12422 - DNA, 203 bp, Artificial sequence
  synthetic
ggcgcgccagtcctgagcattgctgccggccggcggccccgcgctcgcgttagagcgcagttcccgctgtcctgctgcacgaacccttccaactctcctttcctcccccacccttgagttacccctctgtctttcctgctgttgcgcgggtgctcccacagcggagcggagattacagagccgccgggcgactcggaccgatg

SEQ ID NO: 12423 - DNA, 203 bp, Artificial sequence
  synthetic
ggcgcgccagtcctccacccttctgctataagaaaggccttattaggacacatagttagccctaggtgtgaatatcaagcaggacataactgttatcaggtagaacaatacttggcactagcagcattaataacaccaaaaaagataaagccacctttgcctagtgttacgaaactgacagaggatagcgactcggaccgatg

SEQ ID NO: 12424 - DNA, 203 bp, Artificial sequence
  synthetic
ggcgcgccagtcctacccaagtctgcttatggtgacaattgagagattgttaccatatagctcaactgccatagtaccggtgaccaatagagctattatatatctctttgttgggtttataccacttagcttgaaagaggttaaaacattacaattcattgttaagttgaatacagcaaaatgggagccgactcggaccgatg

SEQ ID NO: 12425 - DNA, 203 bp, Artificial sequence
  synthetic
ggcgcgccagtccttatgtactctgcttatggtggttccgtgcgaccggttaccatatagctattggattggccatccggtgaccaatagagctattatatatctctttgttgggtttataccacttagcttgaaagaggttaaaacattacaattcattgttaagttgaatacagcaaaatgggagccgactcggaccgatg

SEQ ID NO: 12426 - DNA, 203 bp, Artificial sequence
  synthetic
ggcgcgccagtcctaggtccatctggctctggaggcgcaggtggtcctgacctcctccaggtatggtgcgcgctgttttctaatcacgtggctgccacccaggtaagaagaggccgctcttcctggggttgtttctccgtgtgacgtgtggcctttgagatcaactctcctgtaccagcgtaggccgccgactcggaccgatg

SEQ ID NO: 12427 - DNA, 203 bp, Artificial sequence
  synthetic
ggcgcgccagtcctgcatcgatctggctctggaggcgcaggtggtccttcttctactgtcacatggtgcgcgctgtggcgcctggttcccgctgccacccaggtaagaagaggccgctcttcctggggttgtttctccgtgtgacgtgtggcctttgagatcaactctcctgtaccagcgtaggccgccgactcggaccgatg

SEQ ID NO: 12428 - DNA, 203 bp, Artificial sequence
  synthetic
ggcgcgccagtccttccactccctggctctggaggcgcaggtggtccttcttctactgtcacatggtgcgcgctgttttctaatcacgtggctgccacccaggtaagaagaggccgctcttcctggggttgtgggggaacaatttatgtggcctttgagatcaactctcctgtaccagcgtaggccgccgactcggaccgatg

SEQ ID NO: 12429 - DNA, 203 bp, Artificial sequence
  synthetic
ggcgcgccagtcctgtaagcgtctggctgagcctatgtaattagccattccgagtcaccgcctgccgccgcgcccccggtttctataaattgagcccgcagcctcccgcttcgctctctgctcctcctgttcgacagtcagccgcatcttcttttgcgtcgccagccgagccacatcgctcagacacccgactcggaccgatg

SEQ ID NO: 12430 - DNA, 203 bp, Artificial sequence
  synthetic
ggcgcgccagtcctagtagttcctggctgagcctggcgggaggcggggagatgcattaacagtgccgccgcgcccccggtttctataaattgagcccgcagcctcccgcttcgctctctgctcctcctgttcgacagtcagccgcatcttcttttgcgtcgccagccgagccacatcgctcagacacccgactcggaccgatg

SEQ ID NO: 12431 - DNA, 203 bp, Artificial sequence
  synthetic
ggcgcgccagtcctccggtgtactggctgagcctggcgggaggcggggtccgagtcaccgcctgccgccgcgcccccggtttctataaattgagcccgcagcctcccgcttcgctctctgctcctcctgttcccagtcgtagtaagtcttcttttgcgtcgccagccgagccacatcgctcagacacccgactcggaccgatg

SEQ ID NO: 12432 - DNA, 203 bp, Artificial sequence
  synthetic
ggcgcgccagtccttaccgcagctggctgagcctggcgggaggcggggtccgagtcaccgcctgccgccgcgcccccggtttctataaattgagcccgcagcctcccgcttcgctctctgctcctcctgttcgacagtcagccgcatcttcttttgcgtcagttctactaagttatcgctcagacacccgactcggaccgatg

SEQ ID NO: 12433 - DNA, 203 bp, Artificial sequence
  synthetic
ggcgcgccagtccttgcaccggctgggtcgccagatttggttgtctttttttgaggccttgtgcgctgtacttctccaaatgggaaacaagcaagccaaagccccagaatcaaaagacagtccgagagccagcctgatcccagatgccacacatctagggccacagttctgtaagagctgctggttcgcgactcggaccgatg

SEQ ID NO: 12434 - DNA, 203 bp, Artificial sequence
  synthetic
ggcgcgccagtcctacttgggtctggtacttggtccaaggacgcagacctctttttgagtatcacgcctccggaagtagttgggcaagcccacctatatgtgttgggatggttggggttagccatccataccgtactgcctgatagggtccttgcgaggggatctgggagtctcgtagaccgtagcaccgactcggaccgatg

SEQ ID NO: 12435 - DNA, 203 bp, Artificial sequence
  synthetic
ggcgcgccagtcctaggagtgtctggtgctgctcataaaacagacatcaatccattgaatcaactgccagaccgaacaaacaaatgtccgtcagcggaaccaccaaccaatcaatcaaccaactgatccatcagcaacctgacgaaattaacaatatagtaacaaaaaaagaacaagatggggcaaatcgactcggaccgatg

SEQ ID NO: 12436 - DNA, 203 bp, Artificial sequence
  synthetic
ggcgcgccagtcctttctcggcctggttaccagcaacataggaaattgtcgttgaactacatgttgtaaggctttagagaaataagggagtgtcctatttaggaccgacaagagtcaaggcagccccaccaaaacctctagcgactaggaacagctatatcgggttgctatagcagtcaggatgtcatcgactcggaccgatg

SEQ ID NO: 12437 - DNA, 203 bp, Artificial sequence
  synthetic
ggcgcgccagtcctctttggcgctgtcctcgccgccgtcgcgggcagtaatccagtcataagtgacaagctagccggaggagcgcctaggaacccgagccggagctcagcgagcgcagcctgcacgcccgcctcgcgtcccgggggggtcccgcctcccaccccgcctctggacttgtctctttcccccgactcggaccgatg

SEQ ID NO: 12438 - DNA, 203 bp, Artificial sequence
  synthetic
ggcgcgccagtccttatactgtctgtcctcgccgccgtcgcgggcagtgtctagccaggcctcactgctgagcgttgaggagcgcctaggaacccgagccggagctcagcgagcgcagcctgcacgcccgcctcgcgtcccgggggggtcccgcctcccaccccgcctctggacttgtctctttcccccgactcggaccgatg

SEQ ID NO: 12439 - DNA, 203 bp, Artificial sequence
  synthetic
ggcgcgccagtcctcggagaccctgtcctcgccgccgtcgcgggcagtgtctagccaggccttgacaagctagccgataagttaggctcaaacccgagccggagctcagcgagcgcagcctgcacgcccgcctcgcgtcccgggggggtcccgcctcccaccccgcctctggacttgtctctttcccccgactcggaccgatg

SEQ ID NO: 12440 - DNA, 203 bp, Artificial sequence
  synthetic
ggcgcgccagtcctgtacggccctgtcctcgccgccgtcgcgggcagtgtctagccaggccttgacaagctagccggaggagcgcctaggaacccgagccggagctcagcgagcgcagcctgcacgcccgccggctactagccataggtcccgcctcccaccccgcctctggacttgtctctttcccccgactcggaccgatg

SEQ ID NO: 12441 - DNA, 203 bp, Artificial sequence
  synthetic
ggcgcgccagtcctaattcgttctgtcctcgccgccgtcgcgggcagtgtctagccaggccttgacaagctagccggaggagcgcctaggaacccgagccggagctcagcgagcgcagcctgcacgcccgcctcgcgtcccgggggttagaacagaaaatccccgcctctggacttgtctctttcccccgactcggaccgatg

SEQ ID NO: 12442 - DNA, 203 bp, Artificial sequence
  synthetic
ggcgcgccagtccttcacgcatctgtcctcgccgtgcctcacttattggtctagccaggccttgacaagctagccggaggagcgcctaggaacccgagccggagctcagcgagcgcagcctgcacgcccgcctcgcgtcccgggggggtcccgcctcccaccccgcctctggacttgtctctttcccccgactcggaccgatg

SEQ ID NO: 12443 - DNA, 203 bp, Artificial sequence
  synthetic
ggcgcgccagtcctgtggaccactgtgagatcaactacgatccttttatgggagctggggcagggactacgagagcagccagatgggctgaaagtggaactcaaggggtttctggcacctacctacctgcttcccgctggggggtggggagttggcccagagtcttaagattggggcagggtggagagcgactcggaccgatg

SEQ ID NO: 12444 - DNA, 203 bp, Artificial sequence
  synthetic
ggcgcgccagtcctagggctttctgtgagatcaagggtctcttaaggggttttcgaccacgtgggactacgagagcagccagatgggctgaaagtggaactcaaggggtttctggcacctacctacctgcttcccgctggggggtggggagttggcccagagtcttaagattggggcagggtggagagcgactcggaccgatg

SEQ ID NO: 12445 - DNA, 203 bp, Artificial sequence
  synthetic
ggcgcgccagtcctggtgtttcctgtgagatcaagggtctcttaagggtgggagctggggcagggactacgagagcagccagatgggctgaaagtggaactcaaggggtttctggcacctacctacctgcttcccgctggggggtggggagttggcccaggtaaacccagcgttggcagggtggagagcgactcggaccgatg

SEQ ID NO: 12446 - DNA, 203 bp, Artificial sequence
  synthetic
ggcgcgccagtcctaggaacggctgtgagatcaagggtctcttaagggtgggagctggggcagggactacgagagcagccagatgggctgaaagtggaactcaatttaacgtacatctctacctacctgcttcccgctggggggtggggagttggcccagagtcttaagattggggcagggtggagagcgactcggaccgatg

SEQ ID NO: 12447 - DNA, 203 bp, Artificial sequence
  synthetic
ggcgcgccagtcctagtttggcctgtgagatcaagggtctcttaagggtgggagctggggcagggactacgagagctcatgtgcccctgaaaagtggaactcaaggggtttctggcacctacctacctgcttcccgctggggggtggggagttggcccagagtcttaagattggggcagggtggagagcgactcggaccgatg

SEQ ID NO: 12448 - DNA, 203 bp, Artificial sequence
  synthetic
ggcgcgccagtcctatagtgctctgtgagattgcccggtacagcagcaccatgcacaggctctagcttggtagatcattttctctcgctcttttttttaatactagcaactttcatcctttgaaacgtgtgctgaaaaagaagaatcagcaaatactactgaaagtgcaatatttgagtatcactgcgcgactcggaccgatg

SEQ ID NO: 12449 - DNA, 203 bp, Artificial sequence
  synthetic
ggcgcgccagtcctagcaatatctgtgagattgcccggtacagcagcagttgtattctttatgtaaagacaccgctattttctctcgctcttttttttaatactagcaactttcatcctttgaaacgtgtgctgaaaaagaagaatcagcaaatactactgaaagtgcaatatttgagtatcactgcgcgactcggaccgatg

SEQ ID NO: 12450 - DNA, 203 bp, Artificial sequence
  synthetic
ggcgcgccagtcctcctggcgtctgtgagattgcccggtacagcagcagttgtattctttattagcttggtagatcattttctctcgctcttttttttaatactagcaactttcatcctttgaaacgtgtgctgaaaaagaagaatcagcaaatactactgaaagtgcaatattgctaagatctcaatcgactcggaccgatg

SEQ ID NO: 12451 - DNA, 203 bp, Artificial sequence
  synthetic
ggcgcgccagtcctgggctcccctgtgagccccggccccagccgcggacagacccgcggagtcgcctcccggcccacccgcccggccgcctgtttctttcgtttggacgggaccccggcgcccccaccccatccccgggagaactctaagaaggagctgatgtggaggagcagctgagacagttcaagcgactcggaccgatg

SEQ ID NO: 12452 - DNA, 203 bp, Artificial sequence
  synthetic
ggcgcgccagtccttttagggtctgtgagccccggccccagccgcggacagacccgcggagtcgcctcccggcccaggtagtaatggagagaggagcgggaggaggacgggaccccggcgcccccaccccatccccgggagaactctaagaaggagctgatgtggaggagcagctgagacagttcaagcgactcggaccgatg

SEQ ID NO: 12453 - DNA, 203 bp, Artificial sequence
  synthetic
ggcgcgccagtcctattacatgctgtgagccccggccccagccgcggacagacccgcggagtgaatggagtcggagcccgcccggccgccgaggagcgggaggaggacgggaccccggcgcccccaccccatccccgggagaactctaagaaggagctgatgtggaggagcagctgagacagttcaagcgactcggaccgatg

SEQ ID NO: 12454 - DNA, 203 bp, Artificial sequence
  synthetic
ggcgcgccagtcctccagctacctgtgagccccgtaatgcttactttccagacccgcggagtcgcctcccggcccacccgcccggccgccgaggagcgggaggaggacgggaccccggcgcccccaccccatccccgggagaactctaagaaggagctgatgtggaggagcagctgagacagttcaagcgactcggaccgatg

SEQ ID NO: 12455 - DNA, 203 bp, Artificial sequence
  synthetic
ggcgcgccagtccttccaccatctgtgcagtcagccttaaacactgactgcacccctcccagatttcttttacattcttcccgccagggcatcacacaatctcataaaatttatgtaatttcatttaattttagccacaaatcatcaaaatgacgaggattttgacagctttcaaagtggtgaggacacgactcggaccgatg

SEQ ID NO: 12456 - DNA, 203 bp, Artificial sequence
  synthetic
ggcgcgccagtcctcttccctgctgtggtaggggaatgccacctgtcatttgaggagcagccgtgtggtatgattgatgattcaacacgcgttctcgccaagtccagcaaggactacatcaatgctagttatattagaatagtcaattgtggagaagagtatttttatatcgctactcaaggaccactcgactcggaccgatg

SEQ ID NO: 12457 - DNA, 203 bp, Artificial sequence
  synthetic
ggcgcgccagtcctctttaagcctgtggtaggggcgacagtgtcgaatcctgaggagcagccgtgtggtatgattgatgattcaacacgcgttcctcttggaaaaagcaaggactacatcaatgctagttatattagaatagtcaattgtggagaagagtatttttatatcgctactcaaggaccactcgactcggaccgatg

SEQ ID NO: 12458 - DNA, 203 bp, Artificial sequence
  synthetic
ggcgcgccagtcctaggcgtacctgtgtgctaataacatcttcgaatgctgcaaatcgagttgctaggcaataaacacatttggattaattttaatcgttcgttgagcgattagcagagaactgaccagaacatgtctggtcgtaaagctcagggaaaaaccctgggcgtcaatatggtacgacgaggcgactcggaccgatg

SEQ ID NO: 12459 - DNA, 203 bp, Artificial sequence
  synthetic
ggcgcgccagtcctccgggcccctgtgtgctaattgaggtgcattggtctgcaaatcgagttgctaggcaataaacacatttggattaatcacttcacacgtccgagcgattagcagagaactgaccagaacatgtctggtcgtaaagctcagggaaaaaccctgggcgtcaatatggtacgacgaggcgactcggaccgatg

SEQ ID NO: 12460 - DNA, 203 bp, Artificial sequence
  synthetic
ggcgcgccagtcctgtgatacgctgtgtgctaattgaggtgcattggtctgcaaatcgagttgctaggcaataaacacatttggattaattttaatcgttcgttgagcgattagcagagaactgaccagaacatgtctggtcgtaaagctcagggaaaaaatgcctctcgactaatggtacgacgaggcgactcggaccgatg

SEQ ID NO: 12461 - DNA, 203 bp, Artificial sequence
  synthetic
ggcgcgccagtcctttcgtctgctgtgtgctaattgaggtgcattggtctgcaaatcgagttgctaggcaataaacacatttggattaattttaatcgttcgttgagcgattagcagagaactgaccagaacatgtctggtcgtaaagctcagggaaaaaccctgggcgtcaatatggtacgacgaggcgactcggaccgatg

SEQ ID NO: 12462 - DNA, 203 bp, Artificial sequence
  synthetic
ggcgcgccagtccttatgcttcctgttgctccttaaatactgaggggactgtattgaaagcgtttgtgttcatcttatcagggacctgaccctaagagaatccttcccctgccaaggcagttccagcccccagaactcatcaccccatctcctgaggtggttcctatcctccctctcttctcctcgcccgactcggaccgatg

SEQ ID NO: 12463 - DNA, 203 bp, Artificial sequence
  synthetic
ggcgcgccagtcctagacggttctgttgctccttctgcctcccctctcacagggcatgtctctttgtgttcatcttatcagggacctgaccctaagagaatccttcccctgccaaggcagttccagcccccagaactcatcaccccatctcctgaggtggttcctatcctccctctcttctcctcgcccgactcggaccgatg

SEQ ID NO: 12464 - DNA, 203 bp, Artificial sequence
  synthetic
ggcgcgccagtcctgtgtgctactgttgctccttctgcctcccctctcctgtattgaaagcgcgcactacacgagcatcagggacctgaccctaagagaatccttcccctgccaaggcagttccagcccccagaactcatcaccccatctcctgaggtggttcctatcctccctctcttctcctcgcccgactcggaccgatg

SEQ ID NO: 12465 - DNA, 203 bp, Artificial sequence
  synthetic
ggcgcgccagtcctacttaatgctgttgctccttctgcctcccctctcctgtattgaaagcgtttgtgttcatcttatcagggacctgaccctaagagaatccttcccctgccaaggcagttccagcccccagaactcatcaccccatctcctgaggtggttcctatcctccctctcttctcctcgcccgactcggaccgatg

SEQ ID NO: 12466 - DNA, 203 bp, Artificial sequence
  synthetic
ggcgcgccagtcctatgtagacctgttgctccttctgcctcccctctcctgtattgaaagcgtttgtgttcatcttatcagggacctgaccctaagagaatccttcccctgccaaggcagttccagcccccagaactcatcaccccgctaaacccacaatttcctatcctccctctcttctcctcgcccgactcggaccgatg

SEQ ID NO: 12467 - DNA, 203 bp, Artificial sequence
  synthetic
ggcgcgccagtcctatctaacactgtttcctcctcctccttctcctcctcctccgtgacctcctcctcctctttctcctgagaaacttcgccccagcggtgcggagcgccgctgcgcacaactactcatcttcaggcaggcggcgggcagcgggaggcggcagcccggtgcggtccccgcggctctcgcgactcggaccgatg

SEQ ID NO: 12468 - DNA, 203 bp, Artificial sequence
  synthetic
ggcgcgccagtcctttcgcgcgctgtttcctcctcctccttctcctcctcctccgtgacctcctcctcctctttctcctgagaaacttcgccccagcggtgcggagcgccgctgcgcagccggggagggacgcaggcaggcggcgggcagcgggaggcggacaggatccttctgccccgcggctctcgcgactcggaccgatg

SEQ ID NO: 12469 - DNA, 203 bp, Artificial sequence
  synthetic
ggcgcgccagtccttattaagtctgtttcctcctcctccttctcctcctcctccgtgacctcctcctcctctttctcctgagaaacttcgccccagcggtgcggttatagctgctcgcgccggggagggacgcaggcaggcggcgggcagcgggaggcggcagcccggtgcggtccccgcggctctcgcgactcggaccgatg

SEQ ID NO: 12470 - DNA, 203 bp, Artificial sequence
  synthetic
ggcgcgccagtcctctagttagcttacctgcaaccacgcgcccagcaccctgcctccggcgatgccgccccagcccctctgatggccctcctctctgctgccactcattccagaacaggaggcatgagcccggaacgcgcttgcttttaggagacagccactttctgtgtggtacgctggattcaaggcgactcggaccgatg

SEQ ID NO: 12471 - DNA, 203 bp, Artificial sequence
  synthetic
ggcgcgccagtcctattggacccttactaataataacgtgcctcatgaaataaagatccgaaaggaattggaataaaaatttcctgcgtctcatgccaagagggaaacaccagaatcaagtgttccgcgtgaagtgcacgcgagtgtcgtccaagaatgcaaagcacatccaataaaatagctggattcgactcggaccgatg

SEQ ID NO: 12472 - DNA, 203 bp, Artificial sequence
  synthetic
ggcgcgccagtcctatgcgcaacttactaataataacgtgcctcatgaaataaagatccgaaaggaattggaataaaaatttcctgcgtctcatgccaagagggttggcgtgactaatagtgttccgcgtgattgaagacaccccctcgtccaagaatgcaaagcacatccaataaaatagctggattcgactcggaccgatg

SEQ ID NO: 12473 - DNA, 203 bp, Artificial sequence
  synthetic
ggcgcgccagtccttgttcgcacttactaataataacgtgcctcatgaaataaagatccgaaaggaattggaataactgcgattcatccgtcatgccaagagggaaacaccagaatcaagtgttccgcgtgattgaagacaccccctcgtccaagaatgcaaagcacatccaataaaatagctggattcgactcggaccgatg

SEQ ID NO: 12474 - DNA, 203 bp, Artificial sequence
  synthetic
ggcgcgccagtcctgctacggtcttactaataataacgtgcctcatgattattcctcgtaccaggaattggaataaaaatttcctgcgtctcatgccaagagggaaacaccagaatcaagtgttccgcgtgattgaagacaccccctcgtccaagaatgcaaagcacatccaataaaatagctggattcgactcggaccgatg

SEQ ID NO: 12475 - DNA, 203 bp, Artificial sequence
  synthetic
ggcgcgccagtcctcatttaaacttatgtattgagactcattgccttgtgactttatattcacaaaactgctggaagacaatgatctggggtatcacattccctcttaggttaagtttcgcactactaggaatttttgcgaaaattcttaattccattcttatggtgtagtgtttgttcttttcaattcgactcggaccgatg

SEQ ID NO: 12476 - DNA, 203 bp, Artificial sequence
  synthetic
ggcgcgccagtcctgggaaatccttatgtattgatgagagccttaaaatgactttatattcacaaaactgctggaagacaatgatctggggtatcacattccctcttaggttaagtttcgcactactaggaatttttgcgaaaattcttaattccattcttatggtgtagtgtttgttcttttcaattcgactcggaccgatg

SEQ ID NO: 12477 - DNA, 203 bp, Artificial sequence
  synthetic
ggcgcgccagtcctttctaaaccttcaaaacaaatcatatcaatacaatatcaagtagtgtcgatgatctcattaggtactaatcctaacattgtgattcatcctgcattgagaaaagatttagaaaaaaacggtcaacccgcaatatatcctggggtcgtaacgtctcgtgaccctgccgttgcactcgactcggaccgatg

SEQ ID NO: 12478 - DNA, 203 bp, Artificial sequence
  synthetic
ggcgcgccagtcctcgcgactgcttcaaaacaaatcatatcaatacaatatcaagtagtgtcgatgatctcattaggtactaatcctaacattgtgattcatcctgcattgagaaaagggactatctgttcgtaaattaagaatgaatatcctggggtcgtaacgtctcgtgaccctgccgttgcactcgactcggaccgatg

SEQ ID NO: 12479 - DNA, 203 bp, Artificial sequence
  synthetic
ggcgcgccagtcctcggtcgagcttcccggaactggaaggttacattgattacccacctagtacaacatcttacgggaagagcatagtatttcctagaggaatagtctgcgtcgtcccaggtatcattggctctgaattaaatttgaacttgtcccctgaatagctacaggttttggaagctgaatcacgactcggaccgatg

SEQ ID NO: 12480 - DNA, 203 bp, Artificial sequence
  synthetic
ggcgcgccagtcctcggattcacttcccggaactggaaggttacattgattacccacctagtacaacatcttacgggaagagcatagtatttcctagaggaatatgaacataacaggacctgcgtgggccagctgaattaaatttgaacttgtcccctgaatagctacaggttttggaagctgaatcacgactcggaccgatg

SEQ ID NO: 12481 - DNA, 203 bp, Artificial sequence
  synthetic
ggcgcgccagtcctgttctaggcttcccggaactggaaggttacattggacgagatttgtcgacaacatcttacgggaagagcatagtatttcctagaggaatatgaacataacaggaaggtatcattggctctgaattaaatttgaacttgtcccctgaatagctacaggttttggaagctgaatcacgactcggaccgatg

SEQ ID NO: 12482 - DNA, 203 bp, Artificial sequence
  synthetic
ggcgcgccagtcctggatcaagcttcttccccggcctgatctgcgcagcccggcgggcgcccagaaggagcaggcggcgcgggggcgcgctgggcgggggaggcgtggccggagctgcaaaccaggattatgtgggactgctcggccgcctcctgcccggcgagcagctcaggtcctgggctgaagagcgactcggaccgatg

SEQ ID NO: 12483 - DNA, 203 bp, Artificial sequence
  synthetic
ggcgcgccagtcctgcgggtggcttcttccccggcctgatctgcgcagggtcttacagctatagaaggagcaggcggcgcgggggcgcgctgggcgggggaggcgtggccggagctgcggcggcaagcgggctgggactgctcggccgcctcctgcccggcgagcagctcaggtcctgggctgaagagcgactcggaccgatg

SEQ ID NO: 12484 - DNA, 203 bp, Artificial sequence
  synthetic
ggcgcgccagtcctgaggcacccttgaaaaactatgccccggcgggtccgccggccggaggcgggagtcacaggaagagccctccacaaaaggaggcctcggcggatcaggacagctgcaggcttctgccaggtgggtgtgcagactggtgagctgccagcaggggcccagacgcgccaggcctggagcgactcggaccgatg

SEQ ID NO: 12485 - DNA, 203 bp, Artificial sequence
  synthetic
ggcgcgccagtcctcaccaaggcttgaggcaagtcaccagcccctgatcatttcgcctaaaagagcaaggactagagttcctgacctccacctgttatagaacaccctgacctaatgttatcgcggaatgatgatatatgtatctacgggggcctggggctgggcgggctcctgcttctggcagtggtcgactcggaccgatg

SEQ ID NO: 12486 - DNA, 203 bp, Artificial sequence
  synthetic
ggcgcgccagtcctacgactagcttgaggcaagtcaccagcccctgatcatttcgcctaaaagagcaaggactagagttcctgacctccaggccagtccctgatccctgacctaatgttatcgcggaatgatgatatatgtatctacgggggcctggggctgggcgggctcctgcttctggcagtggtcgactcggaccgatg

SEQ ID NO: 12487 - DNA, 203 bp, Artificial sequence
  synthetic
ggcgcgccagtccttataacctcttgcagccaacttcccatcagatcaccctgctggacttgcagaccggaatggggctcgcctaaggagccgagcgctgcggaggctgctgcgtgttcacactattgcctcgggggctggagcgagatttccagggcgcagtcctccggggcgttacgccgggcatacgactcggaccgatg

SEQ ID NO: 12488 - DNA, 203 bp, Artificial sequence
  synthetic
ggcgcgccagtcctagtaaacccttgcagccaacttcccatcagatcaccctgctggacttgcagaccggaatggggctcgcctaaggagccgagcgctgcggaggctgctgcgtgttggatgggagtgggatcccctgtacctaggatttccagggcgcagtcctccggggcgttacgccgggcatacgactcggaccgatg

SEQ ID NO: 12489 - DNA, 203 bp, Artificial sequence
  synthetic
ggcgcgccagtcctaagggcgtcttgcagccaacttcccatcagatcataagcactactggacagaccggaatggggctcgcctaaggagccgagcgctgcggaggctgctgcgtgttggatgggagtgggagggggctggagcgagatttccagggcgcagtcctccggggcgttacgccgggcatacgactcggaccgatg

SEQ ID NO: 12490 - DNA, 203 bp, Artificial sequence
  synthetic
ggcgcgccagtcctcgaacttacttgcgaggtgatcagaaggcaaagatgtcggagcgaaaagtattaaacaaatactacccgccggactttgacccatcaaagatccccaaactcaagctccccaaagaccggcagtacgtggtgcggctgatggccccgaaattgtattcccgtaagacgtgcggacgactcggaccgatg

SEQ ID NO: 12491 - DNA, 203 bp, Artificial sequence
  synthetic
ggcgcgccagtcctccggcactcttgcgaggtgatcagaaggcaaagatgtcggagcgaaaagtattaaacaaatactacccgccggactttgacccatcaaagtggaagtgtggatggctccccaaagaccggcagtacgtggtgcggctgatggcccccttcaacatgaggtgtaagacgtgcggacgactcggaccgatg

SEQ ID NO: 12492 - DNA, 203 bp, Artificial sequence
  synthetic
ggcgcgccagtcctgaggctgtcttggacagtttgtttgccatggtgacataaaggggtgtagaggaaggaaggagcaagaccagcctgtagactgtgcccctggctgggcaaaagggccaggggcccggagccttccctccactgccctcgaacgcctcacttcctaagtctctgcatttctcagtccgactcggaccgatg

SEQ ID NO: 12493 - DNA, 203 bp, Artificial sequence
  synthetic
ggcgcgccagtcctcctacgcacttggcgacacatccaacacgataacctcgtttcaggtagattgttatctatggcacataagaaagctactcagtatgagagacatgtgtgatgccccctttgatgacaggctccgaagagaccaaaaggcattaaagggaagaggcagcacacttggactcgattcgactcggaccgatg

SEQ ID NO: 12494 - DNA, 203 bp, Artificial sequence
  synthetic
ggcgcgccagtcctcgtgtgcccttgtatcacttaggctatctcggtccccagagaagcctggacccacacgcgggctagatccagagaacctgacgacccggcgacggcgacgtctcttttgactaaaagacagtgtccagtgctccagcctaggagtctacggggaccgcctcccgcgccgccacccgactcggaccgatg

SEQ ID NO: 12495 - DNA, 203 bp, Artificial sequence
  synthetic
ggcgcgccagtccttacttcttcttgtgtcgaaataaaccacagcttgctccggctcattgccgttaaacatcattgttcttatttacaatcaaatcgctatcgccacaaggctagtgataataactaagggatacggtaagctggctccaacctaatctccataaacagtgtctaagacgaacctcacgactcggaccgatg

SEQ ID NO: 12496 - DNA, 203 bp, Artificial sequence
  synthetic
ggcgcgccagtccttctgcattcttgtgtcgaaataaaccacagcttgctccggctcattgccgttaaacatcattgttcttatttacaatcaaatcgctatcgccacaaggctagtgataataactaagggggcgaagtcaagccctccaacctaatctttcagcgtgtcccttaagacgaacctcacgactcggaccgatg

SEQ ID NO: 12497 - DNA, 203 bp, Artificial sequence
  synthetic
ggcgcgccagtcctcaaccaccctttatccgccctgtgaccgtgttggtcgctctgttaatgaaacaagccagactggttgggcattctacgtccgtgctaaacatggtgatttttctggtgttgcctctcaggagggtgttttgtcagaaagagagaagttgcttcatttaatctaaactaaacaaacgactcggaccgatg

SEQ ID NO: 12498 - DNA, 203 bp, Artificial sequence
  synthetic
ggcgcgccagtcctgaagggaacttttaaaaaaggtctccccagtgctagctgccgaagcacccagataagagctgcgaacttaactgctcggcagccccagcttcgcgccccgcccagtccctttcccctgctggggatcccccctcttccccgcccaccccttacccgcatgcagcccagcgccctcgactcggaccgatg

SEQ ID NO: 12499 - DNA, 203 bp, Artificial sequence
  synthetic
ggcgcgccagtccttcataaatcttttaaaaaaggtctccccagtgctagctgccgaagcacccagataagagctggacggaggctaaagcggcagccccagcttcgcgccccgcccagtccctttcccctgctggggatccccccgtagttggctgattcccttacccgcatgcagcccagcgccctcgactcggaccgatg

SEQ ID NO: 12500 - DNA, 203 bp, Artificial sequence
  synthetic
ggcgcgccagtccttgtcaagccttttaaaaaaggtctccccagtgctagctgccgaagcacccagataagagctggacggaggctaaagcggcagccccagcttcgcgccccgcccagtccctttcccctgctggggatcccccctcttccccgcccaccccttacccgcatgcagcccagcgccctcgactcggaccgatg

SEQ ID NO: 12501 - DNA, 203 bp, Artificial sequence
  synthetic
ggcgcgccagtcctatcgaggacttttaaaaaaggtctccccagtgctagctgccgaagcacccagataagagctggacggaggctaaagcggcagccccagcttcgcgccccgcccagtccctttcccctgctggggatcccccctcttccccgcccacgtgcgggaacggaccagcccagcgccctcgactcggaccgatg

SEQ ID NO: 12502 - DNA, 203 bp, Artificial sequence
  synthetic
ggcgcgccagtcctactaacatcttttaaaaaaggtctccccagtgctagctgccgaagcacgactgctcccagccgacggaggctaaagcggcagccccagcttcgcgccccgcccagtccctttcccctgctggggatcccccctcttccccgcccaccccttacccgcatgcagcccagcgccctcgactcggaccgatg

SEQ ID NO: 12503 - DNA, 203 bp, Artificial sequence
  synthetic
ggcgcgccagtccttgcgtcgtcttttattctgaccgccgccttcatgctgccggcgggctgctcgcgccggctggtggccgagctgcagggcgccctggacgcctgcgcacagcgacaattgcaattggagcagagcctgcgcgtttgccgtcggctgctgcatgcctgggaaccaactgggacccgcgactcggaccgatg

SEQ ID NO: 12504 - DNA, 203 bp, Artificial sequence
  synthetic
ggcgcgccagtcctgagtgacgctttttcttttttctcagcaaactgtacaaaaccaaatctctttttgattttcaaggaaactaggttcctgccaaattttgaatctggacaataaacagacactttgtcctagcatctttctggaatcatttcgggatgcaaattcactttcacacagaaacaggacgactcggaccgatg

SEQ ID NO: 12505 - DNA, 203 bp, Artificial sequence
  synthetic
ggcgcgccagtcctaggatgccctttttgctgatacttcatttctaatcttgtagaaaatttcagctgtagcccttggactagaagctgaaataacagaagctgtgtacgatgcattagggtattgaagaaaattaacttttgaattaaatatttggaatataaggaaataaggaaagttgactgaaacgactcggaccgatg

SEQ ID NO: 12506 - DNA, 203 bp, Artificial sequence
  synthetic
ggcgcgccagtcctggagatcgctttttgctgatacttcatttctaatcttgtagaaaatttcagctgtagccctttattatcttctcacaataacagaagctgtgtacgatgcattagggtattgaagaaaattaacttttgaattaaatatttggaatataaggaaataaggaaagttgactgaaacgactcggaccgatg

SEQ ID NO: 12507 - DNA, 203 bp, Artificial sequence
  synthetic
ggcgcgccagtcctcatgatcccttttttagcaaggcaatctgcaccaatgcaactttgtggtttttgtaatttctttattatttcaccttcggcttacgtttataaaagaggtatgcagttgtataagtcttatagtgaacaagttataccacccacttcagattatttaatctaaatctaaacattcgactcggaccgatg

SEQ ID NO: 12508 - DNA, 203 bp, Artificial sequence
  synthetic
ggcgcgccagtcctgcgggatcgaaaagagggatccgcaacccctccggctccctttccgcacgcctcgaggcggcggcggccaccgagacagcagcgcaccttcccccatcccttccccttatcccccagcccaaaagggcccggtctgcgccccacccccgcccgtccgcccgctacgccgccgcccgactcggaccgatg

SEQ ID NO: 12509 - DNA, 203 bp, Artificial sequence
  synthetic
ggcgcgccagtcctccgtccgcgaaaaggcttaggcagccagcctgtcgtaacgcgcaagtccgtggcggaaccgactactttgggtgtccgtgtttccttttattcttgaatggctgcttatggtgacaatcatagattgttatcataaagcgagttggattggccatccagtgtgaatcagattaacgactcggaccgatg

SEQ ID NO: 12510 - DNA, 203 bp, Artificial sequence
  synthetic
ggcgcgccagtcctgtcaccaggaaaatgaagatattcctgcatcgttacaaatagtgtaagaaacagtaagcccggaagtggtgttttgcgatttcgaggccgggctcgatcctcacctttcattgtcgataggggacattttgacactacctggaaaatgtcgtctgtgctcaaagcatttgagcgcgactcggaccgatg

SEQ ID NO: 12511 - DNA, 203 bp, Artificial sequence
  synthetic
ggcgcgccagtcctcgacggcagaaaatgaagatgggatgttggtagaacaaatagtgtaagaaacagtaagcccggaagtggtgttttgaccccatcttaagtggctcgatcctcacctttcattgtcgataggggacattttgacactacctggaaaatgtcgtctgtgctcaaagcatttgagcgcgactcggaccgatg

SEQ ID NO: 12512 - DNA, 203 bp, Artificial sequence
  synthetic
ggcgcgccagtcctttcattaagaaaatgaagatgggatgttggtagaacaaatagtgtaagaaacagtaagcccggaagtggtgttttgcgatttcgaggccgggctcgatcctcacctttcattgtcgataggggacattttgacactacctggaaaatgtcgtctgtgctcaaagcatttgagcgcgactcggaccgatg

SEQ ID NO: 12513 - DNA, 203 bp, Artificial sequence
  synthetic
ggcgcgccagtcctagtaaggtgaaaatgaagtggtgactcaaatcatcgaagaccctcgagattacataggtccggaacctatggccttcgtgaccgacctcgagtcagagtagttcaataaggacctatcaagtttgggcaatttttcgtccccgacaacgtcggtcgtcgtgtgcttaaagcatacgactcggaccgatg

SEQ ID NO: 12514 - DNA, 203 bp, Artificial sequence
  synthetic
ggcgcgccagtcctgtaagacagaaaccacggctaaccacaatcaagtcatactactagtcactatacaataatcaacaattttagtcaactgattaccaagatgttatcataggtccgaactgatcaatctaacaaaaaaactaaacgttccacaataaatcaacgttcaggccaaaatattcagcccgactcggaccgatg

SEQ ID NO: 12515 - DNA, 203 bp, Artificial sequence
  synthetic
ggcgcgccagtcctacacgaccgaaacgagattgtgaggtgcattggtctgcaaatcgagttgctaggcaataaacacatttggattaattttaatcgttcgttgagcgattagcagagaactgaccagaacatgtctggtcgtaaagctcagggaaaaaccctgggcgtcaatatggtacgacgaggcgactcggaccgatg

SEQ ID NO: 12516 - DNA, 203 bp, Artificial sequence
  synthetic
ggcgcgccagtccttgagtgatgaaagatggcggcgtctgtggtttgagccttcagtagcaggccagagtctgaacaagagctggggtggagggggcggggacctggggagcccggcgggtcgctatcgcggggggtactagtggcgccgccgccacagacaccaacgctgtcgccacctctgtagcccgactcggaccgatg

SEQ ID NO: 12517 - DNA, 203 bp, Artificial sequence
  synthetic
ggcgcgccagtcctaagaaattgaaaggaaccggaaacgggatggggagctggaccaggtgacagcggcatggacatatgccccaggctttcctgctggggtccatccatgagcctgccctgaaaacgtctcagccccagccctgccctggaagcttggctgagagcttcctggaggaggagcttcggcgactcggaccgatg

SEQ ID NO: 12518 - DNA, 203 bp, Artificial sequence
  synthetic
ggcgcgccagtccttcccgttcgaaaggaaccggaaacgggatggggagctggaccaggtgatcagcagcgcacattatgccccaggctttcctgctggggtccatccatgagcctgcaggtgccctcatggagccccagccctgccctggaagcttggctgagagcttcctggaggaggagcttcggcgactcggaccgatg

SEQ ID NO: 12519 - DNA, 203 bp, Artificial sequence
  synthetic
ggcgcgccagtcctcctaaagggaaaggaaccggaaacgggatggggattctccggccagaccagcggcatggacatatgccccaggctttcctgctggggtccatccatgagcctgcaggtgccctcatggagccccagccctgccctggaagcttggctgagagcttcctggaggaggagcttcggcgactcggaccgatg

SEQ ID NO: 12520 - DNA, 203 bp, Artificial sequence
  synthetic
ggcgcgccagtcctagcccagagaaaggaaccggccggctacatcatcgctggaccaggtgacagcggcatggacatatgccccaggctttcctgctggggtccatccatgagcctgcaggtgccctcatggagccccagccctgccctggaagcttggctgagagcttcctggaggaggagcttcggcgactcggaccgatg

SEQ ID NO: 12521 - DNA, 203 bp, Artificial sequence
  synthetic
ggcgcgccagtcctggagtagtgaaaggcccgccgggtgtttgccagcagcctgcactctcagaaatcagacttgagtggccggaacccttgagaccagaggcttaccatgctgctccctaggagggccaggaactgctgacgtgaccactggacagttattcgtgtctcttacaattaccaaacagacgactcggaccgatg

SEQ ID NO: 12522 - DNA, 203 bp, Artificial sequence
  synthetic
ggcgcgccagtccttcgttatagaaatccgcatagccaattcctgtggtaatccttaccgtggcgagttccgcgctcaatggagacgtttgaccccaccgagctgcccgagctgcttaaactttattaccggaggctctttccctactctcagtactatcgctggctcaactacggtggagtgataaacgactcggaccgatg

SEQ ID NO: 12523 - DNA, 203 bp, Artificial sequence
  synthetic
ggcgcgccagtcctagtgctgcgaaatttcgtcaagtttgtaaactggttaggcaagtgttgtattttctgtgtctaagcactggtgattctgttcactagtgcatacattgatatttaagtggtgttccgtcactgcttattgtggaagcaacgttctgggacaaatactttaaataactgctaacccgactcggaccgatg

SEQ ID NO: 12524 - DNA, 203 bp, Artificial sequence
  synthetic
ggcgcgccagtcctcttccactgaaatttcgtcaagtttgtaaactggttaggcaagtgttgtattttctgtgtctaagcactggtgattctgttcactagtgcatacattgatatttaagtggtgttccgttgtaaacagaacacgaagcaacgttctgtcgttgtggaaaccaataactgctaacccgactcggaccgatg

SEQ ID NO: 12525 - DNA, 203 bp, Artificial sequence
  synthetic
ggcgcgccagtcctaggtattggaaatttcgtcaagtttgtaaactggttaggcaagtgttgtattttctgtgtctaagcactggtgattctgttcactagtgcatacattgatatttccccaaccactttgcactgcttattgtggaagcaacgttctgtcgttgtggaaaccaataactgctaacccgactcggaccgatg

SEQ ID NO: 12526 - DNA, 203 bp, Artificial sequence
  synthetic
ggcgcgccagtcctctctctcggaaatttcgtcattcagccgtgagtcttaggcaagtgttgtattttctgtgtctaagcactggtgattctgttcactagtgcatacattgatatttaagtggtgttccgtcactgcttattgtggaagcaacgttctgtcgttgtggaaaccaataactgctaacccgactcggaccgatg

SEQ ID NO: 12527 - DNA, 203 bp, Artificial sequence
  synthetic
ggcgcgccagtcctaatttcatgaacagaccaccgattgccaagggaggagccgacaaacagcagatggacgctgagctgcggaaggagatgatggcgatttggcccaatctgtcccagaagacgctagacctgctggtcacacctcacaagtccacggacctcaccgtggggaagatctacgcagcccgactcggaccgatg

SEQ ID NO: 12528 - DNA, 203 bp, Artificial sequence
  synthetic
ggcgcgccagtcctaagtgctcgaacatatgggcgtctgagtgtgttgtgggggcaatataacaaaaaaacatgttatggtgccattaaaccgctgcatttcatcaaagtcaagttaattacctttacattttgatcctcttggatgtgaaaaaaactattaacatccctcaaaagactcaaggaaagcgactcggaccgatg

SEQ ID NO: 12529 - DNA, 203 bp, Artificial sequence
  synthetic
ggcgcgccagtcctacaagaatgaaccacaagttgggtagcctggcagtgtcagaagtctgaacccagcatagtggtcagcaggcaggacgaatcacactgaatgcaaaccacagggtttcgcagcgtggtacgtagcgggtgcatgtcccccgccttcagaagagggtgcattttcaggaggaagcgcgactcggaccgatg

SEQ ID NO: 12530 - DNA, 203 bp, Artificial sequence
  synthetic
ggcgcgccagtcctcggcgtgagaacgtgtgctgtcgcgcgagacagcggaaggagcaagagtgggaggcgcgcgcggaggccgcgacggacgcaagatggcgacggcgaccatagctctcgtcaatggccagcaaggaggggggtccgagccggcggcggcggcggcagtggtggcagcgggagacacgactcggaccgatg

SEQ ID NO: 12531 - DNA, 203 bp, Artificial sequence
  synthetic
ggcgcgccagtcctggctcctggaagaagtcaaacgtggtgtagtctgagattctctgggatataagaggcagccgaagagttcacaagtgtgaagcctggaagccggcgggtgccgctgtgtaggaaagaagctaaagcacttccagagcctgtccggagctcagaggttcggaagacttatcgacccgactcggaccgatg

SEQ ID NO: 12532 - DNA, 203 bp, Artificial sequence
  synthetic
ggcgcgccagtccttggtacgcgaagacaaacaacgtctgtagcgaccctttgcaggcagcggaaccccccacctggcgacaggtgcctctgcggccaaaagccacgtgtataagatacacctgcaaaggcggcacaaccccagtgccacgttgtgagttatggttacaaatccagagtcaaatggctcgactcggaccgatg

SEQ ID NO: 12533 - DNA, 203 bp, Artificial sequence
  synthetic
ggcgcgccagtcctgttcaattgaagacaaacaacgtctgtagcgaccctttgcaggcagcggaaccccccacctggcgacaggtgcctctgcggccaaaagccacgtgtataagatacacctgcaaaggcggcacaaccccagtgccacgttgtgagttggatagttgtggaatttagaggtgcttacgactcggaccgatg

SEQ ID NO: 12534 - DNA, 203 bp, Artificial sequence
  synthetic
ggcgcgccagtcctgatgaatcgaagacaaacaacgtctgtagcgaccctttgcaggcagcggaaccccccacctggcgacaggtgcctctgcggccaaaagccacgtgtataagatagggtcatccgttgagcacaaccccagtgccacgttgtgagttggatagttgtggaaagagtcaaatggctcgactcggaccgatg

SEQ ID NO: 12535 - DNA, 203 bp, Artificial sequence
  synthetic
ggcgcgccagtcctcatcccacgaagacaaacaacgtctgtagcgacctacaatccaaccacgaaccccccacctggcgacaggtgcctctgcggccaaaagccacgtgtataagatacacctgcaaaggcggcacaaccccagtgccacgttgtgagttggatagttgtggaaagagtcaaatggctcgactcggaccgatg

SEQ ID NO: 12536 - DNA, 203 bp, Artificial sequence
  synthetic
ggcgcgccagtcctgaggttcggaagccgcaaccggtttaagctatcgtaccattatgaaaacaattcttggttcttccgacatgtctacaggaaaagttttcatttccgtaaggcttgtcaaaatttagattgtaattgtttggggttttatgaatcttcagttgaagaatattaaactcagtgaaacgactcggaccgatg

SEQ ID NO: 12537 - DNA, 203 bp, Artificial sequence
  synthetic
ggcgcgccagtcctgggctgatgaagcgccccagccccgcagcgatcgcagattcggctttcaaacaaaagaggcgaagtaatctacacaaccgggacctcacccggtcctcgcagagttgcggccgcccgccccttcagccccggctctccgtatgcgcatgagcagaggcgcctccctctgttcctcgactcggaccgatg

SEQ ID NO: 12538 - DNA, 203 bp, Artificial sequence
  synthetic
ggcgcgccagtcctagaccctggaagcgccccagccccgcagcgatcgcagattcggctttcaaacaaaagaggcgccccggggggtgggaccgggacctcacccggtcctcgcagaggacttagtcaagagcccttcagccccggctctccgtatgcgcatgagcagaggcgcctccctctgttcctcgactcggaccgatg

SEQ ID NO: 12539 - DNA, 203 bp, Artificial sequence
  synthetic
ggcgcgccagtcctcgtgacgagaagctggcaacatgtcacacctggaaattgtttttcaacattaatactattatttggcagtaatccagattgcttttgccaccaacctgaagacatatagaggcagaaggacaggaataattctatttgtttcctgttttgaaacttccatggcgggcccccaagcgactcggaccgatg

SEQ ID NO: 12540 - DNA, 203 bp, Artificial sequence
  synthetic
ggcgcgccagtcctgcgaacccgaagctggcaacatgtcacacctggaggagcgacacggctattaatactattatttggcagtaatccagattgcttttgccaccaacctgaagacatatagaggcagaaggacaggaataattctatttgtttcctgttttgaaacttccatctgtaagtattgttcgactcggaccgatg

SEQ ID NO: 12541 - DNA, 203 bp, Artificial sequence
  synthetic
ggcgcgccagtcctcgagcccggaagcttctgcgaaacgtggacagtcccgactttcctccggactcctgcacgacctgctcctacagccggcgatccactcccggctgttcccccggagggtccagaggcctttcagaaggagaaggcagctctgtttctctgcagaggagtagggtcctttcagcccgactcggaccgatg

SEQ ID NO: 12542 - DNA, 203 bp, Artificial sequence
  synthetic
ggcgcgccagtcctgcttgagggaagcttctgcgctggtgcttagtaaccgactttcctccggactcctgcacgacctgctcctacagccggcgatccactcccggctgttcccccggagggtccagaggcctttcagaaggagaaacggtggtgtcccttctgcagaggagtagggtcctttcagcccgactcggaccgatg

SEQ ID NO: 12543 - DNA, 203 bp, Artificial sequence
  synthetic
ggcgcgccagtccttccacgtggaagcttctgcgctggtgcttagtaaccgactttcctccggactcctgcacgacctgctcctacagccggcgatccactcccggctgttcccccggagggtccagaggcctttcagaaggagaaggcagctctgtttctctgcagaggagtagggtcctttcagcccgactcggaccgatg

SEQ ID NO: 12544 - DNA, 203 bp, Artificial sequence
  synthetic
ggcgcgccagtcctgttcgcgagaagcttctgcgctggtgcttagtaaccgactttcctccggactcctgcacgacctgctcctacagccggcgatccactcccggctgttcccccggttatcgtctttaagtttcagaaggagaaggcagctctgtttctctgcagaggagtagggtcctttcagcccgactcggaccgatg

SEQ ID NO: 12545 - DNA, 203 bp, Artificial sequence
  synthetic
ggcgcgccagtcctgcctaagcgaagcttctgcgctggtgcttagtaaccgactttcctccggactcctgcacgactgctggggctctgtggcgatccactcccggctgttcccccggagggtccagaggcctttcagaaggagaaggcagctctgtttctctgcagaggagtagggtcctttcagcccgactcggaccgatg

SEQ ID NO: 12546 - DNA, 203 bp, Artificial sequence
  synthetic
ggcgcgccagtccttcaactgggaaggaggaggcacccacaggctgctgggaggagagcataaggaatctacttgaaaatggatcggtttatgttggattaaatgctgctctttgtggaggtcgtcacgtttgtctttttcgacgcatcttgaatgtgacaaaggctcgcatagctgctggcttaccacgactcggaccgatg

SEQ ID NO: 12547 - DNA, 203 bp, Artificial sequence
  synthetic
ggcgcgccagtcctaaccgtaagaaggaggaggcacccacaggctgctgggaggagagcataaggaatctacttgaaaatggatcggtttatgttggattaaatgctgctctttgtggcctcatagcaaacagtctttttcgacgcatcttgaatgtgaccccaagaatacgtactgctggcttaccacgactcggaccgatg

SEQ ID NO: 12548 - DNA, 203 bp, Artificial sequence
  synthetic
ggcgcgccagtcctacgaagaagaaggaggaggccatgcgccaaatgagggaggagagcataaggaatctacttgaaaatggatcggtttatgttggattaaatgctgctctttgtggcctcatagcaaacagtctttttcgacgcatcttgaatgtgacaaaggctcgcatagctgctggcttaccacgactcggaccgatg

SEQ ID NO: 12549 - DNA, 203 bp, Artificial sequence
  synthetic
ggcgcgccagtcctggcccgctgaatactgtaccttgatcttagggccaatcggtgctgccgaggtaactctctggtcctaggtggaggtgtaggggaggttgggccagggatgccttcactgtgtctctctggtcttgccaccccagaccgagggacacacaggcactgctgtctgcaacacaagcacgactcggaccgatg

SEQ ID NO: 12550 - DNA, 203 bp, Artificial sequence
  synthetic
ggcgcgccagtcctggtagattgaatactgtaccttgatcttagggcctggaaaaatcaggtaggtaactctctggtcctaggtggaggtgtaggggaggttgggccagggatgccttcactgtgtctctctggtcttgccaccccagaccgagggacacacaggcactgctgttccggcgtgcgtaccgactcggaccgatg

SEQ ID NO: 12551 - DNA, 203 bp, Artificial sequence
  synthetic
ggcgcgccagtccttccaaggcgaatactgtaccttgatcttagggcctggaaaaatcaggtaggtaactctctggtcctaggtggaggtgtaggggaggttgggccagggatgccttcactgtgtctctctggtcttgccaccccgccttatctctgggacaggcactgctgtctgcaacacaagcacgactcggaccgatg

SEQ ID NO: 12552 - DNA, 203 bp, Artificial sequence
  synthetic
ggcgcgccagtcctcgtggaaggaatggctgcttatggtgacaatcatagattgttatcataaagcgagttggattggccatccagtgtgaatcagattaattactcccttgtttgttggatccactcccgaaacgttttactcctatcgggcagctccctgtttgaagacaggatttcagtgtcacacgactcggaccgatg

SEQ ID NO: 12553 - DNA, 203 bp, Artificial sequence
  synthetic
ggcgcgccagtcctctcagctggaatggctgcttatggtgacaatcatagattgttatcataaagcgagttggattggccatccagtgtgaatcagattaattactcccttgtttgttggatccactcccgaaacgttttactccttaacttattgaaattgtttgaagacaggcgcggctgtgagatcgactcggaccgatg

SEQ ID NO: 12554 - DNA, 203 bp, Artificial sequence
  synthetic
ggcgcgccagtcctttcacatagaatggctgcttatggtgacaatcatagattgttatcataaagcgagttggattggccatccagtgtgccgggcgggccagcctcccttgtttgttggatccactcccgaaacgttttactccttaacttattgaaattgtttgaagacaggatttcagtgtcacacgactcggaccgatg

SEQ ID NO: 12555 - DNA, 203 bp, Artificial sequence
  synthetic
ggcgcgccagtcctattcgtaggaatggctgcttatggtgacaatcatagattgttatcataaagcgagttggattggccatccagtgtgcgattctgagcgccctcccttgtttgttggatccactcccgaaacgttttactccttaacttattgaaattgtttgaagacaggatttcagtgtcacacgactcggaccgatg

SEQ ID NO: 12556 - DNA, 203 bp, Artificial sequence
  synthetic
ggcgcgccagtcctgtagcaaagaatggctgcttatggtgacaatcatagattgttatcataaagcgagttggatttagggcttttctgaaatcagattaattactcccttgtttgttggatccactcccgaaacgttttactccttaacttattgaaattgtttgaagacaggatttcagtgtcacacgactcggaccgatg

SEQ ID NO: 12557 - DNA, 203 bp, Artificial sequence
  synthetic
ggcgcgccagtcctccgcaggtgaatttctgattgaggcgctaacagctaattccacaggagttgtaaggcagcctgtgcataaactgagacagaagtttctcctcagagactctctttttattattattattattattattggcacttggcagactgattcctcagaggaataccttgttgcttaagcgactcggaccgatg

SEQ ID NO: 12558 - DNA, 203 bp, Artificial sequence
  synthetic
ggcgcgccagtcctatttatgtgacaccaccagcatacacgaaaccaaccttcacagtggatacctcagcatccaaaactctccttcccgaatggatcaggatgccttcttttttgagagggatcctgaagccgaaggagaggcaccacgaaaacaagaaggttaactgttatgcatcggactccttgcgactcggaccgatg

SEQ ID NO: 12559 - DNA, 203 bp, Artificial sequence
  synthetic
ggcgcgccagtccttggttcaagacaccaccagcatacacgaaaccaaccttcacagtggatacctcagcatccaaaactctccttcccgaatggatcaggatgccttcttttttgagagggatcctgaagccgaaggagaggcaccacgaaaacaagaatcactctcagatgtatctttcagaagctcgactcggaccgatg

SEQ ID NO: 12560 - DNA, 203 bp, Artificial sequence
  synthetic
ggcgcgccagtcctcataacgcgacaccaccagcatacacgaaaccaaccttcacagtggatacctcagcatccaaaactctccttcccgaatggatcaggatgttgcggcgggatgaagggatcctgaagccgaaggagaggcaccacgaaaacaagaatcactctcagatgtcatcggactccttgcgactcggaccgatg

SEQ ID NO: 12561 - DNA, 203 bp, Artificial sequence
  synthetic
ggcgcgccagtcctaccttacggacaccaccagcatacacgaaaccaaccttcacagtggatacctcagcatccaaaactctccttcccggcacttaggtatgcccttcttttttgagagggatcctgaagccgaaggagaggcaccacgaaaacaagaatcactctcagatgtcatcggactccttgcgactcggaccgatg

SEQ ID NO: 12562 - DNA, 203 bp, Artificial sequence
  synthetic
ggcgcgccagtcctgcgaggaggacaccaccagcatacacgaaaccaaccttcacagtggatacctcagcatccaatcgaagagcgggtcaatggatcaggatgccttcttttttgagagggatcctgaagccgaaggagaggcaccacgaaaacaagaatcactctcagatgtcatcggactccttgcgactcggaccgatg

SEQ ID NO: 12563 - DNA, 203 bp, Artificial sequence
  synthetic
ggcgcgccagtcctgtcgcagcgacaccaccagcatacacgaaaccaaccttcacagtggatcaaatcctcatggcaactctccttcccgaatggatcaggatgccttcttttttgagagggatcctgaagccgaaggagaggcaccacgaaaacaagaatcactctcagatgtcatcggactccttgcgactcggaccgatg

SEQ ID NO: 12564 - DNA, 203 bp, Artificial sequence
  synthetic
ggcgcgccagtcctgcacaggagacaccaccagcatacacgaaaccaatgacatgttgtttcacctcagcatccaaaactctccttcccgaatggatcaggatgccttcttttttgagagggatcctgaagccgaaggagaggcaccacgaaaacaagaatcactctcagatgtcatcggactccttgcgactcggaccgatg

SEQ ID NO: 12565 - DNA, 203 bp, Artificial sequence
  synthetic
ggcgcgccagtcctctacgattgacaccaccagcggctgttcctgtccccttcacagtggatacctcagcatccaaaactctccttcccgaatggatcaggatgccttcttttttgagagggatcctgaagccgaaggagaggcaccacgaaaacaagaatcactctcagatgtcatcggactccttgcgactcggaccgatg

SEQ ID NO: 12566 - DNA, 203 bp, Artificial sequence
  synthetic
ggcgcgccagtcctgggtccgagacactgtcccatgggtgaagagttctgcagccttacagagactggaaaagaagcccaaaccaaggcccccagagaggtcccccaggcccctttgggtccctgagcctcagctggagatccggcgcaggagaccaacgcctgccatgctgttccggctctcagagccgactcggaccgatg

SEQ ID NO: 12567 - DNA, 203 bp, Artificial sequence
  synthetic
ggcgcgccagtcctgtccgtcggacataatggattccaacacgataacctcgtttcaggtagattgttatctatggcacataagaaagctactcagtatgagagacatgtgtgatgccaggagatcaactcagctccgaagagaccaaaaggcattaaagggaagaggcagcacacttggactcgattcgactcggaccgatg

SEQ ID NO: 12568 - DNA, 203 bp, Artificial sequence
  synthetic
ggcgcgccagtcctttactgtcgacataatggattccaacacgataacctcgtttcaggtagattgttatctatggcacataagaaagctactcagtatgagagacatgtgtgatgccccctttgatgacaggctccgaagagaccaaaaggcattaaagattcagttagctcaacttggactcgattcgactcggaccgatg

SEQ ID NO: 12569 - DNA, 203 bp, Artificial sequence
  synthetic
ggcgcgccagtcctggttgaccgacatggtgcgaagagtctattgagctagttggtagtcctccggcccctgaatgcggctaatcctaacatgcataggatatgcctcaagccagagggcagtgtgtcgtaacgggcaactctgcagcggaaccgactactttgggtgtccgtgtttcattttattcccgactcggaccgatg

SEQ ID NO: 12570 - DNA, 203 bp, Artificial sequence
  synthetic
ggcgcgccagtccttctagttggacatggtgcgaagagtctattgagctagttggtagtcctccggcccctgaatgcggctaatcctaactgcggagcacacaccctcaagccagagggcagtgtgtcgtaacgggcaactctgcaatcctgagcgtctgtttgggtgtccgtgtttcattttattcccgactcggaccgatg

SEQ ID NO: 12571 - DNA, 203 bp, Artificial sequence
  synthetic
ggcgcgccagtcctggaaagtggacatggtgcgaagagtctattgagctagttggtagtcctccggcccctgaatgcggctaatcctaactgcggagcacacaccctcaagccagagggcagtgtgtcgtaacgggcaactctgcagcggaaccgactactttgggtgtccgtgtttcattttattcccgactcggaccgatg

SEQ ID NO: 12572 - DNA, 203 bp, Artificial sequence
  synthetic
ggcgcgccagtcctcaatcattgacatggtgcgaagagtctattgagctagttggtagtcctggattgaagatcgtcggctaatcctaactgcggagcacacaccctcaagccagagggcagtgtgtcgtaacgggcaactctgcagcggaaccgactactttgggtgtccgtgtttcattttattcccgactcggaccgatg

SEQ ID NO: 12573 - DNA, 203 bp, Artificial sequence
  synthetic
ggcgcgccagtcctccacaccagacatggtgcgatcctctgtaacttgtagttggtagtcctccggcccctgaatgcggctaatcctaactgcggagcacacaccctcaagccagagggcagtgtgtcgtaacgggcaactctgcagcggaaccgactactttgggtgtccgtgtttcattttattcccgactcggaccgatg

SEQ ID NO: 12574 - DNA, 203 bp, Artificial sequence
  synthetic
ggcgcgccagtcctgggcgatagaccacgctggggtttgccatggtgacataaaggggtgtagaggaaggaaggagcaagaccagcctgtagactgtgcccctgaaaacttgggcaaaccaggggcccggagccttccctccactgccctcgaacgcctcacttcctaagtctctgcatttctcagtccgactcggaccgatg

SEQ ID NO: 12575 - DNA, 203 bp, Artificial sequence
  synthetic
ggcgcgccagtcctctttattggaccacgctggggtttgccatggtgacataaaggggtgtagaggaaggaaggagcaagaccagcctgtagactgtgcccctggctgggcaaaagggaacactattgtcgcccttccctccactgccctcgaacgcctcacttcctaagtctctgcatttctcagtccgactcggaccgatg

SEQ ID NO: 12576 - DNA, 203 bp, Artificial sequence
  synthetic
ggcgcgccagtcctgggaagctgaccacgctggggtttgccatggtgacataaaggggtgtagaggaaggaaggagcaagaccagcctgtagactgtgcccctggctgggcaaaagggccaggggcccggagaacaggtaatctccccctcgaacgcctcacttcctaagtctctgcatttctcagtccgactcggaccgatg

SEQ ID NO: 12577 - DNA, 203 bp, Artificial sequence
  synthetic
ggcgcgccagtcctgatcttatgaccacgctggggtttgccatggtgacataaaggggtgtagaggaaggaaggagcaagaccagcctgtagactgtgcccctggctgggcaaaagggccaggggcccggagccttccctccactgccctcgaacgcctcacttcctaagtctctgcatttctcagtccgactcggaccgatg

SEQ ID NO: 12578 - DNA, 203 bp, Artificial sequence
  synthetic
ggcgcgccagtcctgactaatagaccacgctggggtttgccatggtgacataaaggggtgtagaggaaggaaggagcaagaccagcctgtccgtgtaaagatctgctgggcaaaagggccaggggcccggagccttccctccactgccctcgaacgcctcacttcctaagtctctgcatttctcagtccgactcggaccgatg

SEQ ID NO: 12579 - DNA, 203 bp, Artificial sequence
  synthetic
ggcgcgccagtccttttcgtccgaccacgctggggtttgccatggtgacataaaggggtgtagaggaaggaaggagtcgatggcaaagacagactgtgcccctggctgggcaaaagggccaggggcccggagccttccctccactgccctcgaacgcctcacttcctaagtctctgcatttctcagtccgactcggaccgatg

SEQ ID NO: 12580 - DNA, 203 bp, Artificial sequence
  synthetic
ggcgcgccagtcctatcctaaggaccacgctggggtttgccatggtgatggtctcccagcctgaggaaggaaggagcaagaccagcctgtagactgtgcccctggctgggcaaaagggccaggggcccggagccttccctccactgccctcgaacgcctcacttcctaagtctctgcatttctcagtccgactcggaccgatg

SEQ ID NO: 12581 - DNA, 203 bp, Artificial sequence
  synthetic
ggcgcgccagtccttgtgtggggaccggtcactaccaaggacgcagacctctttttgagtatcacgcctccggaagtagttgggcaagcccacctatatgtgttccatgatgcacttctagccatccataccgtactgcctgatagggtccttgcgaggggatctgggagtctcgtagaccgtagcaccgactcggaccgatg

SEQ ID NO: 12582 - DNA, 203 bp, Artificial sequence
  synthetic
ggcgcgccagtcctagttggtagaccggtcactaccaaggacgcagacctctttttgagtatcacgcctccggaagtagttgggcaagcccacctatatgtgttgggatggttggggtcgcaaccagtaggtgtactgcctgatagggtccttgcgaggggatctgggagtctcgtagaccgtagcaccgactcggaccgatg

SEQ ID NO: 12583 - DNA, 203 bp, Artificial sequence
  synthetic
ggcgcgccagtcctagaggagagaccggtcactaccaaggacgcagacctctttttgagtatcacgcctccggaagtagttgggcaagcccacctatatgtgttgggatggttggggttagccatccatacccgtgccaggctcgcggtccttgcgaggggatctgggagtctcgtagaccgtagcaccgactcggaccgatg

SEQ ID NO: 12584 - DNA, 203 bp, Artificial sequence
  synthetic
ggcgcgccagtcctgtgtcgtcgaccggtcactaccaaggacgcagacctctttttgagtatcacgcctccggaagtagttgggcaagcccacctatatgtgttgggatggttggggttagccatccataccgtactgcctgatagatatgcctattattgatctgggagtctcgtagaccgtagcaccgactcggaccgatg

SEQ ID NO: 12585 - DNA, 203 bp, Artificial sequence
  synthetic
ggcgcgccagtcctgacctgaagaccggtcactaccaaggacgcagacctctttttgagtatggatatcatatttatagttgggcaagcccacctatatgtgttgggatggttggggttagccatccataccgtactgcctgatagggtccttgcgaggggatctgggagtctcgtagaccgtagcaccgactcggaccgatg

SEQ ID NO: 12586 - DNA, 203 bp, Artificial sequence
  synthetic
ggcgcgccagtcctagcacttggaccggtcactaccaaggacgcagactgggaggcctactgcacgcctccggaagtagttgggcaagcccacctatatgtgttgggatggttggggttagccatccataccgtactgcctgatagggtccttgcgaggggatctgggagtctcgtagaccgtagcaccgactcggaccgatg

SEQ ID NO: 12587 - DNA, 203 bp, Artificial sequence
  synthetic
ggcgcgccagtcctgcgcaagggaccggtcactatatgccggatgcggctctttttgagtatcacgcctccggaagtagttgggcaagcccacctatatgtgttgggatggttggggttagccatccataccgtactgcctgatagggtccttgcgaggggatctgggagtctcgtagaccgtagcaccgactcggaccgatg

SEQ ID NO: 12588 - DNA, 203 bp, Artificial sequence
  synthetic
ggcgcgccagtcctcaacgaaggaccggtcactatgtcatctatgtcactctttttgagtatcacgcctccggaagtagttgggcaagcccacctatatgtgttgggatggttggggttagccatccataccgtactgcctgatagggtccttgcgaggggatctgggagtctcgtagaccgtagcaccgactcggaccgatg

SEQ ID NO: 12589 - DNA, 203 bp, Artificial sequence
  synthetic
ggcgcgccagtccttaggatcagaccggtcggaacgagctgattgcccgctacatcaagctcaaatgcactggactccgcaccaggaagcaggtctccagccacatccaggtgctggctcgtcgcaaagctcgcgagatccaggccaagctaaaggaccaggcagctaaggacaaggccctgcagagccgactcggaccgatg

SEQ ID NO: 12590 - DNA, 203 bp, Artificial sequence
  synthetic
ggcgcgccagtcctattacggagaccggtcggaacgagctgattgcccgctacatcaagctccggacagggaagacccgcaccaggaagcaggtctccagccacatccaggtgctggcctccacgtgtcgatgcgagatccaggccaagctaaaggaccaggcagctaaggacaaggccctgcagagccgactcggaccgatg

SEQ ID NO: 12591 - DNA, 203 bp, Artificial sequence
  synthetic
ggcgcgccagtcctgtttgtctgaccggtcggaacgagctgattgcccgctacatcaagctccggacagggaagacccgcaccaggaagcgcaagatacaaacgatccaggtgctggctcgtcgcaaagctcgcgagatccaggccaagctaaaggaccaggcagctaaggacaaggccctgcagagccgactcggaccgatg

SEQ ID NO: 12592 - DNA, 203 bp, Artificial sequence
  synthetic
ggcgcgccagtcctcctcaaacgacctgagtaaatttaattgcaaacagtggcttgagcgatttgtgcaattaaaggatagtgatattaatgaaatggtgcttagtcttgttaggagtggtaagttgcttgtaaggggtaatggcaagtgtttgagttttagtaatcatttagtctcaactaaataaacgactcggaccgatg

SEQ ID NO: 12593 - DNA, 203 bp, Artificial sequence
  synthetic
ggcgcgccagtcctttatttatgacgcgaggctctgcggagaccaggagtcagactgtaggaaagttaaaaccatgacgtgtccccggtactcgccggccggagcccccggcttcccggggccgggggaccttagcggcacccacacacagcctactttccaagcggagccatgtctggtaacggcaacgactcggaccgatg

SEQ ID NO: 12594 - DNA, 203 bp, Artificial sequence
  synthetic
ggcgcgccagtcctgtagaactgacgcgaggctctgcggagaccaggagtcagactgtaggacgacctcgggtcccacgtgtccccggtactcgccggccggagaggaacctgggagagggccgggggaccttagcggcacccacacacagcctactttccaagcggagccatgtctggtaacggcaacgactcggaccgatg

SEQ ID NO: 12595 - DNA, 203 bp, Artificial sequence
  synthetic
ggcgcgccagtcctctaatgatgacgcgaggctctgcggagaccaggagtcagactgtaggacgacctcgggtcccacgtgtccccggtactcgccggccggagcccccggcttcccgactatcatctggtatagcggcacccacacacagcctactttccaagcggagccatgtctggtaacggcaacgactcggaccgatg

SEQ ID NO: 12596 - DNA, 203 bp, Artificial sequence
  synthetic
ggcgcgccagtcctacgcgcctgacgggacccgacggtgactgcgcaagcaaggaatagtgtctggagccggtccagctgaaggaagggtgagcagagagtgcaagcaggacccttgtcggtgggtgaacattttgctccaaaagggatccttggccctgcgcaggtggatttcagtgtgttctttggcgactcggaccgatg

SEQ ID NO: 12597 - DNA, 203 bp, Artificial sequence
  synthetic
ggcgcgccagtcctgaacctgggacgttagcgacaataaaattctgtacataaaagtcgaaagtattgctatagttaaggttgcgcttgcctatttaggcatacttctcaggatggcgcgttgcagtccaacaagatccagggactgtacagaattttcctatacctcgagtcgggtttggaatctaacgactcggaccgatg

SEQ ID NO: 12598 - DNA, 203 bp, Artificial sequence
  synthetic
ggcgcgccagtccttgaaaccagactccggctcggcgcactgcacagctctcttctctcgccgccgcccgagcgcacccttcagcccgcgcgccggccgtgagtcctcggtgctcgcccgccggccagacaaacagcccgcccgaccccgtcccgaccctggccgccccgagcggagcctggagcaaacgactcggaccgatg

SEQ ID NO: 12599 - DNA, 203 bp, Artificial sequence
  synthetic
ggcgcgccagtcctgcagcctggactcctatcgcggacccccaccgctgcccttcccggggaggcgggaaatgcatggggccacccagctccgcggcggcctacagccggggtagcccaagaaccttcgggtgagggcgggtggcattttcttttcctataccgatcatggcagtccttctgctcctacgactcggaccgatg

SEQ ID NO: 12600 - DNA, 203 bp, Artificial sequence
  synthetic
ggcgcgccagtccttgttatgggactgattcatcactgttttcttactcttagtctgagtgactgccaaggaaggcaaaggtagagcaactggatctctggctctccacatagcttctgatctcagaccttactaaaatgctttctgggcccaaggacaaagctcacatgaacaaatgattttgagtccgactcggaccgatg

SEQ ID NO: 12601 - DNA, 203 bp, Artificial sequence
  synthetic
ggcgcgccagtcctgcccgtgagacttattaggcggcgggaggcggggtccgagtcaccgcctgccgccgcgcccccggtttctataaattgagcccgcagcctcccgcttcgctctctgctcctcctgttcgacagtcagccgcatcttcttttgcgtcgccagccgagccacatcgctcagacacccgactcggaccgatg

SEQ ID NO: 12602 - DNA, 203 bp, Artificial sequence
  synthetic
ggcgcgccagtccttcctggctgacttgtcagcaccgtcaggtgacactatcctaaaggcagaagccttcaggtctgacccagccaatcaaagcattataccagaccatggaatgcataccaaacattattgacactaatgacacacaaaattggttttaagaaaaaccaagagaacaataggccagacgactcggaccgatg

SEQ ID NO: 12603 - DNA, 203 bp, Artificial sequence
  synthetic
ggcgcgccagtccttgccgaccgactttgaaatccaacccggtcacctacccgcgcgactgtcaaacgttggacgccgaaagccaagcgagtccccctgccgagctactcgcgtccgcctcctcccaagctgagctctgctccgcccacctgagtccttcgccagttaggaggaaacacagccgcttacgactcggaccgatg

SEQ ID NO: 12604 - DNA, 203 bp, Artificial sequence
  synthetic
ggcgcgccagtccttttagacggactttgaaatccaacccggtcacctacccgcgcgactgtgtccacggatggcacgaaagccaagcgagtccccctgccgagctactcgcgtccgcctcctcccaagctgagctctgctccgcccacctgagtccttcgccagttaggaggaaacacagccgcttacgactcggaccgatg

SEQ ID NO: 12605 - DNA, 203 bp, Artificial sequence
  synthetic
ggcgcgccagtcctaaacatacgactttgaaatccaacccggtcacctacccgcgcgactgtgtccacggatggcacgaaagccaagcgagtccccctgccgagctactcgcgtccgcctcctcccaagctgagctctgctccgcccacctgagtccttcgccagttaggaggatcgtagaaataacgcgactcggaccgatg

SEQ ID NO: 12606 - DNA, 203 bp, Artificial sequence
  synthetic
ggcgcgccagtccttttatcatgactttgaaatccaacccggtcacctacccgcgcgactgtgtccacggatggcacgaaagccaagcgagtccccctgccgagctactcgcgtccgcctcctcccaagctggagaagtagatttgcacctgagtccttcgccagttaggaggaaacacagccgcttacgactcggaccgatg

SEQ ID NO: 12607 - DNA, 203 bp, Artificial sequence
  synthetic
ggcgcgccagtcctgacaaaccgactttgaaatccaacccggtcacctacccgcgcgactgtgtccacggatggcacgaaagccaagcgagtccccctgccgagctactcgcgtccgctgaggtggccatccagctctgctccgcccacctgagtccttcgccagttaggaggaaacacagccgcttacgactcggaccgatg

SEQ ID NO: 12608 - DNA, 203 bp, Artificial sequence
  synthetic
ggcgcgccagtcctgcaaggttgacttttacatgcgccccagcccatgggccaggctgctcctggcagccttgatcagcgtcagcctctctgggaccttggcaaaccgctgcaagaaggccccagtgaagagctgcacggagtgtgtccgtgtggataaggactgcgcctactgcacagacgagatgtcgactcggaccgatg

SEQ ID NO: 12609 - DNA, 203 bp, Artificial sequence
  synthetic
ggcgcgccagtccttctaacgagagaaactccgtaggagtcatagcttaagcagatgaattagaaagaatcaggttacggcccggcggaaagaaaaagtacaggctaaaacatattgtgtgggcagcgaataaattggacagattcggattagcagagagcctgttggagtcaaaagagggttgtcaacgactcggaccgatg

SEQ ID NO: 12610 - DNA, 203 bp, Artificial sequence
  synthetic
ggcgcgccagtcctgtttccaagagaaactccgtcttgagagggaaaaaagcagatgaattagaaagaatcaggttacggcccggcggaaagaaaaagtacagggccgcgttcgagtggtgggcagcgaataaattggacagattcggattagcagagagcctgttggagtcaaaagagggttgtcaacgactcggaccgatg

SEQ ID NO: 12611 - DNA, 203 bp, Artificial sequence
  synthetic
ggcgcgccagtccttactaccagagaaactccgtcttgagagggaaaactttcatcacgcacgaaagaatcaggttacggcccggcggaaagaaaaagtacaggctaaaacatattgtgtgggcagcgaataaattggacagattcggattagcagagagcctgttggagtcaaaagagggttgtcaacgactcggaccgatg

SEQ ID NO: 12612 - DNA, 203 bp, Artificial sequence
  synthetic
ggcgcgccagtcctccatgtttgagaatcagatgcgcataagtagatgcgaattgcaaaaagattacgtaggtccggaaccactagattcggtgccggtaacgattccagttttatactatctgatcattctctatctctattaaggatatttctagtctaaagttcaaaatgtcaagtgttttaaagcgactcggaccgatg

SEQ ID NO: 12613 - DNA, 203 bp, Artificial sequence
  synthetic
ggcgcgccagtcctaagtctgagagaatcagatggcatcgttatatgacgaattgcaaaaagattacgtaggtccgagctattctcgcatggtgccggtaacgattccagttttatactatctgatcattctctatctctattaaggatatttctagtctaaagttcaaaatgtcaagtgttttaaagcgactcggaccgatg

SEQ ID NO: 12614 - DNA, 203 bp, Artificial sequence
  synthetic
ggcgcgccagtcctgaccactcgagaatcagatggcatcgttatatgatctgccttgccgctattacgtaggtccggaaccactagattcggtgccggtaacgattccagttttatactatctgatcattctctatctctattaaggatatttctagtctaaagttcaaaatgtcaagtgttttaaagcgactcggaccgatg

SEQ ID NO: 12615 - DNA, 203 bp, Artificial sequence
  synthetic
ggcgcgccagtcctgtcattctgagacccctttgtcatatcaatacaatatcaagtagtgtcgatgatctcattaggtactaatcctaacattgtgattcatcctgcattgagaaaagatttagaaaaaaactaaattaagaatgaatatcctggggtcgtaacgtctcgtgaccctgccgttgcactcgactcggaccgatg

SEQ ID NO: 12616 - DNA, 203 bp, Artificial sequence
  synthetic
ggcgcgccagtcctctctgatcgagacctggaatttccggtctggttggtctggggccccgcggagccaggttgataccctcacctcccaaccccaggccctcggatgcccagaacctcgttcgtaagttccggacttgttcttaatcgagggggtgctggggggaccctgatgtggcaccaaatgaacgactcggaccgatg

SEQ ID NO: 12617 - DNA, 203 bp, Artificial sequence
  synthetic
ggcgcgccagtccttcttcacggagacctggaatttccggtctggttggtctggggccccgcggagccaggttgataccctcacctcccaaccccaggccctcggatgcccagaacctgtaggccgcaccgtggacttgttcttaactagacctcacgacgggggaccctgatgtggcaccaaatgaacgactcggaccgatg

SEQ ID NO: 12618 - DNA, 203 bp, Artificial sequence
  synthetic
ggcgcgccagtccttgcaggacgagacctggaatttccggtctggttggtctggggccccgcggagccaggttgataccctcacctcccaaccccaggccctcggatgcccagaacctgtaggccgcaccgtggacttgttcttaatcgagggggtgctgcactacgtagcgcatggcaccaaatgaacgactcggaccgatg

SEQ ID NO: 12619 - DNA, 203 bp, Artificial sequence
  synthetic
ggcgcgccagtcctatccttccgagacctggaatttccggtctggttggtctggggccccgcggagccaggttgataccctcacctcccaaccccaggccctcggatgcccagaacctgtaggccgcaccgtggacttgttcttaatcgagggggtgctggggggaccctgatgtggcaccaaatgaacgactcggaccgatg

SEQ ID NO: 12620 - DNA, 203 bp, Artificial sequence
  synthetic
ggcgcgccagtcctggatgggagagacctggaatttccggtctggttggtctggggccccgcggagccaggttgataccctcacctcccattgttttaaatctagatgcccagaacctgtaggccgcaccgtggacttgttcttaatcgagggggtgctggggggaccctgatgtggcaccaaatgaacgactcggaccgatg

SEQ ID NO: 12621 - DNA, 203 bp, Artificial sequence
  synthetic
ggcgcgccagtcctaccaactggagagccaggagactctgatgatgaattctgaccagaaggcagtgaaattcctggcaaatttttacatcaatggaggcaaacactggacccatggtcacctgaggcagacacaaccagagcccacccagcccaaggcaaggcccagtcgtcggggcccggagccggcgactcggaccgatg

SEQ ID NO: 12622 - DNA, 203 bp, Artificial sequence
  synthetic
ggcgcgccagtcctacgctttcgagagccaggagactctgatgatgaattctgaccagaaggcagtgaaattcctggcaaatttttacatcaatggaggcaaacactggacccatggtcacctgaggcagacacaaccagagcccacccagcccaaggcatctgtgctgttgttgggcccggagccggcgactcggaccgatg

SEQ ID NO: 12623 - DNA, 203 bp, Artificial sequence
  synthetic
ggcgcgccagtcctacaagcgcgagatacactacaggcagtgagcgagcaggcggcaggcagggtccgtgcggagcaggcgagcgagcgggaagacgcagccaccttcctcaccagccagcccacagcggtttgttccccttctcgggagtgcgccaatgcctgggccgacccaaaccctgtccccaacgactcggaccgatg

SEQ ID NO: 12624 - DNA, 203 bp, Artificial sequence
  synthetic
ggcgcgccagtcctttaccacagagcagattcccacaactcccttggtacaataaaaaagacgagtatttacttttcattgaaagaatggagcttgcttgatatttcactagataaagaatttaaggcgagtatctatctttgttctccttggcaactgagagtctgcccttggaaacatcaggcacccgactcggaccgatg

SEQ ID NO: 12625 - DNA, 203 bp, Artificial sequence
  synthetic
ggcgcgccagtccttagccgccgagcccgttacccacctgggcaaacgacgcccacgtacggtccacgtcgcccttcaatgtctctcttgaccaataggcgtagccggcgagttgacaaggaccagtgggggaactcttaaaatgaagggactccaagtcccgcccttcccggtgggccgggaaatgccgactcggaccgatg

SEQ ID NO: 12626 - DNA, 203 bp, Artificial sequence
  synthetic
ggcgcgccagtcctcctggacagagcccgttacccacctgggcaaacgacgcccacgtacggtccacgtcgcccttcaatgtctctcttgaccaataggcgtagccggcgagttgacaaggaccagtgggggccgggggcttggagagggactccaagtctttatgggatgacggggccgggaaatgccgactcggaccgatg

SEQ ID NO: 12627 - DNA, 203 bp, Artificial sequence
  synthetic
ggcgcgccagtcctaactgattgagcccgttacccacctgggcaaacgacgcccacgtacggtccacgtcgcccttcaatgtctctcttgaccaataggcgtagccggcgagttgacaccctgaccgaaaccccgggggcttggagagggactccaagtcccgcccttcccggtgggccgggaaatgccgactcggaccgatg

SEQ ID NO: 12628 - DNA, 203 bp, Artificial sequence
  synthetic
ggcgcgccagtcctcaggtacagagcccgttacccacctgggcaaacgctttaggttatgcatccacgtcgcccttcaatgtctctcttgaccaataggcgtagccggcgagttgacaaggaccagtgggggccgggggcttggagagggactccaagtcccgcccttcccggtgggccgggaaatgccgactcggaccgatg

SEQ ID NO: 12629 - DNA, 203 bp, Artificial sequence
  synthetic
ggcgcgccagtcctccattagcgagcccgttaccgtagctcttgtctcacgcccacgtacggtccacgtcgcccttcaatgtctctcttgaccaataggcgtagccggcgagttgacaaggaccagtgggggccgggggcttggagagggactccaagtcccgcccttcccggtgggccgggaaatgccgactcggaccgatg

SEQ ID NO: 12630 - DNA, 203 bp, Artificial sequence
  synthetic
ggcgcgccagtcctggcacacggagccctgcacccctaattcccggtggaaaactcctgttgatccgcatggtgtacggcctggagtctcccagtcttgtcccggcagtgccgccctccccactaagacctaggcgcaaaggcttggctcatggttgacagctcagagagagaaagatctgagggaagcgactcggaccgatg

SEQ ID NO: 12631 - DNA, 203 bp, Artificial sequence
  synthetic
ggcgcgccagtcctaacgcggcgagccctgcacccctaattcccggtggaaaactcctgttgccgtttccctccaccggcctggagtctcagcacaagacaagtgcagtgccgccctccccactaagacctaggcgcaaaggcttggctcatggttgacagctcagagagagaaagatctgagggaagcgactcggaccgatg

SEQ ID NO: 12632 - DNA, 203 bp, Artificial sequence
  synthetic
ggcgcgccagtcctgatccagagagccctgcacccctaattcccggtggaaaactcctgttgccgtttccctccaccggcctggagtctcccagtcttgtcccggcagtgccgccctccccactaagacctaggcgcaaaggcttggctcatggttgacagctcagagagagaacctgggtcattgttcgactcggaccgatg

SEQ ID NO: 12633 - DNA, 203 bp, Artificial sequence
  synthetic
ggcgcgccagtccttacataacgagcctccagagggctgtcggcgcagtagcagcgagcagcagagtccgcacgctccggcgaggggcagaagagcgcgagggagcgcggggcagcagaagcgagagccgagcgcggacccagccaggacccacagccctccccagctgcccagatcctcttgattggcgactcggaccgatg

SEQ ID NO: 12634 - DNA, 203 bp, Artificial sequence
  synthetic
ggcgcgccagtccttcagtgccgagcctccagagggctgtcggcgcagtagcagcgagcagcagagtccgcacgctccggcgaggggcagaagagcgcgagggagcgcggggcagcagaagcgagagccgagcgcggacccagccaggacccacagccctccccagctgcccaggaagagccccagcccgactcggaccgatg

SEQ ID NO: 12635 - DNA, 203 bp, Artificial sequence
  synthetic
ggcgcgccagtcctcccaggccgagcctccagagggctgtcggcgcagtagcagcgagcagcagagtccgcacgctccggcgaggggcagaagagcgcgagggagcgcggggcagcaggctgtgatattccacgcggacccagccaggacccacagccctccccagctgcccaggaagagccccagcccgactcggaccgatg

SEQ ID NO: 12636 - DNA, 203 bp, Artificial sequence
  synthetic
ggcgcgccagtccttgggcaacgagcctccagagggctgtcggcgcagtagcagcgagcagcagagtccgcacgctccggcgaggggcaggttgttctctttcggcgcggggcagcagaagcgagagccgagcgcggacccagccaggacccacagccctccccagctgcccaggaagagccccagcccgactcggaccgatg

SEQ ID NO: 12637 - DNA, 203 bp, Artificial sequence
  synthetic
ggcgcgccagtccttggtgtccgagcctccagagggctgtcggcgcagtagcagcgagcagcttccagtcgtgtagccggcgaggggcagaagagcgcgagggagcgcggggcagcagaagcgagagccgagcgcggacccagccaggacccacagccctccccagctgcccaggaagagccccagcccgactcggaccgatg

SEQ ID NO: 12638 - DNA, 203 bp, Artificial sequence
  synthetic
ggcgcgccagtcctgcgctggggagcctggcgtggtagggctgtgctgcgcggtccttcccattcaccctagtctggcgctcgccggcgtgggcgggccggaccttcgccgcttccagagctacatcgttaagccgtcggaccacggcgcggcggccagttcctttatagttttgttcagaaaaacatcgactcggaccgatg

SEQ ID NO: 12639 - DNA, 203 bp, Artificial sequence
  synthetic
ggcgcgccagtcctcatatcttgagcctggcgtggtagggctgtgctgcgcggtccttcccattcaccctagtctggcgctcgccggcgtgggcgggccggaccttcgccgcttccaggaagggccacaacgcaacgacacaacgcgcgcggcggccagttcctttatagttttgttcagaaaaacatcgactcggaccgatg

SEQ ID NO: 12640 - DNA, 203 bp, Artificial sequence
  synthetic
ggcgcgccagtcctatgttccagagcctggcgtggtagggctgtgctgcgcggtccttcccattcaccctagtctggcgctcgccggcgtgggcgggccggaccttcgccgcttccaggaagggccacaacggccgtcggaccacggcgcggcggccagttcctttatagttttacaattggccgacgcgactcggaccgatg

SEQ ID NO: 12641 - DNA, 203 bp, Artificial sequence
  synthetic
ggcgcgccagtcctatggtagtgagcggttagagccaacaccactccctgcgagtggccggagaccagggcccaacataaacaagctttggagacaaacaaccttatgacctgtcagccctgacaaaggtcagctagccccttgaggacatcagctttggcctcagggtcctaatggcagcagaaccacgactcggaccgatg

SEQ ID NO: 12642 - DNA, 203 bp, Artificial sequence
  synthetic
ggcgcgccagtcctcccaccgagagcggttagagtgtgtgtgggcggatgcgagtggccggagaccagggcccaacataaacaagctttgctcctcgcagtgagtatgacctgtcagccctgacaaaggtcagctagccccttgaggacatcagctttggcctcagggtcctaatggcagcagaaccacgactcggaccgatg

SEQ ID NO: 12643 - DNA, 203 bp, Artificial sequence
  synthetic
ggcgcgccagtcctctcttctagagcggttagagtgtgtgtgggcggatgcgagtggccggagaccagggcccaacataaacaagctttggagacaaacaacctccgttttcagttttcctgacaaaggtcagctagccccttgaggacatcagctttggcctcagggtcctaatggcagcagaaccacgactcggaccgatg

SEQ ID NO: 12644 - DNA, 203 bp, Artificial sequence
  synthetic
ggcgcgccagtcctaatattctgagcggttagagtgtgtgtgggcggatgcgagtggccggagaccagggcccaacgagggtggttggacgagacaaacaaccttatgacctgtcagccctgacaaaggtcagctagccccttgaggacatcagctttggcctcagggtcctaatggcagcagaaccacgactcggaccgatg

SEQ ID NO: 12645 - DNA, 203 bp, Artificial sequence
  synthetic
ggcgcgccagtcctgagcattggagcggttagagtgtgtgtgggcggatgcgagtggccggattaacttcaaagctataaacaagctttggagacaaacaaccttatgacctgtcagccctgacaaaggtcagctagccccttgaggacatcagctttggcctcagggtcctaatggcagcagaaccacgactcggaccgatg

SEQ ID NO: 12646 - DNA, 203 bp, Artificial sequence
  synthetic
ggcgcgccagtcctggcacggagaggactcgggacagggaattggccctgggagaaaacgcgatccaacgccgatggacgccccgtgaaagccgtgccgacccttgggaggactgacaggtctagagacacgcgctgtctgttgtggtgggcctcccgggaataagtgaggggctctgtgtttcgaggcgactcggaccgatg

SEQ ID NO: 12647 - DNA, 203 bp, Artificial sequence
  synthetic
ggcgcgccagtcctacgtcgctgaggactcgggacagggaattggccctgggagaaaacgcgcggggggcgtccgagacgccccgtgaaagccgtgccgaccctataccacctaacttggtctagagacacgcgctgtctgttgtggtgggcctcccgggaataagtgaggggctctgtgtttcgaggcgactcggaccgatg

SEQ ID NO: 12648 - DNA, 203 bp, Artificial sequence
  synthetic
ggcgcgccagtccttgtaagaggaggactcgggacagggaattggccctgggagaaaacgcgcggggggcgtccgagacgccccgtgaaagccgtgccgacccttgggaggactgacaggtctagagacacgcgctgtctgttgtgcccccttatgatccaataagtgaggggctctgtgtttcgaggcgactcggaccgatg

SEQ ID NO: 12649 - DNA, 203 bp, Artificial sequence
  synthetic
ggcgcgccagtcctcctagtgagaggactcgggacagggaattggccctgggagaaaacgcgcggggggcgtccgagacgccccgtgaaagccgtgccgacccttgggaggactgacaggtctagagacacgtagccatcagcaatgtgggcctcccgggaataagtgaggggctctgtgtttcgaggcgactcggaccgatg

SEQ ID NO: 12650 - DNA, 203 bp, Artificial sequence
  synthetic
ggcgcgccagtccttaataggcgaggactcgggatgctccccgtctaatgggagaaaacgcgcggggggcgtccgagacgccccgtgaaagccgtgccgacccttgggaggactgacaggtctagagacacgcgctgtctgttgtggtgggcctcccgggaataagtgaggggctctgtgtttcgaggcgactcggaccgatg

SEQ ID NO: 12651 - DNA, 203 bp, Artificial sequence
  synthetic
ggcgcgccagtcctacaatggggaggagagactaccgtcctggagataacggttccacggaggcccaaggcgaaacggaaggatcctcatgtacaaaactgagcggaatggagctgtgagcacgcatcaggtatgtacatcataaaggcacgtagtagaggtcctcagccagcagagccacgttccttcgactcggaccgatg

SEQ ID NO: 12652 - DNA, 203 bp, Artificial sequence
  synthetic
ggcgcgccagtcctgctgaagtgaggagagactaccgtcctggagataacggttccacggaggcccaaggcgaaacggaaggatcctcatgtacaaaactgagcggaatggagctgtgagcacgcatcaggtgctgtttcaggcctggcacgtagtagagacgtatgatttcatgagccacgttccttcgactcggaccgatg

SEQ ID NO: 12653 - DNA, 203 bp, Artificial sequence
  synthetic
ggcgcgccagtccttatgacacgaggagagactaccgtcctggagataacggttccacggaggcccaaggcgaaacggaaggatcctcattggtgccgggagctggaatggagctgtgagcacgcatcaggtgctgtttcaggcctggcacgtagtagaggtcctcagccagcagagccacgttccttcgactcggaccgatg

SEQ ID NO: 12654 - DNA, 203 bp, Artificial sequence
  synthetic
ggcgcgccagtcctcgctgtaggaggagagactagttatgaattcgatacggttccacggaggcccaaggcgaaacggaaggatcctcatgtacaaaactgagcggaatggagctgtgagcacgcatcaggtgctgtttcaggcctggcacgtagtagaggtcctcagccagcagagccacgttccttcgactcggaccgatg

SEQ ID NO: 12655 - DNA, 203 bp, Artificial sequence
  synthetic
ggcgcgccagtcctcctataatgaggagggaagaggactccaagcgccatggccgctgccgcccgagcccgggtcgcgtacttgctgaggcaactgcaacgcgcagcgtgccagtgcccaactcattctcatactggaaggaaagcccctggactttcaccccaccaacgtccaacagattatgccttcgactcggaccgatg

SEQ ID NO: 12656 - DNA, 203 bp, Artificial sequence
  synthetic
ggcgcgccagtcctagctacaagaggagggaagaggactccaagcgccatggccgctgccgcccgagcccgggtcgcgtacttgctgaggcaactgcaacgcgcagcgtgccagtgcccaactcattctcatacttactcccaagcccctggactttcaccccaccaacgtccaacagattatgccttcgactcggaccgatg

SEQ ID NO: 12657 - DNA, 203 bp, Artificial sequence
  synthetic
ggcgcgccagtcctaggtccatgaggagggaagaggactccaagcgccatggccgctgccgcccgagcccgggtcgcgtacttgctgaggcaactgcaacgcgcagcgtgccagtgcccaactcattctcatacttactcccaagcccctggactttcaccttctgggaaaacaacagattatgccttcgactcggaccgatg

SEQ ID NO: 12658 - DNA, 203 bp, Artificial sequence
  synthetic
ggcgcgccagtccttgggaggtgaggagggaagaggactccaagcgccatggccgctgccgcccgagcccgggtcgcgtacttgctgaggcaactgcaacgcgcagcgtgccagtgcccaactcattctcatcaggtgaagttcaaccctggactttcaccttctgggaaaacaacagattatgccttcgactcggaccgatg

SEQ ID NO: 12659 - DNA, 203 bp, Artificial sequence
  synthetic
ggcgcgccagtcctacaatacagaggagggaagaggactccaagcgccatggccgctgccgcccgagcccgggtcgcgtacttgctgaggtcttgatcttatagagcgtgccagtgcccaactcattctcatacttactcccaagcccctggactttcaccttctgggaaaacaacagattatgccttcgactcggaccgatg

SEQ ID NO: 12660 - DNA, 203 bp, Artificial sequence
  synthetic
ggcgcgccagtcctagactcacgaggagggaagaggactccaagcgcctcattaagactgttccgagcccgggtcgcgtacttgctgaggcaactgcaacgcgcagcgtgccagtgcccaactcattctcatacttactcccaagcccctggactttcaccttctgggaaaacaacagattatgccttcgactcggaccgatg

SEQ ID NO: 12661 - DNA, 203 bp, Artificial sequence
  synthetic
ggcgcgccagtcctgtaagcgtgaggccgcggggacccggcggacttcggcgcgggctgggagagaccacccgcagtcccttcctccaggaacgattatcttttcgcggagactcgtccggcgctctccagccgccctggagcaactttgcttcgaagttccctgggcccgggcagggcccggcagcccgactcggaccgatg

SEQ ID NO: 12662 - DNA, 203 bp, Artificial sequence
  synthetic
ggcgcgccagtccttaccgcaggaggccgcggggacccggcggacttcggcgcgggctgggattttattgtgctcctcccttcctccagggctcgccccaggcccgcggagactcgtccggcgctctccagccgccctggagcaactttgcttcgaagttccctgggcccgggcagggcccggcagcccgactcggaccgatg

SEQ ID NO: 12663 - DNA, 203 bp, Artificial sequence
  synthetic
ggcgcgccagtccttaagtctagaggcgaagcttcagcatctcagacttcctgctcctgggcctgcccatccaaccagagcagcaaaacctgtgctatgccctgttcttggccatgtatcttaccaccctcctggggaacctcctcatcattgtcctcattcgactggactcccatctccacacgcctcgactcggaccgatg

SEQ ID NO: 12664 - DNA, 203 bp, Artificial sequence
  synthetic
ggcgcgccagtccttaaagtaagaggcgggacgcggggtgataacagcactacaaatacatagggcgggagctggggaggaggagcaggagaggcccacaggcttcatttggagtcaggcctggctgttgctcaggtgaccagcttgtgtctctgggagggcgctgctttccccggccacccggcgcgcgactcggaccgatg

SEQ ID NO: 12665 - DNA, 203 bp, Artificial sequence
  synthetic
ggcgcgccagtcctacttgggtgaggcgggacgcggggtgataacagctggctctggtgggcgggcgggagctggggaggaggagcaggacgctatattcctactcatttggagtcaggcctggctgttgctcaggtgaccagcttgtgtctctgggagggcgctgctttccccggccacccggcgcgcgactcggaccgatg

SEQ ID NO: 12666 - DNA, 203 bp, Artificial sequence
  synthetic
ggcgcgccagtcctggttagtcgaggcgggacgcggggtgataacagctggctctggtgggcgggcgggagctggggaggaggagcaggagaggcccacaggcttcatttggagtcaggcctggctgttgctcaggtgaccagcttgtgtctctgggagggcgctgctttccccggccacccggcgcgcgactcggaccgatg

SEQ ID NO: 12667 - DNA, 203 bp, Artificial sequence
  synthetic
ggcgcgccagtcctacttatacgaggctcacaccaaggcaggcggggtaccttccctagtccctgcactaggttggacagcccccattggctacaggaaagcgggaggggtgtgagtcccctactccctctttgcagtggccccagcccccttaccgtctgcctgggatctgagtacatattgcagtgcgactcggaccgatg

SEQ ID NO: 12668 - DNA, 203 bp, Artificial sequence
  synthetic
ggcgcgccagtccttaggtggagaggctcacacctttcatccttccccaccttcccggtgagttgcactaggttggacagcccccattggctacaggaaagcgggaggggtgtgagtccccatggttttctttgcagtggccccagcccccttaccgtctgcctgggatctgagtacatattgcagtgcgactcggaccgatg

SEQ ID NO: 12669 - DNA, 203 bp, Artificial sequence
  synthetic
ggcgcgccagtcctcaaagtcggaggctcacacctttcatccttccccaccttcccggtgagttgcactaggttggacagcccccattggctacaggaaagcgggaggggtgtgagtcccctactccctctttgcagtggccccagcccccttaccgtctgcctgggatctgagtacatattgcagtgcgactcggaccgatg

SEQ ID NO: 12670 - DNA, 203 bp, Artificial sequence
  synthetic
ggcgcgccagtcctcgcgtggagaggctcacacctttcatccttccccaccttccctagtccctgcactaggttggacagcccccattggctacaggaaagcggatccacgcgagagaccctactccctctttgcagtggccccagcccccttaccgtctgcctgggatctgagtacatattgcagtgcgactcggaccgatg

SEQ ID NO: 12671 - DNA, 203 bp, Artificial sequence
  synthetic
ggcgcgccagtcctgatgccaggaggctcacacctttcatccttccccaccttccctagtccctgcactaggttggacagcccccattggctacaggaaagcgggaggggtgtgagtcatacctgtagggcctgcagtggccccagcccccttaccgtctgcctgggatctgagtacatattgcagtgcgactcggaccgatg

SEQ ID NO: 12672 - DNA, 203 bp, Artificial sequence
  synthetic
ggcgcgccagtcctctgggtcggaggctcacacctttcatccttccccaccttccctagtccctgcactaggttggacagcccccattggctacaggaaagcgggaggggtgtgagtcccctactccctctttgcagtggccccagcccccttaccgtctcgtaactcatcatatacatattgcagtgcgactcggaccgatg

SEQ ID NO: 12673 - DNA, 203 bp, Artificial sequence
  synthetic
ggcgcgccagtcctatcatccggaggctcacacctttcatccttccccaccttccctagtccctgcactaggttggacagcccccattggctacaggaaagcgggaggggtgtgagtcccctactccctctttgcagtggccccagcccccttaccgtctgcctgggatctgagggataccactccgccgactcggaccgatg

SEQ ID NO: 12674 - DNA, 203 bp, Artificial sequence
  synthetic
ggcgcgccagtcctgataatcagaggctcacacctttcatccttccccaccttccctagtcctgcgtacgatacaaacagcccccattggctacaggaaagcgggaggggtgtgagtcccctactccctctttgcagtggccccagcccccttaccgtctgcctgggatctgagtacatattgcagtgcgactcggaccgatg

SEQ ID NO: 12675 - DNA, 203 bp, Artificial sequence
  synthetic
ggcgcgccagtcctagaaccgagaggctcacacctttcatccttccccgagccgaagctgtgctgcactaggttggacagcccccattggctacaggaaagcgggaggggtgtgagtcccctactccctctttgcagtggccccagcccccttaccgtctgcctgggatctgagtacatattgcagtgcgactcggaccgatg

SEQ ID NO: 12676 - DNA, 203 bp, Artificial sequence
  synthetic
ggcgcgccagtccttcccataagaggggggtagcaacagtggtgagttcgttggatggcttaagccctgagtacagggtagtcgtcagtggttcgacgccttggaataaaggtctcgagatgccacgtggacgagggcatgcccaaagcacatcttaacctgagcgggggtcgcccaggtaaaagcagcgactcggaccgatg

SEQ ID NO: 12677 - DNA, 203 bp, Artificial sequence
  synthetic
ggcgcgccagtcctcccgagctgaggggggtagcaacagtggtgagttcgttggatggcttaagccctgagtacagggtagtcgtcagtggttcgacgccttggaataaaggtctcgagatgccacgtggacgagggcatgcccaaagcacatcttaacctgagcgggggtcgctgcctacccctttacgactcggaccgatg

SEQ ID NO: 12678 - DNA, 203 bp, Artificial sequence
  synthetic
ggcgcgccagtcctctccaaccgaggggggtagcaacagtggtgagttcgttggatggcttaagccctgagtacagggtagtcgtcagtggttcgacgccttggaataaaggtctcgatcccgattaattctgagggcatgcccaaagcacatcttaacctgagcgggggtcgcccaggtaaaagcagcgactcggaccgatg

SEQ ID NO: 12679 - DNA, 203 bp, Artificial sequence
  synthetic
ggcgcgccagtccttagagcgcgaggggggtagcaacagtggtgagttcgttggatggcttaagccctgagtacagggtagtcgtcagtgtgcatggcagagacaataaaggtctcgagatgccacgtggacgagggcatgcccaaagcacatcttaacctgagcgggggtcgcccaggtaaaagcagcgactcggaccgatg

SEQ ID NO: 12680 - DNA, 203 bp, Artificial sequence
  synthetic
ggcgcgccagtcctggtccgtggaggggggtagcggtgtgttgagaggcgttggatggcttaagccctgagtacagggtagtcgtcagtggttcgacgccttggaataaaggtctcgagatgccacgtggacgagggcatgcccaaagcacatcttaacctgagcgggggtcgcccaggtaaaagcagcgactcggaccgatg

SEQ ID NO: 12681 - DNA, 203 bp, Artificial sequence
  synthetic
ggcgcgccagtcctagcgcgaggaggggtttcccgacgccctggtctgagctctgtggtatctgattgttgttgaaccgtctctaagacggtgatactataagtcgtggtttgtgtgtttgtttgttaccttgtgtttgttcgtcacttgtcgacagcgccctgcgaattggtgtacccacaccgcgccgactcggaccgatg

SEQ ID NO: 12682 - DNA, 203 bp, Artificial sequence
  synthetic
ggcgcgccagtcctatgtgagagaggttaagccgtcccgacgccgccgcccccgccgggtgcctaagcaggcccggcgcggccccaggacttgggaccctggaggactgacgctgctggcctgggcgtccccttccgctgagccatggcgactcccgacgtgagtgtgcacatggaggaggtggtggtcgactcggaccgatg

SEQ ID NO: 12683 - DNA, 203 bp, Artificial sequence
  synthetic
ggcgcgccagtcctcagtatttgaggttgcctaggcagaagcgggagaaggtgctgctgctgaggaccttccagggccgcacgctgcggatcgtgcgcgagcactacctgcggccctgcgtgccctgccacagcccgctctgcccgcagcccgccgcctgcagccacgatgggaaactcttgtctagtcgactcggaccgatg

SEQ ID NO: 12684 - DNA, 203 bp, Artificial sequence
  synthetic
ggcgcgccagtcctctttggcggagtcccctgggcgcccccacaccggatatatagaacctgggttcgcgacgcagccccccggccgtggatgctcactcgggctcgggatccgcccaggtagccggctcggacccaggtcctgcgcccaggtcctcccctgccccccagcgacggagccggggccggcgactcggaccgatg

SEQ ID NO: 12685 - DNA, 203 bp, Artificial sequence
  synthetic
ggcgcgccagtcctcataggaagagtcccctgggcgcccccacaccggtagacgcctcggctggttcgcgacgcagccccccggccgtggatgctcactcgggctcgggatccgcccaggtagccggctcggacccaggtcctgcgaagcatcgagattgtgccccccagcgacggagccggggccggcgactcggaccgatg

SEQ ID NO: 12686 - DNA, 203 bp, Artificial sequence
  synthetic
ggcgcgccagtcctctcaacatgagtcccctgggcgcccccacaccggtagacgcctcggctggttcgcgacgcagccccccggccgtggatgctcactcgggctcgggatccgcccaggtagccggctcggacccaggtcctgcgcccaggtcctcccctgccccccagcgacggagccggggccggcgactcggaccgatg

SEQ ID NO: 12687 - DNA, 203 bp, Artificial sequence
  synthetic
ggcgcgccagtcctggacaaccgagtcccctgggcgcccccacaccggtagacgcctcggctggttcgcgacgcagccccccggccgtggatgctcactcgggctcgggatccgcccatccgcagatagaaaacccaggtcctgcgcccaggtcctcccctgccccccagcgacggagccggggccggcgactcggaccgatg

SEQ ID NO: 12688 - DNA, 203 bp, Artificial sequence
  synthetic
ggcgcgccagtccttcacgcatgagtcccctgggtttagtttgtaacatagacgcctcggctggttcgcgacgcagccccccggccgtggatgctcactcgggctcgggatccgcccaggtagccggctcggacccaggtcctgcgcccaggtcctcccctgccccccagcgacggagccggggccggcgactcggaccgatg

SEQ ID NO: 12689 - DNA, 203 bp, Artificial sequence
  synthetic
ggcgcgccagtcctactgcgtggagtgtcagctctccatctgtctctgcctggcaggcgcacaacgtttttcgaaggcctccggcgatgccgccccagcccctctgatggccctcctctctgctgccactcattccagaacaggaggcatgagcccggaacgcgcttgcttttaggagacagccacttcgactcggaccgatg

SEQ ID NO: 12690 - DNA, 203 bp, Artificial sequence
  synthetic
ggcgcgccagtcctaaagcactgagtgtcagctctccatctgtctctgcctggcaggcgcacgcgcccagcaccctgcctccggcgatgccgccccagcccctcgtggttatagttagtctgctgccactcattccagaacaggaggcatgagcccggaacgcgcttgcttttaggagacagccacttcgactcggaccgatg

SEQ ID NO: 12691 - DNA, 203 bp, Artificial sequence
  synthetic
ggcgcgccagtcctctatagccgagtgtcagctctccatctgtctctgcctggcaggcgcacgcgcccagcaccctgcctccggcgatgccgccccagcccctctgatggccctcctcatccactgtcgaatttccagaacaggaggcatgagcccggaacgcgcttgcttttaggagacagccacttcgactcggaccgatg

SEQ ID NO: 12692 - DNA, 203 bp, Artificial sequence
  synthetic
ggcgcgccagtcctggtgtttcgagtgtcagctctccatctgtctctgcctggcaggcgcacgcgcccagcaccctgcctccggcgatgccgccccagcccctctgatggccctcctctctgctgccactcacgaacatctctactgcatgagcccggaacgcgcttgcttttaggagacagccacttcgactcggaccgatg

SEQ ID NO: 12693 - DNA, 203 bp, Artificial sequence
  synthetic
ggcgcgccagtcctgcacctcagagtgtcagctctccatctgtctctgcctggcaggcgcacgcgcccagcaccctgcctccggcgatgccgccccagcccctctgatggccctcctctctgctgccactcattccagaacaggaggcatgagcccggaacgcgcttgcttttaggagacagccacttcgactcggaccgatg

SEQ ID NO: 12694 - DNA, 203 bp, Artificial sequence
  synthetic
ggcgcgccagtcctgggagccagagtgtcagctctccatctgtctctgcctggcaggcgcacgcgcccagcaccctgcctccggcgatgccgccccagcccctctgatggccctcctctctgctgccactcattccagaacaggagtttactaggatcggcgcgcttgcttttaggagacagccacttcgactcggaccgatg

SEQ ID NO: 12695 - DNA, 203 bp, Artificial sequence
  synthetic
ggcgcgccagtcctagtttggcgagtgtcagctctccatctgtctctgcctggcaggcgcacgcgcccagcaccctgcctccggcgatgcttggggcctgaaattgatggccctcctctctgctgccactcattccagaacaggaggcatgagcccggaacgcgcttgcttttaggagacagccacttcgactcggaccgatg

SEQ ID NO: 12696 - DNA, 203 bp, Artificial sequence
  synthetic
ggcgcgccagtcctatagtgctgagtgtcagctctccatctgtctctgcctggcaggcgcacgcgcccagcacccttgaattctgcgatacgccccagcccctctgatggccctcctctctgctgccactcattccagaacaggaggcatgagcccggaacgcgcttgcttttaggagacagccacttcgactcggaccgatg

SEQ ID NO: 12697 - DNA, 203 bp, Artificial sequence
  synthetic
ggcgcgccagtcctcactgtgagatactcatcctacctgaatataaactgagataaatccagtaaagaaagtgtagccttccaacaccctgagtctatcattgatttctttttgtggtaaaaatcttagttcatgtgaagaaatttcatgtgaatgttttagctatcaaacagtactgtcacctactccgactcggaccgatg

SEQ ID NO: 12698 - DNA, 203 bp, Artificial sequence
  synthetic
ggcgcgccagtcctaccggtgcgatactcatcctacctgaatataaactgagataaatccagtaaagaaagtgtagtaaattctacataagagtctatcattgatttctttttgtggtgctctatcgcaacaatgtgaagaaatttcatgtgaatgttttagctatcaaacagtactgtcacctactccgactcggaccgatg

SEQ ID NO: 12699 - DNA, 203 bp, Artificial sequence
  synthetic
ggcgcgccagtcctgcgcatgcgatagcgcctttcccctaatgtagtacccacctgccaggtgtgaagtggagtgagcggatctccaatttggtctgttctgaactacaccatttactgctgtgaagaatgccctggaggcaagctggttacagccctgaccaggccctgcccgtgactctcgaccggcgactcggaccgatg

SEQ ID NO: 12700 - DNA, 203 bp, Artificial sequence
  synthetic
ggcgcgccagtcctcctgggtcgatagcgccttttgggatgcaggaaccccacctgccaggtgtgaagtggagtgactactgtaatcggatggtctgttctgaactacaccatttactgctgtgaagaatgccctggaggcaagctggttacagccctgaccaggccctgcccgtgactctcgaccggcgactcggaccgatg

SEQ ID NO: 12701 - DNA, 203 bp, Artificial sequence
  synthetic
ggcgcgccagtcctatggtgaggatagcgccttttgggatgcaggaaccccacctgccaggtgtgaagtggagtgagcggatctccaattgctgtgacataatcctacaccatttactgctgtgaagaatgccctggaggcaagctggttacagccctgaccaggccctgcccgtgactctcgaccggcgactcggaccgatg

SEQ ID NO: 12702 - DNA, 203 bp, Artificial sequence
  synthetic
ggcgcgccagtcctctcccaaagatagcgccttttgggatgcaggaaccccacctgccaggtgtgaagtggagtgagcggatctccaatttggtctgttctgaactacaccatttactgctgtgaagaatgccctggaggcaagctggttacagccctgaggtacgatatggaatgactctcgaccggcgactcggaccgatg

SEQ ID NO: 12703 - DNA, 203 bp, Artificial sequence
  synthetic
ggcgcgccagtcctttgtagtagatagcgccttttgggatgcaggaactgactgaatgtacagtgaagtggagtgagcggatctccaatttggtctgttctgaactacaccatttactgctgtgaagaatgccctggaggcaagctggttacagccctgaccaggccctgcccgtgactctcgaccggcgactcggaccgatg

SEQ ID NO: 12704 - DNA, 203 bp, Artificial sequence
  synthetic
ggcgcgccagtcctatgagcccgataggatgtgaaggctccgatttgtgaataggtttttatattcgaagtaggtagtattgcgcatactattaattccacaatacgtggtcttcgtcagttttttaggttgtttcgtccctatggaaatggctcttcggacctgagtacagtgggacaaccccaacgcgactcggaccgatg

SEQ ID NO: 12705 - DNA, 203 bp, Artificial sequence
  synthetic
ggcgcgccagtcctcgcaatcggatatagcacagggcttggttttctcacccagtgcatgtggcaggagcggtgagatcactgcctcacggcgatcctggactgacggtcacgactgcctaccctctaaccctgttctgagctgccccttgcccacacaccccaaacctgtgtgcaggatccgcctcccgactcggaccgatg

SEQ ID NO: 12706 - DNA, 203 bp, Artificial sequence
  synthetic
ggcgcgccagtcctcggcctccgatcccctgcagtcggcgggagtgttggaggtcggcgccgagtaaataagataccgccccccacgggaaggaagcacccccggtattaaaacgaacggggcggaaagaagccctcagtcgccggccgggaggcgagccgatgccgagctgctccacgtccaccatgcgactcggaccgatg

SEQ ID NO: 12707 - DNA, 203 bp, Artificial sequence
  synthetic
ggcgcgccagtcctgcgtaattgatcccctgcagtcggcgggagtgttggaggtcggcgccggcccccgccttccgcgccccccacgggaaggaagcacccccgaagaagtgtgcgtaggggcggaaagaagccctcagtcgccggccgggaggcgagccgatgccgagctgctccacgtccaccatgcgactcggaccgatg

SEQ ID NO: 12708 - DNA, 203 bp, Artificial sequence
  synthetic
ggcgcgccagtccttcaacctagatcccctgcagtcggcgggagtgttggaggtcggcgccggcccccgccttccgcgccccccacgggaaggaagcacccccggtattaaaacgaacctcctatgtcagtcccctcagtcgccggccgggaggcgagccgatgccgagctgctccacgtccaccatgcgactcggaccgatg

SEQ ID NO: 12709 - DNA, 203 bp, Artificial sequence
  synthetic
ggcgcgccagtcctcttccctggatcccctgcagtcggcgggagtgttggaggtcggcgccggcccccgccttccgcgccccccacgggaaggaagcacccccggtattaaaacgaacggggcggaaagaagccctcagtcgccggccgggaggcgagccataaattgcggtgcccacgtccaccatgcgactcggaccgatg

SEQ ID NO: 12710 - DNA, 203 bp, Artificial sequence
  synthetic
ggcgcgccagtcctccgggcccgatcccctgcagtcggcgggagtgttggaggtcggcgccggcccccgccttccgcgccccccacgggaaggaagcacccccggtattaaaacgaacggggcggaaagaagggtgactaatatctccgggaggcgagccgatgccgagctgctccacgtccaccatgcgactcggaccgatg

SEQ ID NO: 12711 - DNA, 203 bp, Artificial sequence
  synthetic
ggcgcgccagtcctttcatgttgatcgaagacccaccagcagatgaatggacaccttgaagcagaggagcagcaggaccagagatcacccctgacctgctacctcggccgccccggttgcttctattggtcaatccctttgggggtcggggcctggcctggcagtggtgtaagaaccacgtgcttccccgactcggaccgatg

SEQ ID NO: 12712 - DNA, 203 bp, Artificial sequence
  synthetic
ggcgcgccagtccttccgacgggatcgtgtggatgtctttgctgaccagacaaagcataccagatctcaccagagagtcctaggggactacagaaggaaaaagacaagaggcagtaggatatctgtgtgtcctcccgctgaccacacttcctttagtgacccgattgcctcctcaagtcgcagacactcgactcggaccgatg

SEQ ID NO: 12713 - DNA, 203 bp, Artificial sequence
  synthetic
ggcgcgccagtccttatgcttcgatgcgctaatatcctccagtggctccgctccccgttctctgtgggctcaaaatgacagaggctcacaggacacctgcatgcccaaggcactccaccgtatgtgatcaacctggatccagcagtacatgaagttccctttcctgccaatattggtgatgaaatttacgactcggaccgatg

SEQ ID NO: 12714 - DNA, 203 bp, Artificial sequence
  synthetic
ggcgcgccagtcctgtgtgctagatgtcctaacacggtttcgaaagcggcggcagcggcgctgagcgggtcccccccgcagactgagaagccgacccactacaggtacctgaaggagttcaggacggagcagtgccccctgttttcacagcacaagtgcgcgcagcaccggccgttcacctgcttccacgactcggaccgatg

SEQ ID NO: 12715 - DNA, 203 bp, Artificial sequence
  synthetic
ggcgcgccagtcctgacgtgccgattcagaccccctacgcgcgcgccaatctccacgacgccactatggttgatattacgtggggcctttaatcttacctactctaaccaggtcatcacccaccgttgtttcgccgcatctggtgggtacccaacttttgccattcgggagagccccagggtgcccgacgactcggaccgatg

SEQ ID NO: 12716 - DNA, 203 bp, Artificial sequence
  synthetic
ggcgcgccagtcctcaagttgagattcagaccccctacgcgcgcgccaatctccacgacgccgactaacgcccctggcttattttttccaaatcttacctactctaaccaggtcatcacccaccgttgtttcgccgcatctggtgggtacccaacttttgccattcgggagagccccagggtgcccgacgactcggaccgatg

SEQ ID NO: 12717 - DNA, 203 bp, Artificial sequence
  synthetic
ggcgcgccagtccttgaatgtagattcagaccccctacgcgcgcgccaatctccacgacgccgactaacgcccctgtacgtggggcctttaatcttacctactctaaccaggtcatcacccaccgttgtttcgccgcatctggtggaggatattaaacatccattcgggagagccccagggtgcccgacgactcggaccgatg

SEQ ID NO: 12718 - DNA, 203 bp, Artificial sequence
  synthetic
ggcgcgccagtcctatgtagacgattcagaccccctacgcgcgcgccaatctccacgacgccgactaacgcccctgtacgtggggcctttaatcttacctactctaaccaggtcatcacccaccgttgtttcgccgcatctggtgggtacccaacttttgccattcgggagagccccagggtgcccgacgactcggaccgatg

SEQ ID NO: 12719 - DNA, 203 bp, Artificial sequence
  synthetic
ggcgcgccagtcctgtctgagtgattcagaccccctacgcgcgcgccaatctccacgacgccgactaacgcccctgtacgtggggcctttaatcttacctactctaaccaggtcatcacccaccgttgtttcgccgcatctggtgggtacccaacttttgtttaaactagcttacccagggtgcccgacgactcggaccgatg

SEQ ID NO: 12720 - DNA, 203 bp, Artificial sequence
  synthetic
ggcgcgccagtcctttcgcgcggattcagacccctgttttcatgtggtatctccacgacgccgactaacgcccctgtacgtggggcctttaatcttacctactctaaccaggtcatcacccaccgttgtttcgccgcatctggtgggtacccaacttttgccattcgggagagccccagggtgcccgacgactcggaccgatg

SEQ ID NO: 12721 - DNA, 203 bp, Artificial sequence
  synthetic
ggcgcgccagtcctaactcctagattggctttttaagcacctcccccagttattcaagtttctggtctttaaaaaactctgtggcggtacggtaaccgaggaggttccagcgcggcggaagtacaagcgttaagggtgtgtgcgcaaggccagggccagaggggcacgtggcgccgggaggagagagacgactcggaccgatg

SEQ ID NO: 12722 - DNA, 203 bp, Artificial sequence
  synthetic
ggcgcgccagtccttattaagtgattggcttttttttttggcaaaccacaatcgtcgccgaatggtctttaaaaaactctgtggcggtacggtaaccgaggaggttccagcgcggcggaagtaccccgcgggtgggtgtgtgcgcaaggccagggccagaggggcacgtggcgccgggaggagagagacgactcggaccgatg

SEQ ID NO: 12723 - DNA, 203 bp, Artificial sequence
  synthetic
ggcgcgccagtcctctagttaggattggcttttttttttggcaaaccagttattcaagtttctggtctttaaaaaactctgtggcggtacggtaaccgaggaggttccagcgcggcggaagtaccccgcgggactaatacgtttgcaggccagggccagaggggcacgtggcgccgggaggagagagacgactcggaccgatg

SEQ ID NO: 12724 - DNA, 203 bp, Artificial sequence
  synthetic
ggcgcgccagtcctctgaagtcgattggcttttttttttggcaaaccagttattcaagtttctggtctttaaaaaactctgtggcggtacggtaaccgaggaggttccagcgcggcggaagtaccccgcgggtgggtgtgtgcgcaaggccagggccagacaatgcaacaattacgggaggagagagacgactcggaccgatg

SEQ ID NO: 12725 - DNA, 203 bp, Artificial sequence
  synthetic
ggcgcgccagtcctccaacggcgattggcttttttttttggcaaaccagttattcaagtttctggtctttaaaaaactctgtggcggtacggtaaccgaggaggttccagcgcggcggaagtaccccgcgggtgggtgtgtgcgcaaggccagggccagaggggcacgtggcgcttttttctatccaccgactcggaccgatg

SEQ ID NO: 12726 - DNA, 203 bp, Artificial sequence
  synthetic
ggcgcgccagtcctaacattgggattggcttttttttttggcaaaccagttattcaagtttctggtctttaaaaaactctgtggcggtacggtaaccgaggaggttccagcgcggcggaagtaccccgcgggtgggtgtgtgcgcactaggcaacatgttggggcacgtggcgccgggaggagagagacgactcggaccgatg

SEQ ID NO: 12727 - DNA, 203 bp, Artificial sequence
  synthetic
ggcgcgccagtccttgttgtaagattggcttttttttttggcaaaccagttattcaagtttctggtctttaaaaaactctgtggcggtacggtaaccgaggaggttccagcgcggcggcctctaaagtaccttgggtgtgtgcgcaaggccagggccagaggggcacgtggcgccgggaggagagagacgactcggaccgatg

SEQ ID NO: 12728 - DNA, 203 bp, Artificial sequence
  synthetic
ggcgcgccagtcctttattcgggatttcagagaggcttagggcaaacatcatttggccttaaatgggattctgtgagaggggatccctccattgacagctggactgttctttggggccttatgtggtgtttgcctctgaggtactcaggggcatttaggtttttcctcattcttaaataataatgaaccgactcggaccgatg

SEQ ID NO: 12729 - DNA, 203 bp, Artificial sequence
  synthetic
ggcgcgccagtcctatgcgcaagcaaaagggccactaatgttctattatccctccactgccctcgaacgcctcacttcctaagtctctgcatttctcagtcagtggacagcttttgggactcttgtgtgaggactttgggggaccaggccaggctgggcctctgctgattgagatcttgggatccagacgactcggaccgatg

SEQ ID NO: 12730 - DNA, 203 bp, Artificial sequence
  synthetic
ggcgcgccagtccttcgagagagcaaaagggccaggggcccggagccttccctccactgcccggcggactgaatggtcctaagtctctgcatttctcagtcagtggacagcttttgggactcttgtgtgaggactttgggggaccaggccaggctgggcctctgctgattgagatcttgggatccagacgactcggaccgatg

SEQ ID NO: 12731 - DNA, 203 bp, Artificial sequence
  synthetic
ggcgcgccagtcctgaaagctggcaaaagggccaggggcccggagccttccctccactgccctcgaacgcctcacttcctaagtctctgcatttctcagtcagtggacagcttttgggactcttgtgtgaggactttgggggaccactgtctagaactgatctgctgattgagatcttgggatccagacgactcggaccgatg

SEQ ID NO: 12732 - DNA, 203 bp, Artificial sequence
  synthetic
ggcgcgccagtccttcattcctgcaaaagggccaggggcccggagccttccctccactgccctcgaacgcctcacttcctaagtctctgcatttctcagtcagtggacagcttttgggttgaaacaaacgcaactttgggggaccaggccaggctgggcctctgctgattgagatcttgggatccagacgactcggaccgatg

SEQ ID NO: 12733 - DNA, 203 bp, Artificial sequence
  synthetic
ggcgcgccagtcctgtaaaccggcaaaagggccaggggcccggagccttccctccactgccctcgaacgcctcacttcctaagtctctgcatttctcagtcagtttcacctagacaacactcttgtgtgaggactttgggggaccaggccaggctgggcctctgctgattgagatcttgggatccagacgactcggaccgatg

SEQ ID NO: 12734 - DNA, 203 bp, Artificial sequence
  synthetic
ggcgcgccagtccttcctcttagcaaaattctgcctccaaggattttctgccgtctcttggcaaaaatggcaaataatgatgctgttctgaagagactggagcagaagggtgcagaggcagatcaaatcattgaatatcttaagcagcaagtttctctacttaaggagaaagcatagcaatcccttgtcgactcggaccgatg

SEQ ID NO: 12735 - DNA, 203 bp, Artificial sequence
  synthetic
ggcgcgccagtccttgatggcggcaaaattctgcctccaaggattttctgccgtctcttggcaaaaatggcaaataatgatgctgttctgaagagactggagcagaagggtgcagagggttcaacccggtgggaatatcttaagcagcaagtttctctacttaaggagaaagcaattttgcaggcaaccgactcggaccgatg

SEQ ID NO: 12736 - DNA, 203 bp, Artificial sequence
  synthetic
ggcgcgccagtcctgagcggcagcaaaattctgcctccaaggattttctgccgtctcttggcaaaaatggcaaataatgatgctgttctgaagagactggagcatccctcacggtcaacagatcaaatcattgaatatcttaagcagcaagtttctctacttaaggagaaagcaattttgcaggcaaccgactcggaccgatg

SEQ ID NO: 12737 - DNA, 203 bp, Artificial sequence
  synthetic
ggcgcgccagtcctggcatgtcgcaaaattctgcctccaaggattttctgccgtctcttggcaaaaatggcaaataatgatgctgttctggctgctaaacccatgaagggtgcagaggcagatcaaatcattgaatatcttaagcagcaagtttctctacttaaggagaaagcaattttgcaggcaaccgactcggaccgatg

SEQ ID NO: 12738 - DNA, 203 bp, Artificial sequence
  synthetic
ggcgcgccagtcctaagctcgagcaacgagagagggttagcagcagctatcgcagcgtcggatgttcagagcagcagaagccggcgtcgtcggatgttgtgttgcccgccaccatgagctacacaggctttgtccagggatctgaaaccactttgcagtcgacatactcggataccagcgctcagccccgactcggaccgatg

SEQ ID NO: 12739 - DNA, 203 bp, Artificial sequence
  synthetic
ggcgcgccagtccttgcgagtagcaagcgttttccccccggcccagcgtggtccgcctccctctgggcgtccacctgcccggagtactgccagcgggcatgaccgacccaccaggggcgccgccgccggcgctcgcaggccgcggatgaagaagaaaacccggcgccgctcgacccggagcgaggagtcgactcggaccgatg

SEQ ID NO: 12740 - DNA, 203 bp, Artificial sequence
  synthetic
ggcgcgccagtcctggagccgcgcaaggcatatcgcgcctgcgcggtggcccttccatcccggcagtcgtggctgcagcgctgaggcgagaggttggtgggtgtctccggccataatgacccaggctgagaagggtgatacggagaacggaaaggagaagggcggcgagaaggagaaggagcagcgcgcgactcggaccgatg

SEQ ID NO: 12741 - DNA, 203 bp, Artificial sequence
  synthetic
ggcgcgccagtcctcgcgactggcaaggcatatcgcgcctgcgcggtggcccttccatcccggcagtcgtggctgcagcgctgaggcgagaggttggtgggtgtctccggccataatgacccaggctgagaagggtgatacggaggcgtaccgcactcggggcggcgagaaggagaaggagcagcgcgcgactcggaccgatg

SEQ ID NO: 12742 - DNA, 203 bp, Artificial sequence
  synthetic
ggcgcgccagtccttttgatgagcacacctgtgtaatctaaaattgacatacctaattgattagttagatggaactacagtggattccataaggttcctgcctaccatcggctttaaagaaaaaaataggcccggacgggttagcaacaagcgactgccggtgccaacagcgcaatccacaatctacacgactcggaccgatg

SEQ ID NO: 12743 - DNA, 203 bp, Artificial sequence
  synthetic
ggcgcgccagtcctgctaagtagcaccttgccgcgatacgttaaaatatataacgtatttttaaaacttaggaaccaagacaaacacttttggtcttggtattggatcctcaagaaatatatcatcatgagtgatatctttgaagaggcggctagttttaggagttatcaatctaagttagggagagacgactcggaccgatg

SEQ ID NO: 12744 - DNA, 203 bp, Artificial sequence
  synthetic
ggcgcgccagtcctaaccagatgcacgtaaccttcagagagtgcggatctgagtaggagacccatcgtggtataactacagatgcagcccggtttaaaaagcgtctatgcccctacagggtagcggtgggccgcgccctttccttttaaaactacttgttctatggtgacaatggcaggaaacatgatcgactcggaccgatg

SEQ ID NO: 12745 - DNA, 203 bp, Artificial sequence
  synthetic
ggcgcgccagtcctctcttggggcacgtaaccttcagagagtgcggatctgagtaggagaccgtggtgcactgcttgcgcatcattattgggtttaaaaagcgtctatgcccctacagggtagcggtgggccgcgccctttccttttaaaactacttgttctatggtgacaatggcaggaaacatgatcgactcggaccgatg

SEQ ID NO: 12746 - DNA, 203 bp, Artificial sequence
  synthetic
ggcgcgccagtcctttcggcacgcacgtaaccttcagagagtgcggatctgagtaggagaccgtggtgcactgctttacagatgcagcccggtttaaaaagcgttgggcaaagatggtggtagcggtgggccgcgccctttccttttaaaactacttgttctatggtgacaatggcaggaaacatgatcgactcggaccgatg

SEQ ID NO: 12747 - DNA, 203 bp, Artificial sequence
  synthetic
ggcgcgccagtcctcacagttcgcagatggggggcttttagccacggtctctggtctgatgaagcagaaaagaagatgaggatcagggggggtagtccttttaggtcacgaatcaatatgttaaggatacctgtaagaaaggccttagtaggcctttctaagtctcctaaaggatgtgttcgaacaaccgactcggaccgatg

SEQ ID NO: 12748 - DNA, 203 bp, Artificial sequence
  synthetic
ggcgcgccagtcctacatctgcgcagatggggggcttttagccacggtctctggtctgatgaagcagaaaagaagatgaggatcagggggtcctcgggaacgctgtcacgaatcaatagagcggtacccatagtaagaaaggccttagtaggcctttctaagtctcctaaaggatgtgttcgaacaaccgactcggaccgatg

SEQ ID NO: 12749 - DNA, 203 bp, Artificial sequence
  synthetic
ggcgcgccagtcctaagaatgcgcagatggggggcttttagccacggtctctggtctgatgaagcagaaaagaagatgaggatcagggggtcctcgggaacgctgtcacgaatcaatatgttaaggatacctgtaagaaaggccttagtaggcctttctaagtctcctaaaggatgtgttcgaacaaccgactcggaccgatg

SEQ ID NO: 12750 - DNA, 203 bp, Artificial sequence
  synthetic
ggcgcgccagtcctaaatcgacgcagcagcgactaagggcgtaaacagttgaggccgtccccgactccttcctcccccttccctcccccttttttttgttttccgttcccctttcccctcccttccctatccccgacgaccggatcctgaggaggcagctgcggtggcagctgctgagttctcggtgacgactcggaccgatg

SEQ ID NO: 12751 - DNA, 203 bp, Artificial sequence
  synthetic
ggcgcgccagtccttgggacaggcagcagcgactcctctgagctgagtagtctcaaacggtggactccttcctcccccttccctcccccttttttttgttttccgttcccctttcccctcccttccctatccccgacgaccggatcctgaggaggcagctgcggtggcagctgctgagttctcggtgacgactcggaccgatg

SEQ ID NO: 12752 - DNA, 203 bp, Artificial sequence
  synthetic
ggcgcgccagtccttccgtaatgcagcagcgactcctctgagctgagtttgaggccgtccccgactccttcctcccccttccctcccccttttttttgttttccgttcccctttcccccgggggtatctcgaccgacgaccggatcctgaggaggcagctgcggtggcagctgctgagttctcggtgacgactcggaccgatg

SEQ ID NO: 12753 - DNA, 203 bp, Artificial sequence
  synthetic
ggcgcgccagtcctcgtacgatgcagcagcgactcctctgagctgagtttgaggccgtccccgactccttcctcccccttccctcccccttttttttgttttccgttcccctttcccctcccttccctatccccgacgaccggatcaacgcagactgaaggcggtggcagctgctgagttctcggtgacgactcggaccgatg

SEQ ID NO: 12754 - DNA, 203 bp, Artificial sequence
  synthetic
ggcgcgccagtcctgcgggtgggcagcagcgactcctctgagctgagtttgaggccgtccccgactccttcctcccccttccctcccccttttttttgttttccgttcccctttcccctcccttccctatccccgacgaccggatcctgaggaggcagctcgttccattagcagtgagttctcggtgacgactcggaccgatg

SEQ ID NO: 12755 - DNA, 203 bp, Artificial sequence
  synthetic
ggcgcgccagtcctgaggcaccgcagcagcgactcctctgagctgagtttgaggccgtccccgactccttcctcccccttccctcccccttttttttgttttccgttcccctttcccctcccttccctatccccgacgaccggatcctgaggaggcagctgcggtggcagctgctgagttctcggtgacgactcggaccgatg

SEQ ID NO: 12756 - DNA, 203 bp, Artificial sequence
  synthetic
ggcgcgccagtcctcagcgtatgcagcagcgactcctctgagctgagtttgaggccgtccccgactccttcctcccccttccctcccccttttttttgttttcctccggaagcgagtgtcccttccctatccccgacgaccggatcctgaggaggcagctgcggtggcagctgctgagttctcggtgacgactcggaccgatg

SEQ ID NO: 12757 - DNA, 203 bp, Artificial sequence
  synthetic
ggcgcgccagtcctaacggcccgcagccggccgtgcgcctgcgcggtgagtacatttctttcgcagtcgtggctgcagcgctgaggcgagaggttggtgggtgtctccggccataatgacccaggctgagaagggtgatacggagaacggaaaggagaagggcggcgagaaggagaaggagcagcgcgcgactcggaccgatg

SEQ ID NO: 12758 - DNA, 203 bp, Artificial sequence
  synthetic
ggcgcgccagtcctacgactaggcagccggccgtgcgcctgcgcggtggcccttccatcccggcagtcgtggctgcagcgctgaggcgagaggttggtgggtgtctccggccataatgacccaggctgagaaccccagcgattgctacggaaaggagaagggcggcgagaaggagaaggagcagcgcgcgactcggaccgatg

SEQ ID NO: 12759 - DNA, 203 bp, Artificial sequence
  synthetic
ggcgcgccagtcctttaggttcgcagccggccgtgcgcctgcgcggtggcccttccatcccggcagtcgtggctgcagcgctgaggcgagaggttggtgggtgtctccggccataatgacccaggctgagaagggtgatacggagagattcctcagaggcggcggcgagaaggagaaggagcagcgcgcgactcggaccgatg

SEQ ID NO: 12760 - DNA, 203 bp, Artificial sequence
  synthetic
ggcgcgccagtccttgctatctgcagccggccgtgcgcctgcgcggtggcccttccatcccggcagtcgtggctgccagtaaagacaagtaggttggtgggtgtctccggccataatgacccaggctgagaagggtgatacggagaacggaaaggagaagggcggcgagaaggagaaggagcagcgcgcgactcggaccgatg

SEQ ID NO: 12761 - DNA, 203 bp, Artificial sequence
  synthetic
ggcgcgccagtcctgctcagctgcagctgctgctacggctggactcgttcttttccatcagattcatcatcaacagcatggaagcgagaaaccaaacagctatttcaaaattccttctcctgggactgatagaggatccggaactgcagcccgtccttttcagcctgttcctgtccatgtacttggtccgactcggaccgatg

SEQ ID NO: 12762 - DNA, 203 bp, Artificial sequence
  synthetic
ggcgcgccagtcctcactgcatgcagctgctgcttacagattttattatcttttccatcagacgacgacgatgattcatggaagcgagaaaccaaacagctatttcaaaattccttctcctgggactgatagaggatccggaactgcagcccgtccttttcagcctgttcctgtccatgtacttggtccgactcggaccgatg

SEQ ID NO: 12763 - DNA, 203 bp, Artificial sequence
  synthetic
ggcgcgccagtcctaagggcgtgcagctgctgcttacagattttattatcttttccatcagattcatcatcaacagcatggaagcgagaaaccaaacagctattgaccggagatcctacctgggactgatagaggatccggaactgcagcccgtccttttcagcctgttcctgtccatgtacttggtccgactcggaccgatg

SEQ ID NO: 12764 - DNA, 203 bp, Artificial sequence
  synthetic
ggcgcgccagtcctggtaacacgcaggacagccccagcgagcctctggagtccctgtggcagaactcaaatggaagactccaggtactgtcccaggggagcagggtgtcacctccgttggatagagccggccaggttgcagcgcggacacactcgcaggtcgctgtggccccagcctcgcctgacagacgactcggaccgatg

SEQ ID NO: 12765 - DNA, 203 bp, Artificial sequence
  synthetic
ggcgcgccagtccttactattcgcaggacagccccagcgagcctctggagtccctgtggcagaactcaaatggaaggaggagcagctgcacccaggggagcagggtgtcacctccgttggatagagccggccaggttgcagcgcggacacactcgcaggtcgctgtggccccagcctcgcctgacagacgactcggaccgatg

SEQ ID NO: 12766 - DNA, 203 bp, Artificial sequence
  synthetic
ggcgcgccagtcctggctatacgcaggacagccccagcgagcctctggagtccctgtggcagaactcaaatggaaggaggagcagctgcacccaggggagcagggtgtcacctccgttggatagagccggccaggttgcagcgcggacacactcgcaggtgttccaaatatagtcctcgcctgacagacgactcggaccgatg

SEQ ID NO: 12767 - DNA, 203 bp, Artificial sequence
  synthetic
ggcgcgccagtcctgatacttggcaggtgttgcaagatactactgtccgggtgtgggcctcgctcaccggcggttggttcttcgacccgcaccagagcaccttctccaactgcttccacctctatgtgtggatcttcctgctcatctttcccttcttactgtacatggtcctgcctcccagcttgatgcgactcggaccgatg

SEQ ID NO: 12768 - DNA, 203 bp, Artificial sequence
  synthetic
ggcgcgccagtcctgcaccagtgcaggtgttgcagatcctgcgccaggcatctcataaagacctcaccggcggttggttcttcgacccgcaccagagcaccttctccaactgcttccacctctatgtgtggatcttcctgctcatctttcccttcttactgtacatggtcctgcctcccagcttgatgcgactcggaccgatg

SEQ ID NO: 12769 - DNA, 203 bp, Artificial sequence
  synthetic
ggcgcgccagtcctgacatcgagcaggtgttgcagatcctgcgccagggggtgtgggcctcgctcaattctaacgggttcttcgacccgcaccagagcaccttctccaactgcttccacctctatgtgtggatcttcctgctcatctttcccttcttactgtacatggtcctgcctcccagcttgatgcgactcggaccgatg

SEQ ID NO: 12770 - DNA, 203 bp, Artificial sequence
  synthetic
ggcgcgccagtcctacctagttgcaggtgttgcagatcctgcgccagggggtgtgggcctcgctcaccggcggttgcacaggaccgtaaaaccagagcaccttctccaactgcttccacctctatgtgtggatcttcctgctcatctttcccttcttactgtacatggtcctgcctcccagcttgatgcgactcggaccgatg

SEQ ID NO: 12771 - DNA, 203 bp, Artificial sequence
  synthetic
ggcgcgccagtcctcctctccggcaggtgttgcagatcctgcgccagggggtgtgggcctcgctcaccggcggttggttcttcgacccgcaccagagcaccttctccaactgcttccacctctatgtgtggatcttcctgctcatcgaattgggggattcgtacatggtcctgcctcccagcttgatgcgactcggaccgatg

SEQ ID NO: 12772 - DNA, 203 bp, Artificial sequence
  synthetic
ggcgcgccagtcctcctacgcagcaggtgttgcagatcctgcgccagggggtgtgggcctcgctcaccggcggttggttcttcgacccgcaccagagcaccttctccaactgcttccacctctatgtgtggatcttcctgctcatctttcccttcttactgtacatggtcctgctgggttcaagaggacgactcggaccgatg

SEQ ID NO: 12773 - DNA, 203 bp, Artificial sequence
  synthetic
ggcgcgccagtccttgatctgtgcaggtgttgcagatcctgcgccagggggtgtgggcctcgctcaccggcggttggttcttcgacccgcaccagagcaccttctccaactgcttccacctctatgtgtggatcttcctgctcatctttcccttcttacttgttcgtaggggaactcccagcttgatgcgactcggaccgatg

SEQ ID NO: 12774 - DNA, 203 bp, Artificial sequence
  synthetic
ggcgcgccagtcctctgaggctgcaggtgttgcagatcctgcgccagggggtgtgggcctcgctcaccggcggttggttcttcgacccgcaccagagcaccttctccaactgcttccagagagtatgcaacttcttcctgctcatctttcccttcttactgtacatggtcctgcctcccagcttgatgcgactcggaccgatg

SEQ ID NO: 12775 - DNA, 203 bp, Artificial sequence
  synthetic
ggcgcgccagtcctcgtgtgccgcaggtgttgcagatcctgcgccagggggtgtgggcctcgctcaccggcggttggttcttcgacccgcctagcgaaggaccgtccaactgcttccacctctatgtgtggatcttcctgctcatctttcccttcttactgtacatggtcctgcctcccagcttgatgcgactcggaccgatg

SEQ ID NO: 12776 - DNA, 203 bp, Artificial sequence
  synthetic
ggcgcgccagtccttcccgagggcataatctcctgaatcccgggtttgccatttaatcatacaacatccacacgggagacaccttctacttccccaacttccgcgcgtccggggcgcagcttcccgggctgccttcgctgtcctacccacgccgcgacaacgtgtgctccctgtcctggccgtcggcgcgactcggaccgatg

SEQ ID NO: 12777 - DNA, 203 bp, Artificial sequence
  synthetic
ggcgcgccagtcctaaactagggcataatctcctgaatcccgggtttgtggggccgctggtaaacatccacacgggagacaccttcccacaagccaacttccgcgcgtccggggcgcagcttcccgggctgccttcgctgtcctacccacgccgcgacaacgtgtgctccctgtcctggccgtcggcgcgactcggaccgatg

SEQ ID NO: 12778 - DNA, 203 bp, Artificial sequence
  synthetic
ggcgcgccagtccttggcgccggcataatctcctgaatcccgggtttgtggggccgctggtaaacatccacacgggagacaccttctacttccccaacttccgcatcgtatccctatggcttcccgggctgccttcgctgtcctacccacgccgcgacaacgtgtgctccctgtcctggccgtcggcgcgactcggaccgatg

SEQ ID NO: 12779 - DNA, 203 bp, Artificial sequence
  synthetic
ggcgcgccagtccttagcaactgcataatctcctgaatcccgggtttgtggggccgctggtaaacatccacacgggagacaccttctacttccccaacttccgcgcgtccggggcgcagcttcccgggctgccttcgctgtcctacccacgccgcgacaacgtgacacgattgtcctggccgtcggcgcgactcggaccgatg

SEQ ID NO: 12780 - DNA, 203 bp, Artificial sequence
  synthetic
ggcgcgccagtcctaatccgaggcataatctcctgaatcccgggtttgtggggccgctggtaaacatccacacgggagacaccttctacttccccaacttccgcgcgtccggggcgcagcttcccgggctgccttcgctgtcctacccacgccgcgacaacgtgtgctccctgtcctggccgtcggcgcgactcggaccgatg

SEQ ID NO: 12781 - DNA, 203 bp, Artificial sequence
  synthetic
ggcgcgccagtcctcggcagcggcataatctcctgaatcccgggtttgtggggccgctggtaaacatccacacgggagacaccttctacttccccaacttccgcgcgtccggggcgcagcttcccgggctgccttcgctgtcctacccacgccgcgacaacgtgtgctccctgtgtgacgatcgtcttcgactcggaccgatg

SEQ ID NO: 12782 - DNA, 203 bp, Artificial sequence
  synthetic
ggcgcgccagtcctgttcatacgcataatctcctgaatcccgggtttgtggggccgctggtaaacatccacacgggagacaccttctacttccccaacttccgcgcgtccggggcgcagcttcccgggctgccttcgctgtcctactgcatggcgttgtgcgtgtgctccctgtcctggccgtcggcgcgactcggaccgatg

SEQ ID NO: 12783 - DNA, 203 bp, Artificial sequence
  synthetic
ggcgcgccagtcctcaaccaccgcataatctcctgaatcccgggtttgtggggccgctggtaaacatccacacgggagacaccttctacttccccaacttccgcgcgtccggggcgcagcttcccgggctgcggcaagctaagctgccacgccgcgacaacgtgtgctccctgtcctggccgtcggcgcgactcggaccgatg

SEQ ID NO: 12784 - DNA, 203 bp, Artificial sequence
  synthetic
ggcgcgccagtcctggacgttcgcatacccaataaaagattattatatgtagccgtgtaccataataaaatacattgcataccctcttttaataaaaaatattgcatacgttgacgaaacaaattttcgttgcatacccaataaaagattattatattgcataccttttcttgccataccatttagcccgactcggaccgatg

SEQ ID NO: 12785 - DNA, 203 bp, Artificial sequence
  synthetic
ggcgcgccagtcctagtggccagcatacccaataaaagattattatattgcatacccgtttttaataaaatacattcgggcgagcggacaaataaaaaatattgcatacgttgacgaaacaaattttcgttgcatacccaataaaagattattatattgcataccttttcttgccataccatttagcccgactcggaccgatg

SEQ ID NO: 12786 - DNA, 203 bp, Artificial sequence
  synthetic
ggcgcgccagtccttcatcatcgcatgttacagaaaagcaccggttacccagcttggagacaacatgtggttcttgacaactctgctcctttgggttccagttgatgggcaagtggacaccacaaaggcagtgatcactttgcagcctccatgggtcagcgtgttccaagaggaaaccgtaaccttgccgactcggaccgatg

SEQ ID NO: 12787 - DNA, 203 bp, Artificial sequence
  synthetic
ggcgcgccagtcctccttagaggcatgttacagagaattgataatatgccagcttggagacaacatgtggttcttgacaactctgctcctttggggctggctactactgcaggtctccagcagagtcttcatggaaggagaacctctggccttgaggtgtcatgcgtggaaggataagctggtgtacacgactcggaccgatg

SEQ ID NO: 12788 - DNA, 203 bp, Artificial sequence
  synthetic
ggcgcgccagtcctcactttccgcatgttacagatttcacctggtgaaccagcttggagacaacatgtgggaacgccgctgtctgctcctttggggctggctactactgcaggtctccagcagagtcttcatggaaggagaacctctggccttgaggtgtcatgcgtggaaggataagctggtgtacacgactcggaccgatg

SEQ ID NO: 12789 - DNA, 203 bp, Artificial sequence
  synthetic
ggcgcgccagtcctgagtgacggcatgttacagatttcacctggtgaaccagcttggagacaacatgtggttcttgacaactctgctcctttggggctggctactactgcaggtctccagcagagtcttcatggaaggagaacctctggccttgaggtgtcatgcgtggaaggataagctggtgtacacgactcggaccgatg

SEQ ID NO: 12790 - DNA, 203 bp, Artificial sequence
  synthetic
ggcgcgccagtccttggccctagcatgttacagatttcactactcccaagtcgaactctcgtacatgtggttcttgacaactctgctcctttgggttccagttgatgggcaagtggacaccacaaaggcagtgatcactttgcagcctccatgggtcagcgtgttccaagaggaaaccgtaaccttgccgactcggaccgatg

SEQ ID NO: 12791 - DNA, 203 bp, Artificial sequence
  synthetic
ggcgcgccagtcctggcctatggcatgttacagatttcactactcccaccagcttggagacaacatgtggcaaacacgtcatctgctcctttgggttccagttgatgggcaagtggacaccacaaaggcagtgatcactttgcagcctccatgggtcagcgtgttccaagaggaaaccgtaaccttgccgactcggaccgatg

SEQ ID NO: 12792 - DNA, 203 bp, Artificial sequence
  synthetic
ggcgcgccagtcctctggaagggcatgttacagatttcactactcccaccagcttggagacaacatgtggttcttgacaactctgctcctacaacgagggtagcatgggcaagtggacaccacaaaggcagtgatcactttgcagcctccatgggtcagcgtgttccaagaggaaaccgtaaccttgccgactcggaccgatg

SEQ ID NO: 12793 - DNA, 203 bp, Artificial sequence
  synthetic
ggcgcgccagtccttcgggcttgcatgttacagatttcactactcccaccagcttggagacaacatgtggttcttgacaactctgctcctttggggctggctactactgcaggtctccagcagagtcttcatggaaggagaacctctggccttgaggtgtcatgcgtggaaggaagctagaaccgcttcgactcggaccgatg

SEQ ID NO: 12794 - DNA, 203 bp, Artificial sequence
  synthetic
ggcgcgccagtcctaggatgccgcatgttacagatttcactactcccaccagcttggagacaacatgtggttcttgacaactctgctcctttggggctggctactactgcaggtctcccatgttcagcattgggaaggagaacctctggccttgaggtgtcatgcgtggaaggataagctggtgtacacgactcggaccgatg

SEQ ID NO: 12795 - DNA, 203 bp, Artificial sequence
  synthetic
ggcgcgccagtcctggagatcggcatgttacagatttcactactcccaccagcttggagacaacatgtggttcttgacaactctgctcctttgggttccagttgatgggcaagtggacaccacaaaggcagtttctgggggcgccgctccatgggtcagcgtgttccaagaggaaaccgtaaccttgccgactcggaccgatg

SEQ ID NO: 12796 - DNA, 203 bp, Artificial sequence
  synthetic
ggcgcgccagtcctagaggtccgcatgttacagatttcactactcccaccagcttggagacaacatgtggttcttgctcgggaccaatgcttggggctggctactactgcaggtctccagcagagtcttcatggaaggagaacctctggccttgaggtgtcatgcgtggaaggataagctggtgtacacgactcggaccgatg

SEQ ID NO: 12797 - DNA, 203 bp, Artificial sequence
  synthetic
ggcgcgccagtcctggcgcattgcatgttacagatttcactactcccaccagcttggagacacggctccccgggacacaactctgctcctttggggctggctactactgcaggtctccagcagagtcttcatggaaggagaacctctggccttgaggtgtcatgcgtggaaggataagctggtgtacacgactcggaccgatg

SEQ ID NO: 12798 - DNA, 203 bp, Artificial sequence
  synthetic
ggcgcgccagtccttcggtagggcatgttacagatttcactactcccaccagcttggagacatgtccacaaggcccacaactctgctcctttgggttccagttgatgggcaagtggacaccacaaaggcagtgatcactttgcagcctccatgggtcagcgtgttccaagaggaaaccgtaaccttgccgactcggaccgatg

SEQ ID NO: 12799 - DNA, 203 bp, Artificial sequence
  synthetic
ggcgcgccagtcctcgttgtgtgcatgttacagatttcactactcccaggtataaactatggacatgtggttcttgacaactctgctcctttggggctggctactactgcaggtctccagcagagtcttcatggaaggagaacctctggccttgaggtgtcatgcgtggaaggataagctggtgtacacgactcggaccgatg

SEQ ID NO: 12800 - DNA, 203 bp, Artificial sequence
  synthetic
ggcgcgccagtccttagaaggggcattctgtgtttgacgcatgcgcatagctaaccgcacccggttcagctcgcctttcttggccagaggcgccggttggactcacgggcggggcatgatggtggtgggtacgggcacctcgctggcgctctcctccctcctgtccctgctgctctttgctgggatgccgactcggaccgatg

SEQ ID NO: 12801 - DNA, 203 bp, Artificial sequence
  synthetic
ggcgcgccagtccttcggcccagcattgcccccaaatgaggaggggggtgggcattgtccccgggtcttccaacggactgggcgttgctcccggacactgaggactggccccggggtctcgctcaccttcagcagcgtccaccgcctgccacagagcgttcgatcgctcgctgcctgagctcctggtgcgactcggaccgatg

SEQ ID NO: 12802 - DNA, 203 bp, Artificial sequence
  synthetic
ggcgcgccagtcctgaattaatgcattgcccccagtctcccccaaatttgggcattgtccccgggtcttccaacggactgggcgttgctcccggacactgaggactggccccggggtctcgctcaccttcagcagcgtccaccgccgcttgatccctaagcgatcgctcgctgcctgagctcctggtgcgactcggaccgatg

SEQ ID NO: 12803 - DNA, 203 bp, Artificial sequence
  synthetic
ggcgcgccagtcctgcgggatcgcattgcccccagtctcccccaaatttgggcattgtccccgggtcttccaacggactgggcgttgctcccggacactgaggactggccccggggtctcgctcaccttcagcagcgtccaccgcctgccacagagcgttcgatcgctcgctgctgtgtagaaaatcacgactcggaccgatg

SEQ ID NO: 12804 - DNA, 203 bp, Artificial sequence
  synthetic
ggcgcgccagtcctttcattaagccaaggaacttcagtgctgtgaactcacaactctaaggacgtggtttttcactcagtctccaggtgctgttactcaactcagtcctaggaacgtcgggtcctgggaaggagcccaagcgctcccagccagcttccaggcgctaagaaaccccggtgcttcccatccgactcggaccgatg

SEQ ID NO: 12805 - DNA, 203 bp, Artificial sequence
  synthetic
ggcgcgccagtcctaacgttcagccaaggaacttcagtgctgtgaactcacaactctaaggagccctccaaagttccagtctccaggtgctgttactcaactcagtcctaggaacgtcgggtcctgggaaggagcccaagcgctcccagccagcttccaggcgctaagaaacccttcattccgaaggtcgactcggaccgatg

SEQ ID NO: 12806 - DNA, 203 bp, Artificial sequence
  synthetic
ggcgcgccagtcctgctagtatgccaaggaacttcagtgctgtgaactcacaactctaaggagccctccaaagttccagtctccaggtgctgttactcaactcagtcctaggaacgtcgggtcctgggaaggcaggattttttggacagccagcttccaggcgctaagaaaccccggtgcttcccatccgactcggaccgatg

SEQ ID NO: 12807 - DNA, 203 bp, Artificial sequence
  synthetic
ggcgcgccagtcctaagcctcggccacccctcctagtctagtcgtgtaggtccgacccgcaagcaagggggcgggtccggctttgaaaagccggcgggtcgggccttgaggtggaaggcgggaaaatggcggattcctcggggcgaggcgctgggaagcctgcaaccggccccacaaattctagcagtcgactcggaccgatg

SEQ ID NO: 12808 - DNA, 203 bp, Artificial sequence
  synthetic
ggcgcgccagtcctgttggcatgccacccctcctgcgtctccacaaatggtccgacccgcaagcaagggggcgggtccggctttgaaaagccggcgggtcgggccttgaggtggaaggcgggaaaatggcggattcctcggggcgaggcgctgggaagccgtagcttactagttcaaattctagcagtcgactcggaccgatg

SEQ ID NO: 12809 - DNA, 203 bp, Artificial sequence
  synthetic
ggcgcgccagtccttctggagcgccacccctcctgcgtctccacaaatggtccgacccgcaagcaagggggcgggtccggctttgaaaagccggcgggtcgggccttgaggtggaaggcgggaaaatggcggattcctcggggcgaggcgctgggaagcctgcaaccggccccaacctaatacaagtgcgactcggaccgatg

SEQ ID NO: 12810 - DNA, 203 bp, Artificial sequence
  synthetic
ggcgcgccagtccttccgcgaagccacccctcctgcgtctccacaaatggtccgacccgcaagcaagggggcgggtccggctttgaaaagccggcgggtcgggctggaccaccccttacgggaaaatggcggattcctcggggcgaggcgctgggaagcctgcaaccggccccacaaattctagcagtcgactcggaccgatg

SEQ ID NO: 12811 - DNA, 203 bp, Artificial sequence
  synthetic
ggcgcgccagtcctacagccaagccacccctcctgcgtctccacaaatggtccgacccgcaagcaagggggcgggtccggctttgaaaagggcaataagtaatacttgaggtggaaggcgggaaaatggcggattcctcggggcgaggcgctgggaagcctgcaaccggccccacaaattctagcagtcgactcggaccgatg

SEQ ID NO: 12812 - DNA, 203 bp, Artificial sequence
  synthetic
ggcgcgccagtcctcccttgcagccacctccggtcggcgactgcggcgggctcgacgaggcgagccttcttcgcttggcgggaagacggccgggtgcgccttggggtttagtggcggcttctccatgggtccagccagccgcttccctgtgctgtgagtgtttccaccactccaggagacagcattcacgactcggaccgatg

SEQ ID NO: 12813 - DNA, 203 bp, Artificial sequence
  synthetic
ggcgcgccagtcctcttaccgtgccacctccggtcggcgactgcggcgggctcgacgaggcggctgacggggcggcggcgggaagacggcactagcatggcgttggtttagtggcggcttctccatgggtccagccagccgcttccctgtgctgtgagtgtttccaccactccaggagacagcattcacgactcggaccgatg

SEQ ID NO: 12814 - DNA, 203 bp, Artificial sequence
  synthetic
ggcgcgccagtcctcctttcacgccacctccggtcggcgactgcggcgggctcgacgaggcggctgacggggcggcggcgggaagacggccgggtgcgccttggggtttagtggcggcttctccatgggtccagccagccgcttccctgtgctgtgagtgtttccaccactccaggagacagcattcacgactcggaccgatg

SEQ ID NO: 12815 - DNA, 203 bp, Artificial sequence
  synthetic
ggcgcgccagtcctaacgatttgccacctccggtcggcgactgcggcgggctcgacgaggcggctgacggggcggcggcgggaagacggccgggtgcgccttggggtttagtggcggcttctccatgggtccagccagccgcttccgcagcggcgtttgctttccaccactccaggagacagcattcacgactcggaccgatg

SEQ ID NO: 12816 - DNA, 203 bp, Artificial sequence
  synthetic
ggcgcgccagtcctaccatcaagccacctccggtcggcgactgcggcgtaagtctacctaatgctgacggggcggcggcgggaagacggccgggtgcgccttggggtttagtggcggcttctccatgggtccagccagccgcttccctgtgctgtgagtgtttccaccactccaggagacagcattcacgactcggaccgatg

SEQ ID NO: 12817 - DNA, 203 bp, Artificial sequence
  synthetic
ggcgcgccagtcctgaatcctcgccaggaacgattactattcttggttctctggaattactcagtttcaaaagggaaaggagtttgagtttgtagaaggacaaggtgtgcctattgcaccaggagtcccagctactgaagctaaggggtactggtacagacacaacagacgttcttttaaaacagccgcgactcggaccgatg

SEQ ID NO: 12818 - DNA, 203 bp, Artificial sequence
  synthetic
ggcgcgccagtcctaatcgtgtgccaggacgaccgggtcctttcttggataaacccgctcaatgcctggagatttgggcgtgcccccgcaagactgctagccgagtagtgttgggtcgcgaaaggccttgtggtactgcctgatagggtgcttgcgagtgccccgggaggtctccggctgttaaaggacgactcggaccgatg

SEQ ID NO: 12819 - DNA, 203 bp, Artificial sequence
  synthetic
ggcgcgccagtcctggagtagtgccaggacgaccgggtcctttcttggataaacccgctcaatgcctggagatttgggcgtgcccccgcatccacttattaaaggtagtgttgggtcgcgaaaggccttgtggtactgcctgatagggtgcttgcgagtgccccgggaggtctcgtagaccgtgcacccgactcggaccgatg

SEQ ID NO: 12820 - DNA, 203 bp, Artificial sequence
  synthetic
ggcgcgccagtcctctgtgaaggccaggacgaccgggtcctttcttggtccgcggtcaggcgtgcctggagatttgggcgtgcccccgcaagactgctagccgagtagtgttgggtcgcgaaaggccttgtggtactgcctgatagggtgcttgcgagtgccccgggaggtctcgtagaccgtgcacccgactcggaccgatg

SEQ ID NO: 12821 - DNA, 203 bp, Artificial sequence
  synthetic
ggcgcgccagtcctgcagtcgagccatggtaagcatatgaattgaatcaagcgcggacgccatggtaagcgcggacgccatggtaagcgcggacgccatggtaagcgcggacgccatggtaagcgcggacgccatggtaagcgcggacgccatggtaagcgcggacgccatgcacacggaccctgactcgactcggaccgatg

SEQ ID NO: 12822 - DNA, 203 bp, Artificial sequence
  synthetic
ggcgcgccagtccttgaggtgggccatggtaagcgcggacgccatggtaagcgcggacgccatggtaagcgcggacgccatggtaagcgcggacgccatggtaagcgcggacgccatgcattcactattgaacatggtaagcgcggacgccatggtaagcgcggacgccatgcacacggaccctgactcgactcggaccgatg

SEQ ID NO: 12823 - DNA, 203 bp, Artificial sequence
  synthetic
ggcgcgccagtcctttgcgctcgccatggtaagcgcggacgccatggtaagcgcggacgccatggtaagcgcggacgccatggtaagcgcggacgccatggtaagcgcggacgccatggtaagcgcggacgccatggtaagcgcggtaaagcctagggatgcggacgccatgcacacggaccctgactcgactcggaccgatg

SEQ ID NO: 12824 - DNA, 203 bp, Artificial sequence
  synthetic
ggcgcgccagtcctgtcctacagccatggtaagcgcggacgccatggtaagcgcggacgccatggtaagcgcggacgccatggtaagcgcggacgccatggtaagcgcggacgccatggtaagcgcggacgctgatcattcaagcaacgccatggtaagcgcggacgccatgcacacggaccctgactcgactcggaccgatg

SEQ ID NO: 12825 - DNA, 203 bp, Artificial sequence
  synthetic
ggcgcgccagtcctaagtgctcgcccacgtacggtccacgtcgcccttcaatgtctctcttgaccaataggcgtagccggcgagttgacaaggaccagtgggggccgggcgggaggggacgcctgttgtgaagctgcccttcccggggaggcgggaaatgcatggggccacccagctccgcggcggcccgactcggaccgatg

SEQ ID NO: 12826 - DNA, 203 bp, Artificial sequence
  synthetic
ggcgcgccagtcctacatggaggcccacgtacggtccacgtcgcccttcaatgtctctcttgaccaataggcgtagccggcgagttgacaaggaccagtgggggccgggcgggagggggaaggacccccaccgctgcccttcccggggaggcgggaaatgcatggggccacccagctccgcggcggcccgactcggaccgatg

SEQ ID NO: 12827 - DNA, 203 bp, Artificial sequence
  synthetic
ggcgcgccagtcctgtgagtacgcccacgtacggtccacgtcgcccttcaatgtctctcttgaccaataggcgtagccggcgagttgacaaggaccagtggggggttacgatattaacgaaggacccccaccgctgcccttcccggggaggcgggaaatgcatggggccacccagctccgcggcggcccgactcggaccgatg

SEQ ID NO: 12828 - DNA, 203 bp, Artificial sequence
  synthetic
ggcgcgccagtcctagctggatgcccacgtacggtccacgtcgcccttcaatgtctctcttgaccaataggcgtagccggcgagttgacacttgtattaattctccgggcgggagggggaaggacccccaccgctgcccttcccggggaggcgggaaatgcatggggccacccagctccgcggcggcccgactcggaccgatg

SEQ ID NO: 12829 - DNA, 203 bp, Artificial sequence
  synthetic
ggcgcgccagtcctcagggtgcgcccattccctgaggtaaggaaggggccttaacctctgctggtgaccagaagcctgcatttctgcattctgcttaattccctttccttagatttgaaagaagccaacactaaaccacaaatatacaacaaggccattttctcaaacgagagtcagcctttaacgaacgactcggaccgatg

SEQ ID NO: 12830 - DNA, 203 bp, Artificial sequence
  synthetic
ggcgcgccagtcctaacagagcgccccactgcgcatggcacgttgcgtactcccctcccagcaaccggtctggcggcggcgcggcagtaaaactgaggaggcggagccaagacggtcggggctgcttgctaactccaggaacaggtttaagtttttgaaaacaccagtaaggcgcacagtaggaactccgactcggaccgatg

SEQ ID NO: 12831 - DNA, 203 bp, Artificial sequence
  synthetic
ggcgcgccagtcctcttgcgttgccccactgcgcatggcacgttgcgtactcccctcccagcaaccggtctggcggcggcgcggcagtaacctgacaacttaccagccaagacggtcggggctgcttgctaactccaggaacaggtttaagtttttgaaactgaagtaggcctacacagtaggaactccgactcggaccgatg

SEQ ID NO: 12832 - DNA, 203 bp, Artificial sequence
  synthetic
ggcgcgccagtcctccgaacttgccccactgcgcatggcacgttgcgtactcccctcccagcaaccggtctggcggtctgtaacggactgaactgaggaggcggagccaagacggtcggggctgcttgctaactccaggaacaggtttaagtttttgaaactgaagtaggcctacacagtaggaactccgactcggaccgatg

SEQ ID NO: 12833 - DNA, 203 bp, Artificial sequence
  synthetic
ggcgcgccagtcctaatgagaagccccactgcgccatagtacaattcaactcccctcccagcaaccggtctggcggcggcgcggcagtaaaactgaggaggcggagccaagacggtcggggctgcttgctaactccaggaacaggtttaagtttttgaaactgaagtaggcctacacagtaggaactccgactcggaccgatg

SEQ ID NO: 12834 - DNA, 203 bp, Artificial sequence
  synthetic
ggcgcgccagtcctcacgctgggccccctggctggttcggtgtcttttactggtaacgcccatgctcccagggggccctgacgccctggggcacttttgctctgcacaggaccacgctggggtttgccatggtgacataaaggggtgtagaggaaggaaggagcaagaccagcctgtagactgtgccccgactcggaccgatg

SEQ ID NO: 12835 - DNA, 203 bp, Artificial sequence
  synthetic
ggcgcgccagtcctcgtcagtagccccctggctggttcggtgtcttttgacctgctgttgacgagagggttttccgcctgacgccctggggcacttttgctctgcacaggaccacgctggggtttgccatggtgacataaaggggtgtagaggaaggaaggagcaagaccagcctgtagactgtgccccgactcggaccgatg

SEQ ID NO: 12836 - DNA, 203 bp, Artificial sequence
  synthetic
ggcgcgccagtcctttaaggaggccccctggctggttcggtgtcttttgacctgctgttgactgctcccagggggccctgacgccctggggcacttttgctctgacggaagagtactcggggtttgccatggtgacataaaggggtgtagaggaaggaaggagcaagaccagcctgtagactgtgccccgactcggaccgatg

SEQ ID NO: 12837 - DNA, 203 bp, Artificial sequence
  synthetic
ggcgcgccagtcctttgggactgccccctggctggttcggtgtcttttgacctgctgttgactgctcccagggggccctgacgccctggggcacttttgctctgcacaggaccacgctggggtttgccatggtgacataaaggggtcactttcgtcacgagagcaagaccagcctgtagactgtgccccgactcggaccgatg

SEQ ID NO: 12838 - DNA, 203 bp, Artificial sequence
  synthetic
ggcgcgccagtcctgggtagaagccccctggctggttcggtgtcttttgacctgctgttgactgctcccagggggccctgacgccctggggcacttttgctctgcacaggaccacgctggggtttgccatggtgacataaaggggtgtagaggaaggaaggagcaagaccagcctgtagactgtgccccgactcggaccgatg

SEQ ID NO: 12839 - DNA, 203 bp, Artificial sequence
  synthetic
ggcgcgccagtcctaagatcacgccccgacccgtgggtcccggccaccagcgccccagccccgaggctcagaagcggcaggcggaggcggggtccgggcgctatggccatgcccggcgggtctcacgcggctgcccctcgccccgcgcgccttcggtaggaccatgtgctttatcagctggcccggcccgactcggaccgatg

SEQ ID NO: 12840 - DNA, 203 bp, Artificial sequence
  synthetic
ggcgcgccagtcctaggatagagccccgcctcctgcaggcggcccggccaccaacagcatgtcggtgcatggtggggcggtctccttcggcaaccccggccgaacggccacccagaggctgtgctgagctggcgcagcggcagcagcatgagccggaccctcgcatcggccgtgcccctgtcgagtcccgactcggaccgatg

SEQ ID NO: 12841 - DNA, 203 bp, Artificial sequence
  synthetic
ggcgcgccagtcctatatgaacgccccgcctcctgcaggcggcccggcgcggtgtttacccgcggtgcatggtggggcggtctccttcggcaaccccggccgaacggccacccagaggctgtgctgagctggcgcagcggcagcagcatgagccggaccctcgcatcggccgtgagaaaagacctcgacgactcggaccgatg

SEQ ID NO: 12842 - DNA, 203 bp, Artificial sequence
  synthetic
ggcgcgccagtcctgccgtcctgcccgactcgccctcagaaactcactcccccatcgacgcaactttctcgtcgtgccccacaaaagtaaagcttggggacctggggggagccggaagtatcgcttcgagatccccaaatactatcggggaaacggaagtggccgtcggtggcagagacctgtcggcccgactcggaccgatg

SEQ ID NO: 12843 - DNA, 203 bp, Artificial sequence
  synthetic
ggcgcgccagtcctcagtacaggcccgactcgccctcagaaactcactgtttggggctgcggactttctcgtcgtgccccacaaaagtaaagcttggggacctgattatcaattaggttatcgcttcgagatccccaaatactatcggggaaacggaagtggccgtcggtggcagagacctgtcggcccgactcggaccgatg

SEQ ID NO: 12844 - DNA, 203 bp, Artificial sequence
  synthetic
ggcgcgccagtcctttggaatcgcccgactcgccctcagaaactcactgtttggggctgcggactttctcgtcgtgccccacaaaagtaaagcttggggacctggggggagccggaagtatcgcttcgagatccccaaatactatcggggaaacggaagtggccgtcggtggcagagacctgtcggcccgactcggaccgatg

SEQ ID NO: 12845 - DNA, 203 bp, Artificial sequence
  synthetic
ggcgcgccagtcctacggttatgcccgactcgccctcagaaactcactgtttggggctgcggcgaccgctaggcctccccacaaaagtaaagcttggggacctggggggagccggaagtatcgcttcgagatccccaaatactatcggggaaacggaagtggccgtcggtggcagagacctgtcggcccgactcggaccgatg

SEQ ID NO: 12846 - DNA, 203 bp, Artificial sequence
  synthetic
ggcgcgccagtccttgctcaaagcccgactcgccggtcttgtggtctagtttggggctgcggactttctcgtcgtgccccacaaaagtaaagcttggggacctggggggagccggaagtatcgcttcgagatccccaaatactatcggggaaacggaagtggccgtcggtggcagagacctgtcggcccgactcggaccgatg

SEQ ID NO: 12847 - DNA, 203 bp, Artificial sequence
  synthetic
ggcgcgccagtccttgaatacggcccggaaccacaactatagttctcagcccgaggcggcggggctcgcgcgggtggagccgcctcggcgttcgagcggggtgggggctgcccggttgagatttcccggcgggtcccggcctctgcgtgcacgcgcctgcgtgctcgcgctcgcggttctggcgctgccgactcggaccgatg

SEQ ID NO: 12848 - DNA, 203 bp, Artificial sequence
  synthetic
ggcgcgccagtccttcaactgggcccggaaccacgtgatgcaggaggtctaaataaacctttggctcgcgcgggtggagccgcctcggcgttcgagcggggtgggggctgcccggttgagatttcccggcgggtcccggcctctgcgtgcacgcgcctgcgtgctcgcgctcgcggttctggcgctgccgactcggaccgatg

SEQ ID NO: 12849 - DNA, 203 bp, Artificial sequence
  synthetic
ggcgcgccagtcctaaccgtaagcccggaaccacgtgatgcaggaggtgcccgaggcggcggggctcgcgcgggtggagccgcctcggcgcaatgcaacaccccgggctgcccggttgagatttcccggcgggtcccggcctctgcgtgcacgcgcctgcgtgctcgcgctcgcggttctggcgctgccgactcggaccgatg

SEQ ID NO: 12850 - DNA, 203 bp, Artificial sequence
  synthetic
ggcgcgccagtcctcgtcttgcgcccggaaccacgtgatgcaggaggtgcccgaggcggcggggctcgcgcgggtggagccgcctcggcgttcgagcggggtgggggctgcccggttgagatttcccggcgggtcccggcctctgcactacgcatagctagtgctcgcgctcgcggttctggcgctgccgactcggaccgatg

SEQ ID NO: 12851 - DNA, 203 bp, Artificial sequence
  synthetic
ggcgcgccagtcctccaaccaggcccggaaccacgtgatgcaggaggtgcccgaggcggcggggctcgcgcgggtggagccgcctcggcgttcgagcggggtgggggctgcccggttgagatttcccggcgggtcccggcctctgcgtgcacgcgcctgcagttgtcattgactggttctggcgctgccgactcggaccgatg

SEQ ID NO: 12852 - DNA, 203 bp, Artificial sequence
  synthetic
ggcgcgccagtcctaggccaaggcccggaaccacgtgatgcaggaggtgcccgaggcggcggggctcgcgcgggtggagccgcctcggcgttcgagcggggtgggggctgcccggttgagatttcccggcgggtcccggcctctgcgtgcacgcgcctgcgtgctcgcgctcgcggttctggcgctgccgactcggaccgatg

SEQ ID NO: 12853 - DNA, 203 bp, Artificial sequence
  synthetic
ggcgcgccagtcctgcgttctggcccggaaccacgtgatgcaggaggtgcccgaggcggcggggctcgcgcgggtggagccgcctcggcgttcgagcggggtggttatgtgagttcccagatttcccggcgggtcccggcctctgcgtgcacgcgcctgcgtgctcgcgctcgcggttctggcgctgccgactcggaccgatg

SEQ ID NO: 12854 - DNA, 203 bp, Artificial sequence
  synthetic
ggcgcgccagtcctgtcgatccgccctcacgctcagcaccccagcctgcctgcccgcccgcctgccctgccgctgcatatgacgggcttgtgtagcgcgggagcttctcgcagcgccccgggccttctcgtggtaccctgcctgctgcctttgcccccgcactgactgcccggctccagcagccatggcgactcggaccgatg

SEQ ID NO: 12855 - DNA, 203 bp, Artificial sequence
  synthetic
ggcgcgccagtcctggcccgctgccctcacgctcagcaccccagcctgcctgcccgcccgcctgccctgccgctgcccgctgtcacaccctgtagcgcgggagcgctctaatcaagggcgggccttctcgtggtaccctgcctgctgcctttgcccccgcactgactgcccggctccagcagccatggcgactcggaccgatg

SEQ ID NO: 12856 - DNA, 203 bp, Artificial sequence
  synthetic
ggcgcgccagtcctccagtatggccctcacgctcagcaccccagcctgcctgcccgcccgcctgccctgccgctgcccgctgtcacaccctgtagcgcgggagcttctcgcagcgccccgggccttctcgtggtaccctgcctgctgcctttgcccccgcactgactgcccggctccagcagccatggcgactcggaccgatg

SEQ ID NO: 12857 - DNA, 203 bp, Artificial sequence
  synthetic
ggcgcgccagtcctcggccgttgccctcacgctcagcaccccagcctgcctgcccgcccgcctgccctgccgctgcccgctgtcacaccctgtagcgcgggagcttctcgcagcgcccttaatgcatataatgtaccctgcctgctgcctttgcccccgcactgactgcccggctccagcagccatggcgactcggaccgatg

SEQ ID NO: 12858 - DNA, 203 bp, Artificial sequence
  synthetic
ggcgcgccagtccttccaaggcgccctcacgctcagcaccccagcctgtacctttcgtgtggtgccctgccgctgcccgctgtcacaccctgtagcgcgggagcttctcgcagcgccccgggccttctcgtggtaccctgcctgctgcctttgcccccgcactgactgcccggctccagcagccatggcgactcggaccgatg

SEQ ID NO: 12859 - DNA, 203 bp, Artificial sequence
  synthetic
ggcgcgccagtcctgttatccagccctcacgctctcgcttgagtgagccctgcccgcccgcctgccctgccgctgcccgctgtcacaccctgtagcgcgggagcttctcgcagcgccccgggccttctcgtggtaccctgcctgctgcctttgcccccgcactgactgcccggctccagcagccatggcgactcggaccgatg

SEQ ID NO: 12860 - DNA, 203 bp, Artificial sequence
  synthetic
ggcgcgccagtcctgagcgcacgccgattgatgtggagcaggtggtcacaaaccagtgattggcctgtcgtaacgcgcaagtccgtggcggaaccgactactttgggtgtccgtgtttccttttattttattgtggctgcttatggtgacaatcacagattgttatcataaagcgaattggattggcccgactcggaccgatg

SEQ ID NO: 12861 - DNA, 203 bp, Artificial sequence
  synthetic
ggcgcgccagtcctccaggctagccgcagtcagactggtatcagctcgcccctctgagtcaggaaacattttcagacctatggaaactacttcctgaaaacaacgttctgtcccccttgccgtcccaagcaatggatgatttgatgctgtccccggacgatattgaacaatggttcactgaagacccacgactcggaccgatg

SEQ ID NO: 12862 - DNA, 203 bp, Artificial sequence
  synthetic
ggcgcgccagtcctacgtcagggccgcagtcagatcctagcgtcgagccccctctgagtcaggaaacattttcagaatggaaccgtagttttcctgaaaacaacgttctgtcccccttgccgtcccaagcaatggatgatttgatgctgtccccggacgatattgaacaatggttcactgaagacccacgactcggaccgatg

SEQ ID NO: 12863 - DNA, 203 bp, Artificial sequence
  synthetic
ggcgcgccagtcctgctgggcggccgcagtcagatcctagcgtcgagccccctctgagtcaggaaacattttcagacctatggaaactacgcaggtttgcggcggttctgtcccccttgccgtcccaagcaatggatgatttgatgctgtccccggacgatattgaacaatggttcactgaagacccacgactcggaccgatg

SEQ ID NO: 12864 - DNA, 203 bp, Artificial sequence
  synthetic
ggcgcgccagtcctcgtggaaggccgcagtcagatcctagcgtcgagccccctctgagtcaggaaacattttcagacctatggaaactacttcctgaaaacaacgttctgtcccccttcggaataaggaaggtggatgatttgatgctgtccccggacgatattgaacaatggttcactgaagacccacgactcggaccgatg

SEQ ID NO: 12865 - DNA, 203 bp, Artificial sequence
  synthetic
ggcgcgccagtcctagcttcccgccgcagtcagatcctagcgtcgagccccctctgagtcaggaaacattttcagacctatggaaactacttcctgaaaacaacgttctgtcccccttgccgtcccaagcaatggatgatttgatgctgtccccggacgactaactgaccgttctcactgaagacccacgactcggaccgatg

SEQ ID NO: 12866 - DNA, 203 bp, Artificial sequence
  synthetic
ggcgcgccagtcctcagattaggccgcagtcagatcctagcgtcgagccccctctgagtcaggaaacattttcagacctatggaaactacttcctgaaaacaacgttctgtcccccttgccgtcccaagcaatggatgatttgatgctgtccccggacgatattgaacaatggtgagggccgtcaagccgactcggaccgatg

SEQ ID NO: 12867 - DNA, 203 bp, Artificial sequence
  synthetic
ggcgcgccagtcctgagtaaacgccgcagtcagatcctagcgtcgagccccctctgagtcagtctgaggaaatgttcctatggaaactacttcctgaaaacaacgttctgtcccccttgccgtcccaagcaatggatgatttgatgctgtccccggacgatattgaacaatggttcactgaagacccacgactcggaccgatg

SEQ ID NO: 12868 - DNA, 203 bp, Artificial sequence
  synthetic
ggcgcgccagtccttcgtagccgccgcggcagccgaagcgcagcgagagaacgcgccaccgcggggcccgggtgcaatagagatttggtacgccacctgcgcgcagcccgaggtgagcagtgagcggcgagcgggagggcagcgaggcgttcgcgggccccctcctgctgcccgggcccggcccgctccgactcggaccgatg

SEQ ID NO: 12869 - DNA, 203 bp, Artificial sequence
  synthetic
ggcgcgccagtccttagtgaatgccgcggcagccgaagcgcagcgagagaacgcgccaccgcggggcccgggtgcagctagcgaccctctcgccacctgcgcgcagcccgaggtgagcagtgagcggcgagccttccctgccgtcagcgttcgcgggccccctcctgctgcccgggcccggcccgctccgactcggaccgatg

SEQ ID NO: 12870 - DNA, 203 bp, Artificial sequence
  synthetic
ggcgcgccagtcctctaaatgtgccgcggggggtcaggtcagcttctaggcgtgcgctcccgacatgccccgccgcgcgccattaaccgccagatttgaatcgcgggacccgttggcagaggtggcggcggcggcatgggtgccccgacgttgccccctgcctggcagccctttctcaaggaccaccgcgactcggaccgatg

SEQ ID NO: 12871 - DNA, 203 bp, Artificial sequence
  synthetic
ggcgcgccagtcctccagtggtgccgcggggggtggaccgcctaagagggcgtgcgctcccgacatgccccgccgcgcgccattaaccgccagatttgaatcgcgggacccgttggcagaggtggcggcggcggcatgggtgccccgacgttgccccctgcctggcagccctttctcaaggaccaccgcgactcggaccgatg

SEQ ID NO: 12872 - DNA, 203 bp, Artificial sequence
  synthetic
ggcgcgccagtccttatccatggccgcggggggtggaccgcctaagagggcgtgcgctcccgacatgccccgccgcgcgccattaaccgccagatttgaatcgcgggacccgttggcagaggtggcggcggcggcatgggtgccccgacgttgccccctgcctggcagcccttttagtgcttaatgaccgactcggaccgatg

SEQ ID NO: 12873 - DNA, 203 bp, Artificial sequence
  synthetic
ggcgcgccagtccttaacacgtgccgcggggggtggaccgcctaagagggcgtgcgctcccgacatgccccgccgcgcgccattaaccgctgaccgattcagttgggacccgttggcagaggtggcggcggcggcatgggtgccccgacgttgccccctgcctggcagccctttctcaaggaccaccgcgactcggaccgatg

SEQ ID NO: 12874 - DNA, 203 bp, Artificial sequence
  synthetic
ggcgcgccagtcctcttggtacgccgcggggggtggaccgcctaagagggcgtgcgctcccgacatgccccgcggcctcagggctgtttgcagatttgaatcgcgggacccgttggcagaggtggcggcggcggcatgggtgccccgacgttgccccctgcctggcagccctttctcaaggaccaccgcgactcggaccgatg

SEQ ID NO: 12875 - DNA, 203 bp, Artificial sequence
  synthetic
ggcgcgccagtcctccgcaggtgccgcggggggtggaccgcctaagagttttctaagatttcacatgccccgccgcgcgccattaaccgccagatttgaatcgcgggacccgttggcagaggtggcggcggcggcatgggtgccccgacgttgccccctgcctggcagccctttctcaaggaccaccgcgactcggaccgatg

SEQ ID NO: 12876 - DNA, 203 bp, Artificial sequence
  synthetic
ggcgcgccagtcctatatctaagccgctcaccccgccgttctcagcgcattatcgtagatgccgcgcgccctcccgccgccagtcccggcagcgccctcagttgtcctccgactcgccctcggccttccgcgccagccgcagccacagccgcaacgccacccgcagccacagccacagccacagcccccgactcggaccgatg

SEQ ID NO: 12877 - DNA, 203 bp, Artificial sequence
  synthetic
ggcgcgccagtccttacaggcagccgctcaccccgccgttctcagcgctgcccgaccccgctaatctattactgtaccgccagtcccggcagcgccctcagttgtcctccgactcgccctcggccttccgcgccagccgcagccacagccgcaacgccacccgcagccacagccacagccacagcccccgactcggaccgatg

SEQ ID NO: 12878 - DNA, 203 bp, Artificial sequence
  synthetic
ggcgcgccagtcctatttatgtgccgctcaccccgccgttctcagcgctgcccgaccccgctcgcgcgccctcccgccgccagtcccggcagcgccctcagttgattattataatattctcggccttccgcgccagccgcagccacagccgcaacgccacccgcagccacagccacagccacagcccccgactcggaccgatg

SEQ ID NO: 12879 - DNA, 203 bp, Artificial sequence
  synthetic
ggcgcgccagtccttagatttcgccgctcaccccgccgttctcagcgctgcccgaccccgctcgcgcgccctcccgccgccagtcccggcagcgccctcagttgtcctccgactcgccctcggccttccgcgccagccgcagccacagccgcaacgccacttagtttgttgttaacagccacagcccccgactcggaccgatg

SEQ ID NO: 12880 - DNA, 203 bp, Artificial sequence
  synthetic
ggcgcgccagtcctatagcgtagccgctcaccccgccgttctcagcgctgcccgaccccgctcgcgcgccctcccgccgccagtcccggcagcgccctcagttgtcctccgactcgccctcggccttccgcgccagccgcagccactaaacactgtttgtccgcagccacagccacagccacagcccccgactcggaccgatg

SEQ ID NO: 12881 - DNA, 203 bp, Artificial sequence
  synthetic
ggcgcgccagtcctcataacgcgccgctcaccccgccgttctcagcgctgcccgaccccgctcgcgcgccctcccgccgccagtcccggcagcgccctcagttgtcctccgactcgccctcggccttccgcgtattttcagcaactagccgcaacgccacccgcagccacagccacagccacagcccccgactcggaccgatg

SEQ ID NO: 12882 - DNA, 203 bp, Artificial sequence
  synthetic
ggcgcgccagtcctgtcgcagcgccgctcaccccgccgttctcagcgctgcccgaccccgctcgcgcgccctcccgttaagtccgggttgagcgccctcagttgtcctccgactcgccctcggccttccgcgccagccgcagccacagccgcaacgccacccgcagccacagccacagccacagcccccgactcggaccgatg

SEQ ID NO: 12883 - DNA, 203 bp, Artificial sequence
  synthetic
ggcgcgccagtcctgcacaggagccgctgtttttagacattgacgttgaccccgaaagcaggatggagctggagtgaggtggaggggccgcaagctgctgaccggcgtgtggaacactggtggtttgcagatcactgaggctggacaacgttcatggctctcgggtagaacctagtgaaacggccagacgactcggaccgatg

SEQ ID NO: 12884 - DNA, 203 bp, Artificial sequence
  synthetic
ggcgcgccagtcctctacgattgccgctgtttttcactgagctgccataccccgaaagcaggatggagctggagtgaggtggaggggccgcaagctgctgaccgcgtaacaattgtagggtggtttgcagatcactgaggctggacaacgttcatggctctcgggtagaacctagtgaaacggccagacgactcggaccgatg

SEQ ID NO: 12885 - DNA, 203 bp, Artificial sequence
  synthetic
ggcgcgccagtcctggcgggcagccgctgtttttcactgagctgccataccccgaaagcaggatggagctggagtgaggtggaggggccgcaagctgctgaccggcgtgtggaacactggtggtttgcagatcactgaggctggacgtgtgcaggactggtcgggtagaacctagtgaaacggccagacgactcggaccgatg

SEQ ID NO: 12886 - DNA, 203 bp, Artificial sequence
  synthetic
ggcgcgccagtcctattcaggggccgctgtttttcactgagctgccataccccgaaagcaggatggagctggagtgttcgtcgatatattcaagctgctgaccggcgtgtggaacactggtggtttgcagatcactgaggctggacaacgttcatggctctcgggtagaacctagtgaaacggccagacgactcggaccgatg

SEQ ID NO: 12887 - DNA, 203 bp, Artificial sequence
  synthetic
ggcgcgccagtcctactgtgcagccgctgtttttcactgagctgccataccccgaaagcaggtacttatgcactgaaggtggaggggccgcaagctgctgaccggcgtgtggaacactggtggtttgcagatcactgaggctggacaacgttcatggctctcgggtagaacctagtgaaacggccagacgactcggaccgatg

SEQ ID NO: 12888 - DNA, 203 bp, Artificial sequence
  synthetic
ggcgcgccagtcctgcttaacagccgctgtttttcactgagctgccatcagttatttattatatggagctggagtgaggtggaggggccgcaagctgctgaccggcgtgtggaacactggtggtttgcagatcactgaggctggacaacgttcatggctctcgggtagaacctagtgaaacggccagacgactcggaccgatg

SEQ ID NO: 12889 - DNA, 203 bp, Artificial sequence
  synthetic
ggcgcgccagtcctggttgaccgccggcagaggggcgctaggccgccctcgatcccctcgccgcggtcccatggaggaggaggcgagccgcagcgccgcggcgacgaacccagggagtaatggattaaatgcgccgcctcctgacaagcgggagggatccgcggtggacccagggaagcggaggagcccgactcggaccgatg

SEQ ID NO: 12890 - DNA, 203 bp, Artificial sequence
  synthetic
ggcgcgccagtcctcaatcattgccggccaagacagcacagacagattgacctattggggtgagcgaatgacaaccgagggaagcgccgcggcctgtatttctagacctgcccttcgcctggttcgtggcgccttgtgaccccgggcccctgccgcctgcaagtcggaaattgcgctgtgctcctgtgcgactcggaccgatg

SEQ ID NO: 12891 - DNA, 203 bp, Artificial sequence
  synthetic
ggcgcgccagtcctactcgctcgccggccaagacagcacagacagattgacctattggggtgtttcgcgagtgtgagagggaagcgccgcggcctgtatttctagacctgcccttcgcctggttcgtggcgccttgtgaccccgggagaaacggtaagctaagtcggaaattgcgctgtgctcctgtgcgactcggaccgatg

SEQ ID NO: 12892 - DNA, 203 bp, Artificial sequence
  synthetic
ggcgcgccagtcctgggaagctgccggccaagacagcacagacagattgacctattggggtgtttcgcgagtgtgagagggaagcgccgcggcctgtatttctagacctgcccttcgcctggttcgtggcgctaatgtgtagatttcccctgccgcctgcaagtcggaaattgcgctgtgctcctgtgcgactcggaccgatg

SEQ ID NO: 12893 - DNA, 203 bp, Artificial sequence
  synthetic
ggcgcgccagtcctgatggtgagccggccaagacagcacagacagattgacctattggggtgtttcgcgagtgtgagagggaagcgccgcggcctgtatttctagacctgcccttcgcgcaccaacacagaacttgtgaccccgggcccctgccgcctgcaagtcggaaattgcgctgtgctcctgtgcgactcggaccgatg

SEQ ID NO: 12894 - DNA, 203 bp, Artificial sequence
  synthetic
ggcgcgccagtcctgatcttatgccggccaagacagcacagacagattgacctattggggtgtttcgcgagtgtgagagggaagcgccgcttggaaagacaaaggacctgcccttcgcctggttcgtggcgccttgtgaccccgggcccctgccgcctgcaagtcggaaattgcgctgtgctcctgtgcgactcggaccgatg

SEQ ID NO: 12895 - DNA, 203 bp, Artificial sequence
  synthetic
ggcgcgccagtcctatcctaaggccggcggctggcggaggagggagggcgagggcgggcgcgaatgtagacttaatcggaagagggaggagaggcgcggggagccaggcctcggggcctcggagcaaccacccgagcagacggagtacacggagcagcggccccggccccgccaacgctgccgccgggcgactcggaccgatg

SEQ ID NO: 12896 - DNA, 203 bp, Artificial sequence
  synthetic
ggcgcgccagtcctcctcgcaagccggcggctggcggaggagggagggcgagggcgggcgcgggccggcgggcgggcggaagagggaggagaggcgcggggagccaggcctcggggcctcggagcaaccaccgcctgctcttagtaacacggagcagcggccccggccccgccaacgctgccgccgggcgactcggaccgatg

SEQ ID NO: 12897 - DNA, 203 bp, Artificial sequence
  synthetic
ggcgcgccagtcctttctgttggccgggaagactctacggggataatcataaacccactctatgcccggccatttgggcgtgcccccgcaagactgctagccgagtagcgttgggttgcgaaaggccttgtggtactgcctgatagggtgcttgcgagtgccccgggaggtctcgtagaccgtgcacccgactcggaccgatg

SEQ ID NO: 12898 - DNA, 203 bp, Artificial sequence
  synthetic
ggcgcgccagtcctgtgtcgtcgccgggaagactgggtcctttcttggataaacccactctatgcccggccatttgggcgtgcccccgcaagactgctagccgacacaaaaccctaaccgaaaggccttgtggtactgcctgatagggtgcttgcgagtgccccgggaggtctcgtagaccgtgcacccgactcggaccgatg

SEQ ID NO: 12899 - DNA, 203 bp, Artificial sequence
  synthetic
ggcgcgccagtcctaccgcacagccgggaagactgggtcctttcttggataaacccactctatgcccggccatttgggcgtgcccccgcaagactgctagccgagtagcgttgggttgcgaaaggccttgtgcagggcgtactattggtgcttgcgagtgccccgggaggtctcgtagaccgtgcacccgactcggaccgatg

SEQ ID NO: 12900 - DNA, 203 bp, Artificial sequence
  synthetic
ggcgcgccagtcctgagatggcgccgggaagactgggtcctttcttggataaacccactctatgcccggccatttgggcgtgcccccgcaagactgctagccgagtagcgttgggttgcgaaaggccttgtggtactgcctgatagggtgcttgcgagtgaaaaactgtacaatgtagaccgtgcacccgactcggaccgatg

SEQ ID NO: 12901 - DNA, 203 bp, Artificial sequence
  synthetic
ggcgcgccagtccttgaagagtgccgggaagactgggtcctttcttggataaacccactctatgcccggccatttgggcgtgcccccgcaagactgctagccgagtagcgttgggttgcgaaaggccttgtggtactgcctgatagggtgcttgcgagtgccccgggaggtctctcgcggaccatgtacgactcggaccgatg

SEQ ID NO: 12902 - DNA, 203 bp, Artificial sequence
  synthetic
ggcgcgccagtcctcttgacaggccgggaagactgggtcctttcttggataaacccactctatgcccggccatttgggcgtgcccccgcaagactgctagccgagtagcgttgggttgcgaaaggccttgtggtactgcctgatagtcataaacactagaccccgggaggtctcgtagaccgtgcacccgactcggaccgatg

SEQ ID NO: 12903 - DNA, 203 bp, Artificial sequence
  synthetic
ggcgcgccagtccttacgccctgccgggaagactgggtcctttcttgggacgcataggcaattgcccggccatttgggcgtgcccccgcaagactgctagccgagtagcgttgggttgcgaaaggccttgtggtactgcctgatagggtgcttgcgagtgccccgggaggtctcgtagaccgtgcacccgactcggaccgatg

SEQ ID NO: 12904 - DNA, 203 bp, Artificial sequence
  synthetic
ggcgcgccagtcctgacctgaagccgggatgaccaatgttgagtcgaaattaacccgctcaatgcccggaaatttgggcgtgcccccgcaagactgctagccgagtagtgttgggtcgcgaaaggccttgcggtactgcctgatagggtgcttgcgagtgccccgggaggtctcgtagaccgtgcacccgactcggaccgatg

SEQ ID NO: 12905 - DNA, 203 bp, Artificial sequence
  synthetic
ggcgcgccagtcctcccggaacgccgggatgaccgggtcctttcttggataaacccgctcaaactgaatgccccgcggcgtgcccccgcgagactgctagccgagtagtgttgggtcgcgaaaggccttgtggtactgcctgatagggtgcttgcgagtgccccgggaggtctcgtagaccgtgcacccgactcggaccgatg

SEQ ID NO: 12906 - DNA, 203 bp, Artificial sequence
  synthetic
ggcgcgccagtcctgcgcaacggccgggatgaccgggtcctttcttggataaacccgctcaatgcccggagatttgggcgtgcccccgcgagactgctagccgagtagtgttgggtcgcgaaaggccttgtgagctacgggacgttggtgcttgcgagtgccccgggaggtctcgtagaccgtgcacccgactcggaccgatg

SEQ ID NO: 12907 - DNA, 203 bp, Artificial sequence
  synthetic
ggcgcgccagtcctattacggagccgggatgaccgggtcctttcttggataaacccgctcaatgcccggagatttgggcgtgcccccgcgagactgctagccgagtagtgttgggtcgcgaaaggccttgtggtactgcctgatagtaatagcttagagaccccgggaggtctcgtagaccgtgcacccgactcggaccgatg

SEQ ID NO: 12908 - DNA, 203 bp, Artificial sequence
  synthetic
ggcgcgccagtcctccgtctatgccgggatgaccgggtcctttcttggataaacccgctcaatgcccggagatttgggcgtgcccccgcggatgatacgcgtcggtagtgttgggtcgcgaaaggccttgtggtactgcctgatagggtgcttgcgagtgccccgggaggtctcgtagaccgtgcacccgactcggaccgatg

SEQ ID NO: 12909 - DNA, 203 bp, Artificial sequence
  synthetic
ggcgcgccagtcctcgattccagccgggatgaccgggtcctttcttggattaacccgctcaatgcccggaaatttgccgcatgagtgaggagactgctagccgagtagtgttgggtcgcgaaaggccttgcggtactgcctgatagggtgcttgcgagtgccccgggaggtctcgtagaccgtgcacccgactcggaccgatg

SEQ ID NO: 12910 - DNA, 203 bp, Artificial sequence
  synthetic
ggcgcgccagtcctgtttgtctgccgggatgaccgggtcctttcttggattaacccgctcaatgcccggaaatttgggcgtgcccccgcaagactgctagccgagtagtgttgggtcgcgaaaggccttgcgcctgaaaagctgcaggtgcttgcgagtgccccgggaggtctcgtagaccgtgcacccgactcggaccgatg

SEQ ID NO: 12911 - DNA, 203 bp, Artificial sequence
  synthetic
ggcgcgccagtcctaacactacgccgggatgaccgggtcctttcttggattaacccgctcaatgcccggaaatttgggcgtgcccccgcaagactgctagccgagtagtgttgggtcgcgaaaggccttgcggtactgcctgatagggtgcttgcgagtgaaggacattaaaaagtagaccgtgcacccgactcggaccgatg

SEQ ID NO: 12912 - DNA, 203 bp, Artificial sequence
  synthetic
ggcgcgccagtcctcaattgtggccgggatgaccgggtcctttcttggattaacccgctcaatgcccggaaatttgggcgtgcccccgcaagactgctagccgagtagtgttgggtcggtgtttctacccacgtactgcctgatagggtgcttgcgagtgccccgggaggtctcgtagaccgtgcacccgactcggaccgatg

SEQ ID NO: 12913 - DNA, 203 bp, Artificial sequence
  synthetic
ggcgcgccagtcctatacatgagccgggatgaccgggtcctttcttggattaacccgctcaatgcccggaaatttgggcgtgcccccgcagttggtaactttttgtagtgttgggtcgcgaaaggccttgcggtactgcctgatagggtgcttgcgagtgccccgggaggtctcgtagaccgtgcacccgactcggaccgatg

SEQ ID NO: 12914 - DNA, 203 bp, Artificial sequence
  synthetic
ggcgcgccagtcctcgtgcagtgccgggatgaccgggtcctttcttggtggctgataggggttgcccggaaatttgggcgtgcccccgcaagactgctagccgagtagtgttgggtcgcgaaaggccttgcggtactgcctgatagggtgcttgcgagtgccccgggaggtctcgtagaccgtgcacccgactcggaccgatg

SEQ ID NO: 12915 - DNA, 203 bp, Artificial sequence
  synthetic
ggcgcgccagtccttgcgttaggccgggatgaccttaatagacacgatataaacccgctcaatgcccggagatttgggcgtgcccccgcgagactgctagccgagtagtgttgggtcgcgaaaggccttgtggtactgcctgatagggtgcttgcgagtgccccgggaggtctcgtagaccgtgcacccgactcggaccgatg

SEQ ID NO: 12916 - DNA, 203 bp, Artificial sequence
  synthetic
ggcgcgccagtcctcgaggtatgccgggccccggatcgcccttttgatctccgtgccccgcgcgtcctgcgccgccgccaccgcctcctggggagacgcagccacttgcccgccatggatactcccagggtcctgctctcggccgtcttcctcatcagttttctgtgggatttgcccggtttccagcacgactcggaccgatg

SEQ ID NO: 12917 - DNA, 203 bp, Artificial sequence
  synthetic
ggcgcgccagtccttagggcaagccgggccccggccgctgtccagccgctccgtgccccgcgcgtcctgcgccgccgccaccgcctcctggggagacgcagccaaggtatgctgtgctatactcccagggtcctgctctcggccgtcttcctcatcagttttctgtgggatttgcccggtttccagcacgactcggaccgatg

SEQ ID NO: 12918 - DNA, 203 bp, Artificial sequence
  synthetic
ggcgcgccagtcctcctcaaacgccgggccccggccgctgtccagccgctccgtgccccgcgcgtcctgcgccgccgccaccgcctcctggggagacgcagccacttgcccgccatggatactcccagggtcctgctctcggccgtcttcctcatcagttcctgaaattgcccccccggtttccagcacgactcggaccgatg

SEQ ID NO: 12919 - DNA, 203 bp, Artificial sequence
  synthetic
ggcgcgccagtcctatcacgctgccgggccccggccgctgtccagccgctccgtgccccgcgcgtcctgcgccgccgccaccgcctcctggggagacgcagccacttgcccgccatggatactcccagggtcctgctctcggccgtcttcctcatcagttttctgtgggatttgcccggtttccagcacgactcggaccgatg

SEQ ID NO: 12920 - DNA, 203 bp, Artificial sequence
  synthetic
ggcgcgccagtcctttatttatgccgggccccggccgctgtccagccgctccgtgccccgcgcgtcctgcgccgccgccaccgcctcctggggagacgcagccacttgcccgccatggatactcccagggtcctgctctcggccgtgcatgcatcactcattctgtgggatttgcccggtttccagcacgactcggaccgatg

SEQ ID NO: 12921 - DNA, 203 bp, Artificial sequence
  synthetic
ggcgcgccagtcctcattgactgccgggccccggccgctgtccagccgctccgtgccccgcgcgtcctgcgccgccgccaccgcctcctggggagacgcagccacttgcccgccatggatactcccagggtcggtaatgtaataaacttcctcatcagttttctgtgggatttgcccggtttccagcacgactcggaccgatg

SEQ ID NO: 12922 - DNA, 203 bp, Artificial sequence
  synthetic
ggcgcgccagtcctctaatgatgccgggccccggccgctgtccagccgtgatcccgaggcttcgtcctgcgccgccgccaccgcctcctggggagacgcagccacttgcccgccatggatactcccagggtcctgctctcggccgtcttcctcatcagttttctgtgggatttgcccggtttccagcacgactcggaccgatg

SEQ ID NO: 12923 - DNA, 203 bp, Artificial sequence
  synthetic
ggcgcgccagtcctagcgacctgccgggggacgggtaaggggggggtgaagaaggggccggccttcaagcaagagccgttgtcctgttgcgccaccacgggctcgggagtaaaagtccctcgcaatttccgactgttggaagaactcgaagaaggccagaaaggagtaggagatggcacagttagctgcgactcggaccgatg

SEQ ID NO: 12924 - DNA, 203 bp, Artificial sequence
  synthetic
ggcgcgccagtccttttagctagccgggggacgggtaaggggggggtgaagaaggggccggccttcaagcaagagcgacgcaagatggcagccaccacgggctcgggagtaaaagtccaataggccgcgaatctgttggaagaactcgaagaaggccagaaaggagtaggagatggcacagttagctgcgactcggaccgatg

SEQ ID NO: 12925 - DNA, 203 bp, Artificial sequence
  synthetic
ggcgcgccagtcctgccgcggggccgggggacgggtaaggggggggtgaagaaggggccggccttcaagcaagagcgacgcaagatggcagccaccacgggctcgggagtaaaagtccctcgcaatttccgactgttggaagaactcgaagaaggccagaaaggagtaggagatggcacagttagctgcgactcggaccgatg

SEQ ID NO: 12926 - DNA, 203 bp, Artificial sequence
  synthetic
ggcgcgccagtcctagatcggggccgggggacgggtaaggggggggtgaagaaggggccggccttcaagcaagagcgacgcaagatggcagccaccacgggctcgggagtaaaagtccctcgcaatttccgactgttggaagaactcgaagaaggccagattctcaatatgtcgggcacagttagctgcgactcggaccgatg

SEQ ID NO: 12927 - DNA, 203 bp, Artificial sequence
  synthetic
ggcgcgccagtccttcgccaatgccgtattctgtgtcgacggcgccggcggctcctgcaggaggccactgtctgcagctcccgtgaagatgtccactccagacccacccctgggcggaactcctcggccaggtccttccccgggccctggcccttcccctggagccatgctgggccctagcccgggtccgactcggaccgatg

SEQ ID NO: 12928 - DNA, 203 bp, Artificial sequence
  synthetic
ggcgcgccagtccttcacccgcgcctacgattcccgattggcggacgctcctggcaggagagcgcggattggtcaggcacggagcaggaggcggggctgatagcccagcagcagcagcggcggcggcggctgcggagcgggtgtgaggcggctggaccgcgctgcaggcatccgcagggcgcggcaagcgactcggaccgatg

SEQ ID NO: 12929 - DNA, 203 bp, Artificial sequence
  synthetic
ggcgcgccagtcctgagctagtgcctccccgtatataagacttcgccgagcgctctcactcgcacaagtggaccggggtgttgggtgctagtcggcaccagaggcaagggtgcgaggaccacggccggctcgataaccctgagtgacctagggggtggcagcgggcagtgcggggcggcaaggcgacccgactcggaccgatg

SEQ ID NO: 12930 - DNA, 203 bp, Artificial sequence
  synthetic
ggcgcgccagtcctaatacccggcctccccgtatataagacttcgccggcaagcaattagatcacaagtggaccggggtgttgggtgctagtcggcaccagaggcaagggtgcgaggaccacggccggctcggacgtgtgaccgcgcctagggggtggcagcgggcagtgcggggcggcaaggcgacccgactcggaccgatg

SEQ ID NO: 12931 - DNA, 203 bp, Artificial sequence
  synthetic
ggcgcgccagtcctgtgatctcgcctccctgctgagctcgcggctcacgctgagagggacacgcagtgacgagcggccgaagcagctttgcggtgagagcacgctgggccgggggccgccgaatcagtctagggcgggtaacgccggactcgagggttttgtagtgcatccctgagcatgagcacagacgactcggaccgatg

SEQ ID NO: 12932 - DNA, 203 bp, Artificial sequence
  synthetic
ggcgcgccagtcctaaacatacgcctccctgctgagctcgcggctcacgctgagagggacacgcagtgacgagcggccgaagcagctttgcggtgagagcacgctgggccgggggccgggcgggagcctggtggcgggtaacgccggactcgagggttttgtagtgcatccctggcgcactcactgaccgactcggaccgatg

SEQ ID NO: 12933 - DNA, 203 bp, Artificial sequence
  synthetic
ggcgcgccagtcctgcgtgtaagcctccctgctgagctcgcggctcacgctgagagggacacgcagtgacgagcggtgttcaatctgggccggtgagagcacgctgggccgggggccgggcgggagcctggtggcgggtaacgccggactcgagggttttgtagtgcatccctgagcatgagcacagacgactcggaccgatg

SEQ ID NO: 12934 - DNA, 203 bp, Artificial sequence
  synthetic
ggcgcgccagtcctgacaaaccgcctccctgctggctatattaggtcggctgagagggacacgcagtgacgagcggccgaagcagctttgcggtgagagcacgctgggccgggggccgggcgggagcctggtggcgggtaacgccggactcgagggttttgtagtgcatccctgagcatgagcacagacgactcggaccgatg

SEQ ID NO: 12935 - DNA, 203 bp, Artificial sequence
  synthetic
ggcgcgccagtcctctcgttgtgcctcctgacgacgaggctagctggcccgatttctcctccgggtgatgcttttcctagattattctctgatttggtcgtattgggcgcctggtcaccagggctgcttttaactctggtaaagtggatattgttgccatcaatgaccccttcattgacctcaactaccgactcggaccgatg

SEQ ID NO: 12936 - DNA, 203 bp, Artificial sequence
  synthetic
ggcgcgccagtcctgtttccaagcctgacagccaggaccccaggcagcagcgagtgacaggacgtctggacccgcgcgccgctagcagctctgccgggccgcggcggtgatcgatgggactgattcactcatgacccagcgagtgagggcgcacagccgggacgccgaggcggcgggcgggagacccgcgactcggaccgatg

SEQ ID NO: 12937 - DNA, 203 bp, Artificial sequence
  synthetic
ggcgcgccagtcctttgctttagcctgacagccaggaccccaggcagcagcgagtgacaggacgtctggacccgcgcgccgctagcagctctgccgggccgcggcggtgatcgatggggagcggctggagcggacccagcgagtgagggcgcacagccggatttttttatttttgggcgggagacccgcgactcggaccgatg

SEQ ID NO: 12938 - DNA, 203 bp, Artificial sequence
  synthetic
ggcgcgccagtccttactaccagcctgacagccaggaccccaggcagcagcgagtgacaggacgtctggacccgcgcgccgctagcagctctgccgggccgcggcggtgatcgatggggagcggctggagcggacccagcgagtgagggcgcacagccgggacgccgaggcggcaaattaatcgattacgactcggaccgatg

SEQ ID NO: 12939 - DNA, 203 bp, Artificial sequence
  synthetic
ggcgcgccagtcctaactatcggcctggcaggcgcacgcgcccagcaccctgcctccggcgatgccgccccagcccctctgatggccctcctctctgctgccaccgcccatttcctgagaggcatgagcccggaacgcgcttgcttttaggagacagccactttctgtgtggtacgctggattcaaggcgactcggaccgatg

SEQ ID NO: 12940 - DNA, 203 bp, Artificial sequence
  synthetic
ggcgcgccagtcctccatgtttgcctggcaggcgcacgcgcccagcaccctgcctccggcgatgccgccccagcccctctgatggccctcctctctgctgccactcattccagaacaggaggcatgagcccggaacgcgcttgcttttaggagacagccactttctgtgtggtacgctggattcaaggcgactcggaccgatg

SEQ ID NO: 12941 - DNA, 203 bp, Artificial sequence
  synthetic
ggcgcgccagtcctaagtctgagcctggcaggcgcacgcgcccagcaccctgcctccggcgatgccgccccagcccctctgatggccctcctctctgctgccactcattccagaacaggaggcatgagcccggaacgcgcttgcttttaggagacagccactttctgtgtggtagcagaccgagctcacgactcggaccgatg

SEQ ID NO: 12942 - DNA, 203 bp, Artificial sequence
  synthetic
ggcgcgccagtcctctcagagagcctggcaggcgcacgcgcccagcaccctgcctccggcgatgccgccccagcccctctgatggccctcctctctgctgccactcattccagaacaggaggcatgagcccggaacgcgcttgcttttaggagacagccagcaagatatgtaagcgctggattcaaggcgactcggaccgatg

SEQ ID NO: 12943 - DNA, 203 bp, Artificial sequence
  synthetic
ggcgcgccagtcctagcagcttgcctggcaggcgcacgcgcccagcacgacagacgaataattgccgccccagcccctctgatggccctcctctctgctgccactcattccagaacaggaggcatgagcccggaacgcgcttgcttttaggagacagccactttctgtgtggtacgctggattcaaggcgactcggaccgatg

SEQ ID NO: 12944 - DNA, 203 bp, Artificial sequence
  synthetic
ggcgcgccagtcctgtcattctgcctgtgtgagctgacaaacttagtagtgtttgtgaggattaacaacaattaacacagtgcgagctgtttcttagcacgaagatctcgatgtctaagaaaccaggagggcccggcaagagccggcgaccaggccctgcaaaacgcggaatgccccgcgtgttgtcccgactcggaccgatg

SEQ ID NO: 12945 - DNA, 203 bp, Artificial sequence
  synthetic
ggcgcgccagtcctctgcaatagcctgtgtgagctgacaaacttagtagtgtttgtgaggattaacaacaattaacacagtgcgagctgtttcttagcacgaagatctcgatgtctaagaaaccaggagggcccggcaagagccgggctgtcaatatgctaaaacgcggaatgcaaatgagccatctgcgactcggaccgatg

SEQ ID NO: 12946 - DNA, 203 bp, Artificial sequence
  synthetic
ggcgcgccagtcctacttcgaagcctgtgtgagctgacaaacttagtagtgtttgtgaggattaacaacaattaacacagtgcgagctgtttcttagcacgaagatctcgatgtctaagaaaccaggagggcttccgcctttgattgctgtcaatatgctaaaacgcggaatgccccgcgtgttgtcccgactcggaccgatg

SEQ ID NO: 12947 - DNA, 203 bp, Artificial sequence
  synthetic
ggcgcgccagtcctctctgatcgcctgtgtgagctgacaaacttagtagtgtttgtgaggattaacaacaattaacacagtgcgagctgtttcttagcacgaagatctcgatgtctaattcttatcctactgccggcaagagccgggctgtcaatatgctaaaacgcggaatgccccgcgtgttgtcccgactcggaccgatg

SEQ ID NO: 12948 - DNA, 203 bp, Artificial sequence
  synthetic
ggcgcgccagtcctcaatgggtgccttacactccagagcaaatgtacggtgtcactctcgcagctgccacccgaccatgaccatcctgcaggccccgaccccggccccctccaccatcccgggaccccggcggggctccggtcctgagatcttcaccttcgaccctctcccggagcccgcagcggccccgactcggaccgatg

SEQ ID NO: 12949 - DNA, 203 bp, Artificial sequence
  synthetic
ggcgcgccagtcctgattcgccgccttacactccgctcggctcaccatgtgtcactctcgcacgacaattgtccgaatgaccatcctgcaggccccgaccccggccccctccaccatcccgggaccccggcggggctccggtcctgagatcttcaccttcgaccctctcccggagcccgcagcggccccgactcggaccgatg

SEQ ID NO: 12950 - DNA, 203 bp, Artificial sequence
  synthetic
ggcgcgccagtcctggatgggagccttacactccgctcggctcaccatgtgtcactctcgcagctgccacccgaccatgaccatcctgcaggccccgaccccggatgggcgacgttcaccgggaccccggcggggctccggtcctgagatcttcaccttcgaccctctcccggagcccgcagcggccccgactcggaccgatg

SEQ ID NO: 12951 - DNA, 203 bp, Artificial sequence
  synthetic
ggcgcgccagtcctcgatagatgccttacactccgctcggctcaccatgtgtcactctcgcagctgccacccgaccatgaccatcctgcaggccccgaccccggccccctccaccatcagttcctattcatcgggctccggtcctgagatcttcaccttcgaccctctcccggagcccgcagcggccccgactcggaccgatg

SEQ ID NO: 12952 - DNA, 203 bp, Artificial sequence
  synthetic
ggcgcgccagtcctttcatcgcgccttacactccgctcggctcaccatgtgtcactctcgcagctgccacccgaccatgaccatcctgcaggccccgaccccggccccctccaccatcccgggaccccggcggggctccggtcctgagatcttcaccttcattgacgggggtctgcccgcagcggccccgactcggaccgatg

SEQ ID NO: 12953 - DNA, 203 bp, Artificial sequence
  synthetic
ggcgcgccagtcctaccaactggccttacactccgctcggctcaccatgtgtcactctcgcagctgccacccgaccatgaccatcctgcaggccccgaccccggccccctccaccatcccgggaccccggcggggctccggtcctgagatcttcaccttcgaccctctcccggagcccgcagcggccccgactcggaccgatg

SEQ ID NO: 12954 - DNA, 203 bp, Artificial sequence
  synthetic
ggcgcgccagtcctaatcacttgcgaaccacgtctccggcagcctccagacagtttcttccgcttcctgtaccacccggctcaagtagcggacacggaacagggaactatcagcccgtcggcctccgggccctgcattctctagccatggaccgggaccttttgcggcagtcgctaaattgccacgggcgactcggaccgatg

SEQ ID NO: 12955 - DNA, 203 bp, Artificial sequence
  synthetic
ggcgcgccagtccttgtttaacgcgacatgaagtgcactacggggtgaacggctactcactgcacgccatgaactcactcagcgccatgtacaacctgcaccagcaggcagcccagcaggcccagcatgcccccgactaccggccttcagtgcatgcgcttacattggctgagcgcctggctgacatccgactcggaccgatg

SEQ ID NO: 12956 - DNA, 203 bp, Artificial sequence
  synthetic
ggcgcgccagtcctagttcctcgcgactagcctcccaagccagccacccagggcgagtcatcgacccaaaaggtcagaccgtctcacacaaacaatcccaagtactccgcgatggtgatccccctttttttaggaactgaaaccacggccctgacgtccctcccccctaggaacaggaacagctctcccgactcggaccgatg

SEQ ID NO: 12957 - DNA, 203 bp, Artificial sequence
  synthetic
ggcgcgccagtcctcctggacagcgactagcctcccaagccagccacccagggcgagtcatcgacccaaaaggtcagaccgtctcacacatcagccttggtcccaaggctctgacgtctccccctttttttaggaactgaaaccacggccctgacgtccctcccccctaggaacaggaacagctctcccgactcggaccgatg

SEQ ID NO: 12958 - DNA, 203 bp, Artificial sequence
  synthetic
ggcgcgccagtcctaactgattgcgagttggactgtgaagaaacatggcggccgcgacgttgacttcgaaattgtactccctgctgttccagtatcggattgtattcgccctcaccatcatcgtgggcgtcatgttcttcgagcgcgccttcgatcaaggcgcggacgctatctacgaccacatcaaccgactcggaccgatg

SEQ ID NO: 12959 - DNA, 203 bp, Artificial sequence
  synthetic
ggcgcgccagtcctttacctacgcgagttggactgtgaagaaacatggcggccgcgacgttgacttcgaaattgtactccctgctgttccgcaggacctccaccgctcaagattagggcatcgtgggcgtcatgttcttcgagcgcgccttcgatcaaggcgcggacgctatctacgaccacatcaaccgactcggaccgatg

SEQ ID NO: 12960 - DNA, 203 bp, Artificial sequence
  synthetic
ggcgcgccagtcctaacgcggcgcgagttggactgtgaagaaacatggcggccgcgacgttgacttcgaaattgtactccctgctgttccgcaggacctccaccttcgccctcaccattcaacgttctaatgtgttcttcgagcgcgccttcgatcaaggcgcggacgctatctacgaccacatcaaccgactcggaccgatg

SEQ ID NO: 12961 - DNA, 203 bp, Artificial sequence
  synthetic
ggcgcgccagtcctgatccagagcgagttggactgtgaagaaacatggcggccgcgacgttggtcgaagttcgtgcctccctgctgttccgcaggacctccaccttcgccctcaccatcatcgtgggcgtcatgttcttcgagcgcgccttcgatcaaggcgcggacgctatctacgaccacatcaaccgactcggaccgatg

SEQ ID NO: 12962 - DNA, 203 bp, Artificial sequence
  synthetic
ggcgcgccagtcctcccatttggcgagttggacttaatctggtgggtacggccgcgacgttgacttcgaaattgtactccctgctgttccgcaggacctccaccttcgccctcaccatcatcgtgggcgtcatgttcttcgagcgcgccttcgatcaaggcgcggacgctatctacgaccacatcaaccgactcggaccgatg

SEQ ID NO: 12963 - DNA, 203 bp, Artificial sequence
  synthetic
ggcgcgccagtcctgtcgtcaagcgcccgggggccatgcgggtgagccgcggctgcagaggcctgagcgcctgatcgccgcggacccgagccgagcccacccccctccccagccccccgttgatatgtactaggcggcgcgctcgatctacgcgtccggggccccgcggggccgggcccggagtcggccgactcggaccgatg

SEQ ID NO: 12964 - DNA, 203 bp, Artificial sequence
  synthetic
ggcgcgccagtcctctactgcggcgccggtaagtaagtacttgattttggtacctcgcgaggcaaatcatcctggtgagtggcgggacgctgccgggaagctccacctccgctcagcaggggacgccctggtctgagctctgtggtatctgattgttgttgaaccgtctctaagacggtgatactatacgactcggaccgatg

SEQ ID NO: 12965 - DNA, 203 bp, Artificial sequence
  synthetic
ggcgcgccagtccttacataacgcgccggtaagtaagtacttgattttggtacctcgcgagggtttgggaggatcgcctcccgctttacgtgccgggaagctccacctccgctcagcaggggacgccctggtctgagctctgtggtatctgattgttgttgaaccgtctctaagacggtgatactatacgactcggaccgatg

SEQ ID NO: 12966 - DNA, 203 bp, Artificial sequence
  synthetic
ggcgcgccagtcctaatggtcggcgccggtaagtaagtacttgattttggtacctcgcgagggtttgggaggatcggagtggcgggacgctgccgggaagctccacctccgctcagcaggggacgccctggtctgagctctgtggtatctgattgttgttgaaccgtctctaagacggtgatactatacgactcggaccgatg

SEQ ID NO: 12967 - DNA, 203 bp, Artificial sequence
  synthetic
ggcgcgccagtcctgaatgttagcgccggtaagtaagtacttgattttggtacctcgcgagggtttgggaggatcggagtggcgggacgctgccgggaagctccacctccgctcagcaggggacgccctggtctgagctctgtggtatctgattgttgttgaaccgtctctaagtaaagctccggcctcgactcggaccgatg

SEQ ID NO: 12968 - DNA, 203 bp, Artificial sequence
  synthetic
ggcgcgccagtccttggtgtccgcgcctgctgctgagcagatgcagtagccgaaactgcgcggaggcacagaggccggggagagcgttctgggtccgagggtccaggtaggggttgagccaccatctgaccgatgcgattcgaaaatcgccggttctgcaggcaccatgagccaggacaccgaggtggcgactcggaccgatg

SEQ ID NO: 12969 - DNA, 203 bp, Artificial sequence
  synthetic
ggcgcgccagtccttaaggaacgcgcctgctgctgagcagatgcagtagccgaaactgcgcggaggcacagaggccggggagagcgttctgggtccgagggtccaggtaggggttgagccaccatctgaccgcaagctgcgtcgtgtcgccggttctgcaggcaccatgagccaggacaccgaggtggcgactcggaccgatg

SEQ ID NO: 12970 - DNA, 203 bp, Artificial sequence
  synthetic
ggcgcgccagtcctgtttaaaggcgcctgctgctgagcagatgcagtagccgaaactgcgcggaggcacagaggccggggagagcgttctgggtccgagggtccaggtaggggttgagccaccatctgaccgcaagctgcgtcgtgtcgccggttctgcaggcaccatgagccattcggttcgatacacgactcggaccgatg

SEQ ID NO: 12971 - DNA, 203 bp, Artificial sequence
  synthetic
ggcgcgccagtcctatcccgtggcgcctgctgctgagcagatgcagtagccgaaactgcgcggaggcacagaggccggggagagcgttctgggtccgagggtccaggtaggggttgaggactttctaatggacaagctgcgtcgtgtcgccggttctgcaggcaccatgagccaggacaccgaggtggcgactcggaccgatg

SEQ ID NO: 12972 - DNA, 203 bp, Artificial sequence
  synthetic
ggcgcgccagtcctatgttccagcgcctgctgcttgcgcagacgcaccgccgaaactgcgcggaggcacagaggccggggagagcgttctgggtccgagggtccaggtaggggttgagccaccatctgaccgcaagctgcgtcgtgtcgccggttctgcaggcaccatgagccaggacaccgaggtggcgactcggaccgatg

SEQ ID NO: 12973 - DNA, 203 bp, Artificial sequence
  synthetic
ggcgcgccagtcctaatgctatgcgcgcccgacctccatcttcccggggccgcgccgcgcgcgcgcgcgggctttgggcgggaccctgcagaggcggcggggctccagtgggggctcctcctcggcctccccttcgggcgctctcgcgctaactgtgctcctccggggccctccgccacacgagagcccgactcggaccgatg

SEQ ID NO: 12974 - DNA, 203 bp, Artificial sequence
  synthetic
ggcgcgccagtccttactctatgcgctgcaaggacaaccggctggggtccttgcgcgccgcgcgaagtcccaatcaaccgactgcgccgcgtaagtgccgcctgccctgcgtgggtcgtgccagctcagcgggacaggtcctcgcctcggtccctcggacttagggagcgcggggcagaccctgagagcgactcggaccgatg

SEQ ID NO: 12975 - DNA, 203 bp, Artificial sequence
  synthetic
ggcgcgccagtccttagttgaggcgctgcaaggacaaccggctggggtccttgcgcgccgcggctcagggaggagcaccgactgcgccgcgtaagtgccgcctgccctgcgtgggtcgtgccagctcagcggccacctaaagaaaatcggtccctcggacttagggagcgcggggcagaccctgagagcgactcggaccgatg

SEQ ID NO: 12976 - DNA, 203 bp, Artificial sequence
  synthetic
ggcgcgccagtcctccacccttgcgctgcaaggacaaccggctggggttgcgctattggtttgctcagggaggagcaccgactgcgccgcgtaagtgccgcctgccctgcgtgggtcgtgccagctcagcgggacaggtcctcgcctcggtccctcggacttagggagcgcggggcagaccctgagagcgactcggaccgatg

SEQ ID NO: 12977 - DNA, 203 bp, Artificial sequence
  synthetic
ggcgcgccagtcctgccaagatgcgctggcctgctgccccggcgggtccgccggccggaggcgggagtcacaggaatgaatacgtgatgcaggaggcctcggcggatcaggacagctgcaggcttctgccaggtgggtgtgcagactggtgagctgccagcaggggcccagacgcgccaggcctggagcgactcggaccgatg

SEQ ID NO: 12978 - DNA, 203 bp, Artificial sequence
  synthetic
ggcgcgccagtccttccaaacggcgcttaagaggagggtcgggctcggccggggagtcccagtggcggaggctacgaaacttgggggagtgcacagaagaacttcgggagcgcacgcgggaccagggaccaggctgagactcggggcgccagtccgggcacccaggaatcagtacggccggagatgcccgactcggaccgatg

SEQ ID NO: 12979 - DNA, 203 bp, Artificial sequence
  synthetic
ggcgcgccagtcctaggaggtggcgcttaagaggagggtcgggctcggccggggagtcccagtggcggaggctacgtgtgcaatcatccggcacagaagaacttcgggagcgcacgcgggaccagggaccaggctgagactcggggcgccagtccgggcaggggcagcgggagccggccggagatgcccgactcggaccgatg

SEQ ID NO: 12980 - DNA, 203 bp, Artificial sequence
  synthetic
ggcgcgccagtcctgggcatcagcggaagcggcggcggcggcgaaggcaatcaagaaatctcctggagggccgggcaccgcggccatggagggtcaacgctggctgccgctggaggccaatcccgaggtcaccaaccagtttcttaaacaattaggtctacatcctaactggcaattcgttgatgtatcgactcggaccgatg

SEQ ID NO: 12981 - DNA, 203 bp, Artificial sequence
  synthetic
ggcgcgccagtccttaccgcaggcggaagcggcggcggcggcgaaggcggcggctgtcagagacctgtaatgctcgaccgcggccatggagggtcaacgctggctgccgctggaggccaatcccgaggtcaccaaccagtttcttaaacaattaggtctacatcctaactggcaattcgttgatgtatcgactcggaccgatg

SEQ ID NO: 12982 - DNA, 203 bp, Artificial sequence
  synthetic
ggcgcgccagtcctacttgggtgcggaagcggcggcggcggcgaaggcggcggctgtcagagctggagggccgggcaccgcggccatggagggtcaacgctggctgccgctggaggccaatcccgaggtcacgtcatgccacaactaacaattaggtctacatcctaactggcaattcgttgatgtatcgactcggaccgatg

SEQ ID NO: 12983 - DNA, 203 bp, Artificial sequence
  synthetic
ggcgcgccagtcctggttagtcgcggcactaaaacagccaggcactccctccctccctcccagcactatgccctacaacttctgcctgcccagcctgagctgccgcaccagctgctcctcccggccctgcgtgccccccagctgccacagctgcaccctgcccggggcctgcaacatccccgccaatgcgactcggaccgatg

SEQ ID NO: 12984 - DNA, 203 bp, Artificial sequence
  synthetic
ggcgcgccagtccttcaccgctgcggcggcgggaccggcagcagcagcagcagcagcagcagcaaccactagcctcctgccccgcggcgcccttcgtatgcggtcacgagccgctcaccccgccgttctcagcgctgcccgaccccgctcgcgcgccctcccgccgccagtcccggcagcgccctcagcgactcggaccgatg

SEQ ID NO: 12985 - DNA, 203 bp, Artificial sequence
  synthetic
ggcgcgccagtcctgatgccaggcggcggcgggaccggcagcagcagcagcagcagcagcagcaaccactagcctcctgccccgcggcgctgccgcacgagccccacgagccgctcaccccgccgttctcaggatgctgtcggtgagctcgcgcgccctcccgccgccagtcccggcagcgccctcagcgactcggaccgatg

SEQ ID NO: 12986 - DNA, 203 bp, Artificial sequence
  synthetic
ggcgcgccagtcctccagaaccgcggcggtggtggtggtggcggcggcggcggcgaagggggcggagaggaaggagcgcggcgggaccgggccgggacagcgcgcggccctcctggtaggattcgctccgcgcccgcggttgtagcagctgccgctgcagccatagcagcaggtcagtcattggcacccgactcggaccgatg

SEQ ID NO: 12987 - DNA, 203 bp, Artificial sequence
  synthetic
ggcgcgccagtcctagaaccgagcggcggtggtggtggtggcggcggcggcggcgaagggggcggagaggaaggagcgcggcgggaccgggccgggacagcgcgtactttgggctccgggattcgctccgcgcccgcggttgtagcagctgccgctgcagtatcgctttagtcacagtcattggcacccgactcggaccgatg

SEQ ID NO: 12988 - DNA, 203 bp, Artificial sequence
  synthetic
ggcgcgccagtcctagcctggggcggcggtggtggtggtggcggcggcggcggcgaagggggcggagaggaaggagcgcggcgggaccgggccgggacagcgcgtactttgggctccgggattcgctccgcgttatattgccagtgagctgccgctgcagccatagcagcaggtcagtcattggcacccgactcggaccgatg

SEQ ID NO: 12989 - DNA, 203 bp, Artificial sequence
  synthetic
ggcgcgccagtcctggtccgtggcggctggagcggacccagcgagtgagggcgcacagccgggacgccgaggcggcgggcgggagacccgagaagtgcaccatcgccctcggcgggacgtgacgcagcgcccggggcgcgggtgtatttgatatagtgtttgcaacaaattcgacccaggtgatcaaacgactcggaccgatg

SEQ ID NO: 12990 - DNA, 203 bp, Artificial sequence
  synthetic
ggcgcgccagtcctccgctgccgcggctggagcggacccagcgagtgatcctatcagtaatagacgccgaggcggcgggcgggagacccgcaccagcgcagccggccctcggcgggacgtgacgcagcgcccggggcgcgggtgtatttgatatagtgtttgcaacaaattcgacccaggtgatcaaacgactcggaccgatg

SEQ ID NO: 12991 - DNA, 203 bp, Artificial sequence
  synthetic
ggcgcgccagtcctgtggaccagcgggcgacactctcgggctcgcgcaagatagagcatgatcggcgcccgaggcctcgcgcgcccggagttgctggttctgtgaggtagcggcggcaacgaccatggaggccacgtcccgggaggcggcgccagcgaagagctcggcctcgggccccaacgctcccccgactcggaccgatg

SEQ ID NO: 12992 - DNA, 203 bp, Artificial sequence
  synthetic
ggcgcgccagtcctgcacctcagcgggcgacactctcgggctcgcgcacctccccaagatggcggcgcccgaggcctcgcgcgcccggagttgctggttctgtgaggtagcggcggcatgcggttatagcaacacgtcccgggaggcggcgccagcgaagagctcggcctcgggccccaacgctcccccgactcggaccgatg

SEQ ID NO: 12993 - DNA, 203 bp, Artificial sequence
  synthetic
ggcgcgccagtcctattcccatgcgggcgcggggctgaaggcggaaccacgacgggcagagagcacggagccgggaagcccctgggcgcccgtcggagggctatggagcagcggccgcggggctgcgcggcgagatgccacaatagcctcctggtgctgctgggggcccgggcccagggcggcactcgcgactcggaccgatg

SEQ ID NO: 12994 - DNA, 203 bp, Artificial sequence
  synthetic
ggcgcgccagtcctattgtcttgcgggcgggccccgtccatcctcagcgcagtcgtgttctccgagttcctgtctctctgccaacgccgcccggatggcttcccaaaaccgcgacccagccgccactagcgtcgccgccgcccgtaaaggagctgagccgagcgggggcgccgcccggggtccggtggcgactcggaccgatg

SEQ ID NO: 12995 - DNA, 203 bp, Artificial sequence
  synthetic
ggcgcgccagtcctgttgtaacgcgggcgggcccgcagtcctgcagttgcagtcgtgttctccgagttcctgtctctctgccaacgccgcccggatggcttcccaaaaccgcgacccacagcaacaacttcacgccgccgcccgtaaaggagctgagccgagcgggggcgccgcccggggtccggtggcgactcggaccgatg

SEQ ID NO: 12996 - DNA, 203 bp, Artificial sequence
  synthetic
ggcgcgccagtcctgcgcatgcgcgggcgggcccgcagtcctgcagttgcagtcgtgttctccgagttcctgtctctctgccaacgccgcccggatggcttcccaaaaccgcgacccagccgccactagcgtcgccgccgcccgtaaaggagctgagccgagcgggggcgccgcccggggtccggtggcgactcggaccgatg

SEQ ID NO: 12997 - DNA, 203 bp, Artificial sequence
  synthetic
ggcgcgccagtcctccagctacgcgggcgggcccgcagtcctgcagttgcagtcgtgttctccgagttcctgtctctctgccaacgccgcgtaatgataacttgaaaaccgcgacccagccgccactagcgtcgccgccgcccgtaaaggagctgagccgagcgggggcgccgcccggggtccggtggcgactcggaccgatg

SEQ ID NO: 12998 - DNA, 203 bp, Artificial sequence
  synthetic
ggcgcgccagtcctaccagttagcggggctgggaagtagtcgggcggggttgtgagacgccgcgctcagcttccatcgctgggcggtcaacaagtgcgggcctgctcagcaagctttaggcgcggagaccgcgaggcgaccgggagcggctgggttcccggctgcgcgcccttcggccaggccgggagcgactcggaccgatg

SEQ ID NO: 12999 - DNA, 203 bp, Artificial sequence
  synthetic
ggcgcgccagtcctgtgtttaggcggggctgggaagtagtcgggcggggttgtgagacgccgcgctcagcttccatcgctgggcggtcaacaagtgcgggcctggctcagcgcgggggggcgcggagaccgcatcttctaataagtcggctgggttcccggctgcgcgcccttcggccaggccgggagcgactcggaccgatg

SEQ ID NO: 13000 - DNA, 203 bp, Artificial sequence
  synthetic
ggcgcgccagtcctatgggctggcggggctgggaagtagtcgggcggggttgtgagacgccgcgctcagcttccatgttgtccgtcaacgcaagtgcgggcctggctcagcgcgggggggcgcggagaccgcgaggcgaccgggagcggctgggttcccggctgcgcgcccttcggccaggccgggagcgactcggaccgatg

SEQ ID NO: 13001 - DNA, 203 bp, Artificial sequence
  synthetic
ggcgcgccagtccttgcttgtggcggggctgggatcacaagttcgacagttgtgagacgccgcgctcagcttccatcgctgggcggtcaacaagtgcgggcctggctcagcgcgggggggcgcggagaccgcgaggcgaccgggagcggctgggttcccggctgcgcgcccttcggccaggccgggagcgactcggaccgatg

SEQ ID NO: 13002 - DNA, 203 bp, Artificial sequence
  synthetic
ggcgcgccagtcctaggcgtacgcgggtggacgctttttggagatctagatcattactatatgtgtctcctataatcacatcataggagtgaaccataatacacatctttgggtaggggaaggaaagtattgttgacgtactgattgatctgcttgagtcaaataatcagtcataacaattcaagaaacgactcggaccgatg

SEQ ID NO: 13003 - DNA, 203 bp, Artificial sequence
  synthetic
ggcgcgccagtcctaaccgacggcgggtgtaggattagtgtcatgaattagtgtttcaaatcagttgcatatcaattaagaaaaacttaggagacaggtatagaacctctctttcagataactggtcaattaaggacagaaattctgtttctcaaatccgctagcctttgtcaaagaggacacaagcacgactcggaccgatg

SEQ ID NO: 13004 - DNA, 203 bp, Artificial sequence
  synthetic
ggcgcgccagtcctcgagatgcgcggtccctgaggggcgggcggggcccgaccggcgctctgtgtggccgaggccacatcaagaactttacccggctaggccccgggcggctctagcccagggcggcccgcggggcgctgggcctggctcccggctccggtttccgggccggcgggtggccgctcacccgactcggaccgatg

SEQ ID NO: 13005 - DNA, 203 bp, Artificial sequence
  synthetic
ggcgcgccagtcctcaagttgagcgtagccgagacacacgcatggtgctccggaggcggcggcgggtgagctcaacttcgcacagcccttcccagctccagccccggctggcccggcacttctcggagggtcccggcagccgggaccagtgagtgcctctacggaccagcgccccggcgggcgggaagcgactcggaccgatg

SEQ ID NO: 13006 - DNA, 203 bp, Artificial sequence
  synthetic
ggcgcgccagtcctgtctgagtgcgtagccgagatcaggcgtacagagtccggaggcggcggcgggtgagctcaacttcgcacagcccttcccagctccagccccggctggcccggcacttctcggagggtcccggcagccgggaccagtgagtgcctctacggaccagcgcccatagctataatttacgactcggaccgatg

SEQ ID NO: 13007 - DNA, 203 bp, Artificial sequence
  synthetic
ggcgcgccagtccttattaagtgcgtattcaacaaggggctgaaggatgcccagaaggtaccaggaaccgaatttactgatctggggcctcggtgcacatgctttacatgtgtttagtcgaggttaaaaaacgtctaggccccccgaaccacggggacgtggttttcctttgaaaaacacgatgataacgactcggaccgatg

SEQ ID NO: 13008 - DNA, 203 bp, Artificial sequence
  synthetic
ggcgcgccagtcctaggctcttgcgtattcaacaaggggctgaaggatgcccagaaggtaccccattgtatgggatctgatctggggcctacaattcagcaggatacatgtgtttagtcgaggttaaaaaacgtctaggccccccgaaccacggggacgtggttttcctttgaaaaacacgatgataacgactcggaccgatg

SEQ ID NO: 13009 - DNA, 203 bp, Artificial sequence
  synthetic
ggcgcgccagtcctatgcgcaagcgtccggaaagctcagccgtgattgcacaagagagctacaagagcctggaagaagctgaagactgctaccctccatccttactcaccctggacctgagagacctcttcaatcaggtggagcaaggccctctcctgtcctgccccaaggctggcacagacttgagccgactcggaccgatg

SEQ ID NO: 13010 - DNA, 203 bp, Artificial sequence
  synthetic
ggcgcgccagtccttgttcgcagcgtccggaaagtcagtagaattcatcacaagagagctacaagagcctggaagaagctgaagactgctaccctccatccttactcaccctggacctcctcactgagggatatcaggtggagcaaggccctctcctgtcctgccccaaggctggcacagacttgagccgactcggaccgatg

SEQ ID NO: 13011 - DNA, 203 bp, Artificial sequence
  synthetic
ggcgcgccagtcctgctacggtgcgtccggaaagtcagtagaattcatcacaagagagctacaagagcctggaagaagctgaagactgctaccctccatccttactcaccctggacctgagagacctcttcaatcaggtggagcaaggccctctcctgtcctgccccaaggctggcacagacttgagccgactcggaccgatg

SEQ ID NO: 13012 - DNA, 203 bp, Artificial sequence
  synthetic
ggcgcgccagtcctcatttaaagcgtccggaaagtcagtagaattcatcacaagagagctacaagagcctggaagaagctgaagactgctaccctccatccttactcaccctggacctgagagacctcttcaatcaggtggagcaatcatactcaactgactgccccaaggctggcacagacttgagccgactcggaccgatg

SEQ ID NO: 13013 - DNA, 203 bp, Artificial sequence
  synthetic
ggcgcgccagtcctaatcgaacgcgtccggaaagtcagtagaattcatcacaagagagctacaagagcctggaagaagctgaagactgctcttgagacgagccgctcaccctggacctgagagacctcttcaatcaggtggagcaaggccctctcctgtcctgccccaaggctggcacagacttgagccgactcggaccgatg

SEQ ID NO: 13014 - DNA, 203 bp, Artificial sequence
  synthetic
ggcgcgccagtccttaaatggtgcgtccggaaagtcagtagaattcatggttgatctcagcaaagagcctggaagaagctgaagactgctaccctccatccttactcaccctggacctgagagacctcttcaatcaggtggagcaaggccctctcctgtcctgccccaaggctggcacagacttgagccgactcggaccgatg

SEQ ID NO: 13015 - DNA, 203 bp, Artificial sequence
  synthetic
ggcgcgccagtcctgggaaatcgcgtgcttaggcttttgaagatggcttcattttggtgggattctcagattggccgcaactggagcccatcctgtttgtctttatttttattttctactccctaactctctttggcaacaccatcatcatcgctctctcctggctagaccttcggctgcacacacctcgactcggaccgatg

SEQ ID NO: 13016 - DNA, 203 bp, Artificial sequence
  synthetic
ggcgcgccagtccttcctcttagcgttactcgacagaggagagcaagaaatggagccagtagatcctagactagagccctggaagcatccaggaagtcagcctaaaactgcttgtaccaattgctattgtaacgctctactgcgctattgccaagtttgtttcataacaaaagccttaggcatctcctcgactcggaccgatg

SEQ ID NO: 13017 - DNA, 203 bp, Artificial sequence
  synthetic
ggcgcgccagtcctgcccagtggctatcggacctcgcttaggactcccattcccatggagaaactcctagatgaggcatcatgagtgcaagggccttataacttaaccgtcggcagttgggtaagagaccacgtccgatcaattgtcgagggcgcgtgggaagtgcgcgatgttgttaccgctgcccacgactcggaccgatg

SEQ ID NO: 13018 - DNA, 203 bp, Artificial sequence
  synthetic
ggcgcgccagtcctttcggcacgctatcggacctcgcttaggactcccattcccatggagaaactcctagatgaggttcttgcccccggtgggccttataacttaaccgtcggcagttattgctctcgtagggtccgatcaattgtcgagggcgcgtgggaagtgcgcgatgttgttaccgctgcccacgactcggaccgatg

SEQ ID NO: 13019 - DNA, 203 bp, Artificial sequence
  synthetic
ggcgcgccagtcctcattctcagctatcggacctcgcttaggactcccattcccatggagaaactcctagatgaggttcttgcccccggtgggccttataacttaaccgtcggcagttgggtaagagaccacgtccgatcaattgtcgagggcgcgtgggaagtgcgcgatgttagactgcaacgggtcgactcggaccgatg

SEQ ID NO: 13020 - DNA, 203 bp, Artificial sequence
  synthetic
ggcgcgccagtcctcggaacaagctatcggacctcgcttaggactcccattcccatggagaaactcctagatgaggttcttgcccccggtgggccttataacttaaccgtcggcagttgggtaagagaccacgtccgatcaattgtttttctgcacacaaaagtgcgcgatgttgttaccgctgcccacgactcggaccgatg

SEQ ID NO: 13021 - DNA, 203 bp, Artificial sequence
  synthetic
ggcgcgccagtcctggatcaaggctatcggacctcgcttaggactcccattcccatggagaaactcctagatgaggttcttgcccccggtgggccttataacttcttaagactggaccgggtaagagaccacgtccgatcaattgtcgagggcgcgtgggaagtgcgcgatgttgttaccgctgcccacgactcggaccgatg

SEQ ID NO: 13022 - DNA, 203 bp, Artificial sequence
  synthetic
ggcgcgccagtcctatgcttgggctatcggacctcgcttaggactcccattcccatggagaaggcgtggacgacccttcttgcccccggtgggccttataacttaaccgtcggcagttgggtaagagaccacgtccgatcaattgtcgagggcgcgtgggaagtgcgcgatgttgttaccgctgcccacgactcggaccgatg

SEQ ID NO: 13023 - DNA, 203 bp, Artificial sequence
  synthetic
ggcgcgccagtcctaagaatgcgctatcggacctcgcttaggactccctccgtagcctccttactcctagatgaggttcttgcccccggtgggccttataacttaaccgtcggcagttgggtaagagaccacgtccgatcaattgtcgagggcgcgtgggaagtgcgcgatgttgttaccgctgcccacgactcggaccgatg

SEQ ID NO: 13024 - DNA, 203 bp, Artificial sequence
  synthetic
ggcgcgccagtcctgtgttcgtgctattttgcttccctattcagtctcccgtggcaaggaggtgtacagccctgactttcatagcctcggaggagaaggtcttggtggccgacaagtctggagacgtctactccttttcggtgctggagccacacgggtgtggccgtctagagctggggcacctgtctcgactcggaccgatg

SEQ ID NO: 13025 - DNA, 203 bp, Artificial sequence
  synthetic
ggcgcgccagtcctcgcagaatgctattttgctttaaccgatgacagaccgtggcaaggagggacgtgttggctcatttcatagcctcggaggagaaggtcttggtggccgacaagtctggagacgtctactccttttcggtgctggagccacacgggtgtggccgtctagagctggggcacctgtctcgactcggaccgatg

SEQ ID NO: 13026 - DNA, 203 bp, Artificial sequence
  synthetic
ggcgcgccagtcctgggcgcgtgctattttgctttaaccgatgacagaccgtggcaaggaggtgtacagccctgaccgcgtagaggaaccaggagaaggtcttggtggccgacaagtctggagacgtctactccttttcggtgctggagccacacgggtgtggccgtctagagctggggcacctgtctcgactcggaccgatg

SEQ ID NO: 13027 - DNA, 203 bp, Artificial sequence
  synthetic
ggcgcgccagtccttaacgcccgctattttgctttaaccgatgacagaccgtggcaaggaggtgtacagccctgactttcatagcctcggaggagaaggtcttggtggccgacaagtctggagacgtctactccttttcggtgctggagccacacgggtgtggccgtctagagctggggcacctgtctcgactcggaccgatg

SEQ ID NO: 13028 - DNA, 203 bp, Artificial sequence
  synthetic
ggcgcgccagtcctcgtacgatgctattttgctttaaccgatgacagaccgtggcaaggaggtgtacagccctgactttcatagcctcgggaagcccacagcgcgtggccgacaagtctggagacgtctactccttttcggtgctggagccacacgggtgtggccgtctagagctggggcacctgtctcgactcggaccgatg

SEQ ID NO: 13029 - DNA, 203 bp, Artificial sequence
  synthetic
ggcgcgccagtcctgcgggtgggctattttgctttaaccgatgacagaggtcccagtcatcatgtacagccctgactttcatagcctcggaggagaaggtcttggtggccgacaagtctggagacgtctactccttttcggtgctggagccacacgggtgtggccgtctagagctggggcacctgtctcgactcggaccgatg

SEQ ID NO: 13030 - DNA, 203 bp, Artificial sequence
  synthetic
ggcgcgccagtcctgaggcaccgctcagcgcgggaatataaacgagatgcgaggcgaccgggagcggctgggttcccggctgcgcgcccttcggccaggccgggagccgcgccagtcggagcccccggcccagcgtggtccgcctccctctgggcgtccacctgcccggagtactgccagcgggcatgcgactcggaccgatg

SEQ ID NO: 13031 - DNA, 203 bp, Artificial sequence
  synthetic
ggcgcgccagtccttcctttgcgctcagcgcgggggggcgcggagaccgcgaggcgaccgggagcggctgggttcctcttcctatttttctcggccaggccgggagccgcgccagtcggagcccccggcccagcgtggtccgcctccctctgggcgtccacctgcccggagtactgccagcgggcatgcgactcggaccgatg

SEQ ID NO: 13032 - DNA, 203 bp, Artificial sequence
  synthetic
ggcgcgccagtcctttaggttcgctcatctttgcggggttagctagccaaatctgtagccggtccttggcaagacagtagcttagagaaacgagatcgaatgcacccggaaggtggccaatttgtgcctcaactccttggccatctcctggctaccaaactcaagcgtttcctccttagcaaaggcggcgactcggaccgatg

SEQ ID NO: 13033 - DNA, 203 bp, Artificial sequence
  synthetic
ggcgcgccagtcctggttccctgctcatctttgcggggttagctagccgttgagtccaagtcggacaccaggaacagtagcttagagaaacgagatcgaatgcacccggaaggtggccaatttgtgcctcaactccttggccatctcctggctaccaaactcaagcgtttccgttgggaattgggcggcgactcggaccgatg

SEQ ID NO: 13034 - DNA, 203 bp, Artificial sequence
  synthetic
ggcgcgccagtccttgctgctagctcatctttgcggggttagctagccgttgagtccaagtctccttggcaagacagtagcttagagaaacgagatcgaatgcaaggactccccaaagaatttgtgcctcaactccttggccatctcctggctaccaaactcaagcgtttcctccttagcaaaggcggcgactcggaccgatg

SEQ ID NO: 13035 - DNA, 203 bp, Artificial sequence
  synthetic
ggcgcgccagtcctcactgcatgctcatctttgcggggttagctagccgttgagtccaagtctccttggcaagacagtagcttagagaaacgagatcgaatgcacccggaaggtggccaatttgtgcctcaactccttggccatctcctggctaccaaactcaagcgtttcctcagagctgttctttccgactcggaccgatg

SEQ ID NO: 13036 - DNA, 203 bp, Artificial sequence
  synthetic
ggcgcgccagtcctaagggcgtgctcatctttgcggggttagctagccgttgagtccaagtctccttggcaagacagtagcttagagaaacgagatcgaatgcacccggaaggtggccaatttgtgcctcaactccttggccatcttaattgggtagctgtcaagcgtttcctccttagcaaaggcggcgactcggaccgatg

SEQ ID NO: 13037 - DNA, 203 bp, Artificial sequence
  synthetic
ggcgcgccagtcctagatatcagctcatctttgcggggttagctagccgttgagtccaagtctccttggcaagacagtagcttagagaaacgagatcgaatgcacccggaaggtggccaatttgtgcctcaagcagcataggtgtccctggctaccaaactcaagcgtttcctccttagcaaaggcggcgactcggaccgatg

SEQ ID NO: 13038 - DNA, 203 bp, Artificial sequence
  synthetic
ggcgcgccagtcctttgctaacgctccgcggcggctgcgaaggcggcggctcctgccctctcgctttccctctcgcgtctctggctgcagaaagaagcttccgggcagtcaccttacaaggtgccatttccctctctgttgaagcaaaggccggggcagacctcctagtgaaaggaaagcaagccaggcgactcggaccgatg

SEQ ID NO: 13039 - DNA, 203 bp, Artificial sequence
  synthetic
ggcgcgccagtcctttcaaagtgctccgcggcggctgcgaaggcggcggctcctgccctctcgctttccctctcgcgtctctggctgcagaaagaagcttccggttctgaggtcctggaggtgccatttcccagggatggttgtgcaaggccggggcagacctcctagtgaaaggaaagcaagccaggcgactcggaccgatg

SEQ ID NO: 13040 - DNA, 203 bp, Artificial sequence
  synthetic
ggcgcgccagtcctgtttctgggctcgtctccgccggggacgtgctgcagcaacggctgcagggccgctaggccgactggcgccagacgcggcgcgtggccacgttggtggtgaccttccacgccaacttcatgatgtcacctagaggcctgctggagcgcgcgctcccgggccgagcgccgcgcgcccgactcggaccgatg

SEQ ID NO: 13041 - DNA, 203 bp, Artificial sequence
  synthetic
ggcgcgccagtccttttctgcagctcgtctccgccggggacgtgctgcagcaacggctgcagggccgctaggccgactggcgccagacgcggcgcgtggccacgttggtggtgaccttggtaagacggaaagactacgtgtggctgggcctgctggagcgcgcgctcccgggccgagcgccgcgcgcccgactcggaccgatg

SEQ ID NO: 13042 - DNA, 203 bp, Artificial sequence
  synthetic
ggcgcgccagtcctcctacgcagctcgttatctcccagcagtctcctctttacagaaaagagtaagagtactgaggaccgtcgcctctagtcgaagatgagccggcccgaaggaaggaaaaaccgcggggggagagaagaggttctcgagcagtgggtgagcggaagaaagaagttagaggaactcgacgactcggaccgatg

SEQ ID NO: 13043 - DNA, 203 bp, Artificial sequence
  synthetic
ggcgcgccagtcctccctcaaggctctcgggcaccctcacctgccggcgcccggccgcttacccggcagggcgtgcgcagggtagggtgcgggaccggggggacctggaggcagaggggagaaccggccgtccgcgccgcagcacactgcactatccttgctcagaccccgcgcggggcgccggctcccgactcggaccgatg

SEQ ID NO: 13044 - DNA, 203 bp, Artificial sequence
  synthetic
ggcgcgccagtcctaaactagggctctcgggcaccctcacctgccggcgcccggccgcttacccggcagggcgtgcgcagggtagggtgcgggaccggggggacctggaggcagaggggagaaccggccgtcgttagtcgcctgttgccgctgggagcgcctcagaccccgcgcggggcgccggctcccgactcggaccgatg

SEQ ID NO: 13045 - DNA, 203 bp, Artificial sequence
  synthetic
ggcgcgccagtcctgtacgtaagctgcgagccctgggccacgctggccgtgctggcagtgggccgcctcgatccctaaaacacgacatggttgaggctccaagaccagcaggtgaggcctcgcggcgctgaaaccgtgaggcccggaccacaggctccagatggaccctgggaaggacaaagagggggcgactcggaccgatg

SEQ ID NO: 13046 - DNA, 203 bp, Artificial sequence
  synthetic
ggcgcgccagtcctcaaccaccgctgcgagccctgggccacgctggccgtgctggcagtgggccgcctcgatccctctgcagtctttcccttgaggctccaagaatgcactcctttttctcgcggcgctgaaaccgtgaggcccggaccacaggctccagatggaccctgggaaggacaaagagggggcgactcggaccgatg

SEQ ID NO: 13047 - DNA, 203 bp, Artificial sequence
  synthetic
ggcgcgccagtccttcgtatgtgctgcgagccctgggccacgctggccgtgctggcagtggggactaaacggtttcctgcagtctttcccttgaggctccaagaccagcaggtgaggcctcgcggcgctgaaaccgtgaggcccggaccacaggctccagatggaccctgggaaggacaaagagggggcgactcggaccgatg

SEQ ID NO: 13048 - DNA, 203 bp, Artificial sequence
  synthetic
ggcgcgccagtcctatcgaggagctggagcgagtgagcagcgatacctagggcggaagtgctctcggcggaagtgatcgctgtgtgaatccacctctttgatctcgcgggccgcctctttctaagtcggcttcgagcacccttcagttccatggccaagagcccactcgagggcgtttcctcctccagcgactcggaccgatg

SEQ ID NO: 13049 - DNA, 203 bp, Artificial sequence
  synthetic
ggcgcgccagtcctactaacatgctggagcgagtgagcagcgatacctagggcggaagtgctctcggcggaagtgatcgctgtgtgaatcgtgggtgggatggccgcgggccgcctctaaaattaaattgcacgagcacccttcagttccatggccaagagcccactcgagggcgtttcctcctccagcgactcggaccgatg

SEQ ID NO: 13050 - DNA, 203 bp, Artificial sequence
  synthetic
ggcgcgccagtcctgacccaacgctggagcgagtgagcagcgatacctagggcggaagtgctctcggcggaagtgatcgctgtgtgaatcgtgggtgggatggccgcgggccgcctctttctaagtcggcttatttgcattagtgcttccatggccaagagcccactcgagggcgtttcctcctccagcgactcggaccgatg

SEQ ID NO: 13051 - DNA, 203 bp, Artificial sequence
  synthetic
ggcgcgccagtcctacgatatggctggagcgagtgagcagcgatacctagggcggaagtgctctcggcggaagtgatcgctgtgtgaatcgtgggtgggatggccgcgggccgcctctttctaagtcggcttcgagcacccttcagttccatggccaagagcccactcgagggccaaaagattgaggacgactcggaccgatg

SEQ ID NO: 13052 - DNA, 203 bp, Artificial sequence
  synthetic
ggcgcgccagtcctggcctatggctggggtgaccgggtcctttcttggagcaacccgctcaatacccagaaatttgggcgtgcccccgcgagatcactagccgagtagtgttgggtcgcgaaaggccttgtggtactgcctgatagggtgcttgcgagtgccccgggaggtctctagcgggcgtggcacgactcggaccgatg

SEQ ID NO: 13053 - DNA, 203 bp, Artificial sequence
  synthetic
ggcgcgccagtccttttgagtggctggggtgaccgggtcctttcttggttgccagtcagtgttacccagaaatttgggcgtgcccccgcgagatcactagccgagtagtgttgggtcgcgaaaggccttgtggtactgcctgatagggtgcttgcgagtgccccgggaggtctcgtagaccgtgcaaccgactcggaccgatg

SEQ ID NO: 13054 - DNA, 203 bp, Artificial sequence
  synthetic
ggcgcgccagtcctagaggtccgctggggtttggtgattcggaggcctggggtgcagacgcggcgtggctgtgagggtgaacgtcatcgccgggtgtgagggccggactcacactgggccgccgcggggctgtttccatcggtcactggattttctcctcttccggttcgggcctcagggtggccgaccgactcggaccgatg

SEQ ID NO: 13055 - DNA, 203 bp, Artificial sequence
  synthetic
ggcgcgccagtcctggcgcattgcttaatgattgagagctcccttctgataaagggagcctgggaggctgggtggaggagggagcagaaaaaacccaactcagcagatctgggaactgtgagagcggcaagcaggaactgtggtcagaggctgtgcgtcttggctggtagggcctgctcttttctacccgactcggaccgatg

SEQ ID NO: 13056 - DNA, 203 bp, Artificial sequence
  synthetic
ggcgcgccagtccttcggcccagcttaatgattgtccagaaggcggctataaagggagcctgggaggctgggtggaggagggagcagaaaaaacccaactcagcagatctgggaactgtgagagcggcaagcaggaactgtggtcagaggctgtgcgtctaaaacttcgcatggtgctcttttctacccgactcggaccgatg

SEQ ID NO: 13057 - DNA, 203 bp, Artificial sequence
  synthetic
ggcgcgccagtcctttgcacgggcttaatgattgtccagaaggcggctataaagggagcctgggaggctgggtggaggagggagcagaaaaaacccaactcagcagatctgggaactgtgagagcggcaagctattcggtactcgggaggctgtgcgtcttggctggtagggcctgctcttttctacccgactcggaccgatg

SEQ ID NO: 13058 - DNA, 203 bp, Artificial sequence
  synthetic
ggcgcgccagtcctcatgatccgcttaatgattgtccagaaggcggctataaagggagcctgggaggctgggtggaggagggagcagaaatctggggggcggcgagatctgggaactgtgagagcggcaagcaggaactgtggtcagaggctgtgcgtcttggctggtagggcctgctcttttctacccgactcggaccgatg

SEQ ID NO: 13059 - DNA, 203 bp, Artificial sequence
  synthetic
ggcgcgccagtcctgcgggatcgcttaatgattgtccagaaggcggctataaagggagcctgggaggctgggtggatatattcattcctcaaacccaactcagcagatctgggaactgtgagagcggcaagcaggaactgtggtcagaggctgtgcgtcttggctggtagggcctgctcttttctacccgactcggaccgatg

SEQ ID NO: 13060 - DNA, 203 bp, Artificial sequence
  synthetic
ggcgcgccagtcctccgtccgcgcttaatgattgtccagaaggcggctcgcttttccatgctggaggctgggtggaggagggagcagaaaaaacccaactcagcagatctgggaactgtgagagcggcaagcaggaactgtggtcagaggctgtgcgtcttggctggtagggcctgctcttttctacccgactcggaccgatg

SEQ ID NO: 13061 - DNA, 203 bp, Artificial sequence
  synthetic
ggcgcgccagtcctcttagtttgcttcatcctacagcgggcgccaggccggccgggcaggatgcgctaccgggcgtcggccctgggcagtgacggggttcgggtgaccatggagagtgcgctcaccgcccgtgaccgggtgggggtgcaggatttcgtgctgctggagaacttcaccagcgaggccgccgactcggaccgatg

SEQ ID NO: 13062 - DNA, 203 bp, Artificial sequence
  synthetic
ggcgcgccagtcctaacgttcagcttccccaaggtgcaggcgcggtgaaaccatcgagacggagggccagagagtcacggcggtgagagggctgagtgacgggttaccccaaaccatgtggctggaggcgcgagctggggttttcgtaacaccccagggcctgtaaggtttggtgtttccctttcaagcgactcggaccgatg

SEQ ID NO: 13063 - DNA, 203 bp, Artificial sequence
  synthetic
ggcgcgccagtcctgctagtatgcttccccaaggtgcaggcgcggtgaaaccatcgagacggagggccagagagtcacggcggtgagagggctgagtgacgggttaccccaaaccatgtggctggaggcgcgtcacccacaacatttaacaccccagggcctgtaaggtttggtgtttccctttcaagcgactcggaccgatg

SEQ ID NO: 13064 - DNA, 203 bp, Artificial sequence
  synthetic
ggcgcgccagtcctagtaaggtgcttccccaaggtgcaggcgcggtgaaaccatcgagacggagggccagagagtcttctgaacccatcagctgagtgacgggttaccccaaaccatgtggctggaggcgcgagctggggttttcgtaacaccccagggcctgtaaggtttggtgtttccctttcaagcgactcggaccgatg

SEQ ID NO: 13065 - DNA, 203 bp, Artificial sequence
  synthetic
ggcgcgccagtcctgagacgaagcttcttctgtaacgggagctggttgtgagtcaccaaggaaggcagcggcagctccactcagccagtacccagatacgctgggaaccttccccagccatggcttccctggggcagatcctcttctggagcataattagcatcatcattattctggctggagcaattcgactcggaccgatg

SEQ ID NO: 13066 - DNA, 203 bp, Artificial sequence
  synthetic
ggcgcgccagtcctaagcctcggctttcctccaacttgctgcgggtggatctccgctggacacaccgcctccgaggatcccgttgctccacaaggagggactttaagactacttctgatttgcaaagattgtctgtgctctgagcaggctgaagtgactggacgagacgcactgttggagaaataaaacgactcggaccgatg

SEQ ID NO: 13067 - DNA, 203 bp, Artificial sequence
  synthetic
ggcgcgccagtcctgttggcatgctttcctccaacttgctgcgggtggatctccgctggacacaccgcctccgaggcagtttgaaaattgcaaggagggactttaagactacttctgatttgcaaagattgtctgtgctctgagcaggctgaagtgactgtgaactttcggagtttggagaaataaaacgactcggaccgatg

SEQ ID NO: 13068 - DNA, 203 bp, Artificial sequence
  synthetic
ggcgcgccagtcctgtaagacagctttcctccaacttgctgcgggtggatctccgctggacacaccgcctccgaggcagtttgaaaattgcaaggagggactttcgaggcgtgcggactttgcaaagattgtctgtgctctgagcaggctgaagtgactggacgagacgcactgttggagaaataaaacgactcggaccgatg

SEQ ID NO: 13069 - DNA, 203 bp, Artificial sequence
  synthetic
ggcgcgccagtcctacacgaccgctttcctccaacttgctgcgggtggatctccgctggacacaccgcctccgaggcagtttgaaaattgtgcacgcactgaaaaagactacttctgatttgcaaagattgtctgtgctctgagcaggctgaagtgactggacgagacgcactgttggagaaataaaacgactcggaccgatg

SEQ ID NO: 13070 - DNA, 203 bp, Artificial sequence
  synthetic
ggcgcgccagtccttccgcgaagctttcctccaacttgctgcgggtggcaggtatggccgtgcaccgcctccgaggcagtttgaaaattgcaaggagggactttaagactacttctgatttgcaaagattgtctgtgctctgagcaggctgaagtgactggacgagacgcactgttggagaaataaaacgactcggaccgatg

SEQ ID NO: 13071 - DNA, 203 bp, Artificial sequence
  synthetic
ggcgcgccagtcctcctttcacggaaaactgcaccagggtaaaagaatttattttccttggcctgacccagaatcgggaagtgagcttagtcttatttcttttcctactcttggtgtaatatgattgggccatgggaaacctcctcatcatggtcactgttacctgtgaatctcgccttcacacgccccgactcggaccgatg

SEQ ID NO: 13072 - DNA, 203 bp, Artificial sequence
  synthetic
ggcgcgccagtccttgagtgatggaaaactgcaccagggtaaaagaatttattttccttggcctgacccagaatcgggaagtgagcttagtcttatttcttttcctactcttggtgtatgtgacaactttgctgggaaacctcctcatcatggtcactgttacctgtgaatctcgccttcacacgccccgactcggaccgatg

SEQ ID NO: 13073 - DNA, 203 bp, Artificial sequence
  synthetic
ggcgcgccagtcctaccatcaaggaaaactgcaccagggtaaaagaatttattttccttggcctgacccagaatcgggaagtgagcttagtcttatttcttttcctactcttggtgtatgtgacaactttgctgggaaacctcctcatcatggtcactgttacctgtgaatctctttgaacgctcttacgactcggaccgatg

SEQ ID NO: 13074 - DNA, 203 bp, Artificial sequence
  synthetic
ggcgcgccagtcctggagactaggaaaactgcacgccttattgctctgttattttccttggcctgacccagaatcgggaagtgagcttagtcttatttcttttcctactcttggtgtatgtgacaactttgctgggaaacctcctcatcatggtcactgttacctgtgaatctcgccttcacacgccccgactcggaccgatg

SEQ ID NO: 13075 - DNA, 203 bp, Artificial sequence
  synthetic
ggcgcgccagtcctaacttgtcggaaattatccgtactgtcttcacgcagaaagcgtctagccatggcgttagtatgagtgtcgtgcagcctccaggaccccccctcccgggagagccatagtggtctgcggaaccggtgagtacaccggaattgccaggacgaccgggtcctttcttggataaaccccgactcggaccgatg

SEQ ID NO: 13076 - DNA, 203 bp, Artificial sequence
  synthetic
ggcgcgccagtcctgaaaccctggacaatgaaataccgcccactcttacccccgccgcttctcgactctgttgttagccgaagactcgcctctcagccgcccgccgcacagacgcacgagtaaaaagtgcagctccatcggctgatcctcgctaagctccgactctgggcggcaccgggcgtcccacgcgactcggaccgatg

SEQ ID NO: 13077 - DNA, 203 bp, Artificial sequence
  synthetic
ggcgcgccagtcctaatttcatggacagattcggattagcagagagcctgttggagtcaaaacgctccgtaaccccaattcttacagttttagatccaatggtaccgacaggttcagaaaatttaaaaagtctttttaatactgtctgcgtcatttggtgcatacacgcagaagagaaagtgaaagatcgactcggaccgatg

SEQ ID NO: 13078 - DNA, 203 bp, Artificial sequence
  synthetic
ggcgcgccagtccttcactaaaggacagattcggattagcagagagcctgttggagtcaaaagagggttgtcaaaaaattcttacagttttagatccaatggtaccgacaggttcagaaaatttaaaaagtctttttaatactgtctgcgtcatttggtgcatacacgcagaagctccgcaaggtttccgactcggaccgatg

SEQ ID NO: 13079 - DNA, 203 bp, Artificial sequence
  synthetic
ggcgcgccagtcctctactagaggacatccctcaccggtgacggtggtccaggctgcgttggcggcctacctatggctaacgccatgggaatgcgcaatctgtgaaggtgtgaagagcctattgagctacataagaatcctccggcccctgaatgcggctaatcccaacctcggagcaggtggtcacacgactcggaccgatg

SEQ ID NO: 13080 - DNA, 203 bp, Artificial sequence
  synthetic
ggcgcgccagtcctcgtagcctggacatccctcaccggtgacggtggtccaggctgcgttggcggcctacctatggctaacgccatgggacgctagttgtgaacaaggtgtgaagagcagccgtcaagcgggaagaatcctccggcccctgaatgcggctaatcccaacctcggagcaggtggtcacacgactcggaccgatg

SEQ ID NO: 13081 - DNA, 203 bp, Artificial sequence
  synthetic
ggcgcgccagtcctaccggcagggacatccctcaccggtgacggtggtccaggctgcgttggcggcctacctatggctaacgccatgggacgctagttgtgaacaaggtgtgaagagcctattgagctacataagaatcctccggcccctgaatgcggctaatcccaacctcgggaggttcaactcttcgactcggaccgatg

SEQ ID NO: 13082 - DNA, 203 bp, Artificial sequence
  synthetic
ggcgcgccagtcctagatcaccggacatccctcaccggtgacggtggtccaggctgcgttggcggcctacctatggctaacgccatgggacgctagttgtgaacaaggtgtgaagagcctattgagctacataagaatcctccggcccctgaatgcggctcccagaccgagacaagcaggtggtcacacgactcggaccgatg

SEQ ID NO: 13083 - DNA, 203 bp, Artificial sequence
  synthetic
ggcgcgccagtcctacaagaatggacatcgaccattcccatcagatcaccctgctggacttgcagaccggaatggggctcgcctaaggagccgagcgctgcggaggctgctgcgtgttggatgggagtgggagggggctggagcgagatttccagggcgcagtcctccggggcgttacgccgggcatacgactcggaccgatg

SEQ ID NO: 13084 - DNA, 203 bp, Artificial sequence
  synthetic
ggcgcgccagtcctgactagggggacccgtagtgaacataggaaattgtcgttgaactacatgttgtaaggctttagagaaataagggagtgtcctatttaggatgaggtgctccggtggcagccccaccaaaacctctagcgactaggaacagctatatcgggttgctatagcagtcaggatgtcatcgactcggaccgatg

SEQ ID NO: 13085 - DNA, 203 bp, Artificial sequence
  synthetic
ggcgcgccagtcctcagggtgcggacctcgagcgaaagacgcccgcccgccgcccagccctcgcctccctgcccaccgggcccaccgcgccgccaccccgacccaagctatacaccagtgtccgctgcacaccagcttgttggcgtcttcgtcgccgcgctcgccccgggctactcctgcgcgccacacgactcggaccgatg

SEQ ID NO: 13086 - DNA, 203 bp, Artificial sequence
  synthetic
ggcgcgccagtcctttgtatcgggacctcgagcgaaagacgcccgcccgccgcccagccctcgcctccctgcccaccgggcccaccgcgccgccaccccgaccccgctgcgcacggcctgtccgctgcacaccagcttgttggcgtcttcgtcgccgcgcatagttaacctcggtcctgcgcgccacacgactcggaccgatg

SEQ ID NO: 13087 - DNA, 203 bp, Artificial sequence
  synthetic
ggcgcgccagtcctagtatctgggacctcgagcgaaagacgcccgcccgccgcccagccctcgcctccctgcccaccgggcccaccgcgccgccaccccgaccccgctgcgcacggcctgtccgctgcacaccagcttgttggcgtcttcgtcgccgcgctcgccccgggctaccatgcatgttgtttcgactcggaccgatg

SEQ ID NO: 13088 - DNA, 203 bp, Artificial sequence
  synthetic
ggcgcgccagtcctcttgcgttggacctcgagcgtcgtggtgggctgagccgcccagccctcgcctccctgcccaccgggcccaccgcgccgccaccccgaccccgctgcgcacggcctgtccgctgcacaccagcttgttggcgtcttcgtcgccgcgctcgccccgggctactcctgcgcgccacacgactcggaccgatg

SEQ ID NO: 13089 - DNA, 203 bp, Artificial sequence
  synthetic
ggcgcgccagtcctccgaacttggactctgtcttcagctggacactccctccctgcaccatgctaacttcgaactccctgcccagcctgagctgccgcaccagctgctcctcccggccctgtgtgccccccagctgccacggctgcaccctgcccggggcctgcaacatccccgccaatgtgagcaaccgactcggaccgatg

SEQ ID NO: 13090 - DNA, 203 bp, Artificial sequence
  synthetic
ggcgcgccagtcctttagttcaggactctgtcttcagctggacactccctccctgcaccatgtcttacagttgtggcctgcccagcctgacggatttgcaactttgctcctcccggccctgtgtgccccccagctgccacggctgcaccctgcccggggcctgcaacatccccgccaatgtgagcaaccgactcggaccgatg

SEQ ID NO: 13091 - DNA, 203 bp, Artificial sequence
  synthetic
ggcgcgccagtcctaatgagaaggactctgtcttcagctggacactccctccctgcaccatgtcttacagttgtggcctgcccagcctgagctgccgcaccagctgcattaatgggccctgtgtgccccccagctgccacggctgcaccctgcccggggcctgcaacatccccgccaatgtgagcaaccgactcggaccgatg

SEQ ID NO: 13092 - DNA, 203 bp, Artificial sequence
  synthetic
ggcgcgccagtcctcacgctggggactctgtcttcagctggacactccctccctgcaccatgtcttacagttgtggcctgcccagcctgagctgccgcaccagctgctcctcccggccctgtgtgccccccagctgccacggctgcaccctgcccggggcaccttcgcagtgtaccaatgtgagcaaccgactcggaccgatg

SEQ ID NO: 13093 - DNA, 203 bp, Artificial sequence
  synthetic
ggcgcgccagtcctgatgaatcggactctgtcttcagctggacactccctccctgcaccatgtcttacagttgtggcctgcccagcctgagctgccgcaccagctgctcctcccggccctgtgtgccccccagctgccacggctgcaccctgcccggggcctgcaacatccccggtctccctttttcacgactcggaccgatg

SEQ ID NO: 13094 - DNA, 203 bp, Artificial sequence
  synthetic
ggcgcgccagtcctttgggactggactctgtcttcagctggacactccctccctgcaccatgtcttacagttgtggttgtttagagacccgctgccgcaccagctgctcctcccggccctgtgtgccccccagctgccacggctgcaccctgcccggggcctgcaacatccccgccaatgtgagcaaccgactcggaccgatg

SEQ ID NO: 13095 - DNA, 203 bp, Artificial sequence
  synthetic
ggcgcgccagtcctcatcccacggactctgtcttcagctggacactcctagaacagtttcaatcttacagttgtggcctgcccagcctgagctgccgcaccagctgctcctcccggccctgtgtgccccccagctgccacggctgcaccctgcccggggcctgcaacatccccgccaatgtgagcaaccgactcggaccgatg

SEQ ID NO: 13096 - DNA, 203 bp, Artificial sequence
  synthetic
ggcgcgccagtcctgtattcacggactctgtcttcagctggatctcaggtccctgcaccatgtcttacagttgtggcctgcccagcctgagctgccgcaccagctgcattaatgggccctgtgtgccccccagctgccacggctgcaccctgcccggggcctgcaacatccccgccaatgtgagcaaccgactcggaccgatg

SEQ ID NO: 13097 - DNA, 203 bp, Artificial sequence
  synthetic
ggcgcgccagtcctgggtagaaggactctgtcttcagctggatctcaggtccctgcaccatgtcttacagttgtggcctgcccagcctgagctgccgcaccagctgctcctcccggccctgtgtgccccccagctgccacggctgcaccctgcccggggcctgcaacatccccgccaatgtgagcaaccgactcggaccgatg

SEQ ID NO: 13098 - DNA, 203 bp, Artificial sequence
  synthetic
ggcgcgccagtcctgaggttcgggactctgtctttgctaccctcacaactccctgcaccatgtcttacagttgtggcctgcccagcctgagctgccgcaccagctgctcctcccggccctgtgtgccccccagctgccacggctgcaccctgcccggggcctgcaacatccccgccaatgtgagcaaccgactcggaccgatg

SEQ ID NO: 13099 - DNA, 203 bp, Artificial sequence
  synthetic
ggcgcgccagtcctagttaagaggagagtagagcggagagaggaagtaagaagacgcctccgggtaagggacgcccctaacatccacggtaccaatgcgcgtactgtaaggaggagggacattggaagaagaactgtccaaaactcgtaagcggggcaaccccagtgttggtagaagaattacaatagcgactcggaccgatg

SEQ ID NO: 13100 - DNA, 203 bp, Artificial sequence
  synthetic
ggcgcgccagtcctagaccctgggagagtagagcggagagaggaagtaagaagacgcctccgggtaagggacgcccgcctttggggaaaaaccaatgcgcgtacaccctaacatctctacattggaagaagaactgtccaaaactcgtaagcggggcaaccccagtgttggtagaagaattacaatagcgactcggaccgatg

SEQ ID NO: 13101 - DNA, 203 bp, Artificial sequence
  synthetic
ggcgcgccagtccttcggcgtcggagccccgcgtgacgctcctctctcagtccaaaagcggcttttggttcggcgcagagagacccgggggtctagcttttcctcgaaaagcgccgccctgcccttggccccgagaacagacaaagagcaccgcagggccccgggtcgaacacccgctgaggccggcccgactcggaccgatg

SEQ ID NO: 13102 - DNA, 203 bp, Artificial sequence
  synthetic
ggcgcgccagtcctggatgcttggagccccgcgtgacgctcctctctcagtccaaaagcggcttttggttcggcgcagagagacccgggggtctagcttttcctcgaaaagcgccgccctgcccttggccccgagaacagacaaagagcaccgcagggccgatcacgctgggggatgatgaaattcgacgactcggaccgatg

SEQ ID NO: 13103 - DNA, 203 bp, Artificial sequence
  synthetic
ggcgcgccagtcctatatgaacggagccccgcgtgacgctcctctctcagtccaaaagcggcttttggttcggcgcagagagacccgggggtctagcttttcctcgaaaagcgccgccctgcccttggccccgagaacagacaaaggttggttttattgagatcacgctgggggcgctgaggccggcccgactcggaccgatg

SEQ ID NO: 13104 - DNA, 203 bp, Artificial sequence
  synthetic
ggcgcgccagtcctcgtgacgaggagccccgcgtgacgctcctctctcagtccaaaagcggcttttggttcggcgcagagagacccgggggtctagcttttcctcgaaaagcgccgccctgcccttggcccctcctgtgactgtccagcaccgcagggccgatcacgctgggggcgctgaggccggcccgactcggaccgatg

SEQ ID NO: 13105 - DNA, 203 bp, Artificial sequence
  synthetic
ggcgcgccagtcctatgttgttggagccccgcgtgacgctcctctctcctataggtgcacatttttggttcggcgcagagagacccgggggtctagcttttcctcgaaaagcgccgccctgcccttggccccgagaacagacaaagagcaccgcagggccgatcacgctgggggcgctgaggccggcccgactcggaccgatg

SEQ ID NO: 13106 - DNA, 203 bp, Artificial sequence
  synthetic
ggcgcgccagtccttccacgtgggagccgcgcagccctcggagcacgaatatatacagccctgctctgggacacacctccattggatttaaaagacagtcctcgtcagcactgactttcagctatggaatcgacggttgatgatgagcgttgtaggaatgaaatgaagatcgggtgaggagcaggacgcgactcggaccgatg

SEQ ID NO: 13107 - DNA, 203 bp, Artificial sequence
  synthetic
ggcgcgccagtcctcccttcgtggagccgcgcagccctcggagcacgaatatatacagccctgctctgggacacactgttggactcgaagaaagacagtcctcgtcagcactgactttcagctatggaatcgacggttgatgatgaagcgccggccgtgtaaatgaagatcgggtgaggagcaggacgcgactcggaccgatg

SEQ ID NO: 13108 - DNA, 203 bp, Artificial sequence
  synthetic
ggcgcgccagtcctcaagtcccggataggaggaatttaacaggatactgaacgtcgtatgttcagatcaaaagtaagaaaaacttagggtgaatgacaattcacagatcagctcaaccagacaccaccagcatacacgaaaccaaccttcacagtggatacctcagcatccaaaactctccttcccgacgactcggaccgatg

SEQ ID NO: 13109 - DNA, 203 bp, Artificial sequence
  synthetic
ggcgcgccagtcctgcgatgcaggataggaggaatttaacaggatacttggacaatagaagccagatcaaaagtaaagctttgagcaaaggaatgacaattcacagatcagctcaaccagacaccaccagcatacacgaaaccaaccttcacagtggatacctcagcatccaaaactctccttcccgacgactcggaccgatg

SEQ ID NO: 13110 - DNA, 203 bp, Artificial sequence
  synthetic
ggcgcgccagtcctccaaccagggataggaggaatttaacaggatacttggacaatagaagccagatcaaaagtaagaaaaacttagggtgaatgacaattcacagatcagctcaaccagacaccaccagcatacacgaaaccaaccttcacagtggatacctcagcatccaaaactctccttcccgacgactcggaccgatg

SEQ ID NO: 13111 - DNA, 203 bp, Artificial sequence
  synthetic
ggcgcgccagtcctgtctacttggatcacttgagatttcactcgattcgctgcagtgagccctgtttttgccaccacactccagcttgggattgattcctaaagactcatgttacgtgaggaagcagctcagaagaggaaaggaaaggagccaggcatggctcttcctcagatatctcttccaaatgccgactcggaccgatg

SEQ ID NO: 13112 - DNA, 203 bp, Artificial sequence
  synthetic
ggcgcgccagtcctaagaggatggatcacttgagccagggagttgaaggctgcagtgagcccgcaaaggattggaccactccagcttgggattgattcctaaagactcatgttacgtgaggaagcagctcagaagaggaaaggaaaggagccaggcatggctcttcctcagatatctcttccaaatgccgactcggaccgatg

SEQ ID NO: 13113 - DNA, 203 bp, Artificial sequence
  synthetic
ggcgcgccagtcctacactctaggatcacttgagccagggagttgaaggctgcagtgagccctgtttttgccaccacactccagcttgggattgattcctaaagactcatgttacgtgaggaagcagctcagaagaggaaaggaaaggagccaggcatggagtcggagagctattctcttccaaatgccgactcggaccgatg

SEQ ID NO: 13114 - DNA, 203 bp, Artificial sequence
  synthetic
ggcgcgccagtcctgttatccaggatcacttgagccagggagttgaaggctgcagtgagccctgtttttgccaccacactccagcttgggattgattcctaaagttaagatcaggccaaggaagcagctcagaagaggaaaggaaaggagccaggcatggctcttcctcagatatctcttccaaatgccgactcggaccgatg

SEQ ID NO: 13115 - DNA, 203 bp, Artificial sequence
  synthetic
ggcgcgccagtccttagcctttggatcctaggcaaattgtctacctttactggtcagcaagtcttttccacaatgagcaactcaaaggaaatccccagcttcagatggactcaatccctgagaagagggctcagtgagttcacaacaccggtgaagaccgatgttctgagggattgggtttgccagaccgactcggaccgatg

SEQ ID NO: 13116 - DNA, 203 bp, Artificial sequence
  synthetic
ggcgcgccagtcctgagtaaacggatcctaggcaaattgtctacctttcgatcatttacgaccttttccacaatgagcaactcaaaggaaatccccagcttcagatggactcaatccctgagaagagggctcagtgagttcacaacaccggtgaagaccgatgttctgagggatgccaaaatgatactcgactcggaccgatg

SEQ ID NO: 13117 - DNA, 203 bp, Artificial sequence
  synthetic
ggcgcgccagtcctctgatattggatcctaggcaatttggttgtctttaacgacctaaaatcgcgctgtacttctccaaatgggaaacaagcaagccaaagccccagaatcaaaagacagtccgagagccagcctgatcccagatgccacacatctagggccacagttctgtaagagctgctggttcgcgactcggaccgatg

SEQ ID NO: 13118 - DNA, 203 bp, Artificial sequence
  synthetic
ggcgcgccagtccttgacttctggatcctaggcaatttggttgtctttttttgaggccttgtgcgctgtacttctccaaatgggaaacaacttcattcgttagtcagaatcaaaagacagtccgagagccagcctgatcccagatgccacacatctagggccacagttctgtaagagctgctggttcgcgactcggaccgatg

SEQ ID NO: 13119 - DNA, 203 bp, Artificial sequence
  synthetic
ggcgcgccagtcctgtagcaaaggatcctaggcaatttggttgtctttttttgaggccttgtgcgctgtacttctccaaatgggaaacaagcaagccaaagccccagaatcaaaagactcatgagtcctacacctgatcccagatgccacacatctagggccacagttctgtaagagctgctggttcgcgactcggaccgatg

SEQ ID NO: 13120 - DNA, 203 bp, Artificial sequence
  synthetic
ggcgcgccagtcctgtaccgttggatcctaggcaatttggttgtctttttttgaggccttgtgcgctgtacttctcggcgccttgccggggcaagccaaagccccagaatcaaaagacagtccgagagccagcctgatcccagatgccacacatctagggccacagttctgtaagagctgctggttcgcgactcggaccgatg

SEQ ID NO: 13121 - DNA, 203 bp, Artificial sequence
  synthetic
ggcgcgccagtcctacaactctggatcctaggcaccaccagctctgacttcactgagcaactctattctagatcaaaatcaccagaacttctggcatggcacactccaaggaggttccaagctttagatggactcagtccttaaggagaggtttgagccaattcactcagactgtcaagtcagatgttcgactcggaccgatg

SEQ ID NO: 13122 - DNA, 203 bp, Artificial sequence
  synthetic
ggcgcgccagtccttcgtagccggatcctaggcatagtgtctaacactccgcgaattatgggctattctagatcaaaatcaccagaacttctggcatggcacactccaaggaggttccaagctttagatggactcagtccttaaggagaggtttgagccaattcactcagactgtcaagtcagatgttcgactcggaccgatg

SEQ ID NO: 13123 - DNA, 203 bp, Artificial sequence
  synthetic
ggcgcgccagtcctccgcgagcggatcctaggcatagtgtctaacactttcactgagcaactctattctagatcaaaatcaccagaacttctggcatggcacacgagttccttcaataaagctttagatggactcagtccttaaggagaggtttgagccaattcactcagactgtcaagtcagatgttcgactcggaccgatg

SEQ ID NO: 13124 - DNA, 203 bp, Artificial sequence
  synthetic
ggcgcgccagtcctgtagaggcggatcctaggcatagtgtctaacactttcactgagcaactctattctagatcaaaatcaccagaacttctggcatggcacactccaaggaggttccaagctttagatggactcagtccttaaggagaggtttgagccaattcactcagactgtcaagtcagatgttcgactcggaccgatg

SEQ ID NO: 13125 - DNA, 203 bp, Artificial sequence
  synthetic
ggcgcgccagtcctgctattggggatcctaggcatagtgtctaacactttcactgagcaactctattctagatcaaaatcaccagaacttctggcatggcacactccaaggaggttccaagctttagatggactcagtccttaaggtctccaccaccgtgattcactcagactgtcaagtcagatgttcgactcggaccgatg

SEQ ID NO: 13126 - DNA, 203 bp, Artificial sequence
  synthetic
ggcgcgccagtcctcttggtacggatcctaggcattaaggctatcttatttaattgtctttaattgcctcttgtgtcttctgtgcccctacgggaccctatcccgcgtaagcaatagactctagcagaccacatgttctgagggttctgaacatcatacctgcagctaaacatggaggaagacatagccgactcggaccgatg

SEQ ID NO: 13127 - DNA, 203 bp, Artificial sequence
  synthetic
ggcgcgccagtcctccgcaggtggatcctaggcattaaggctatcttatttaattgtctttataacgtcgcatcagcttctgtgcccctacgggaccctatcccatagcgaactgttgctctagcagaccacatgttctgagggttctgaacatcatacctgcagctaaacatggaggaagacatagccgactcggaccgatg

SEQ ID NO: 13128 - DNA, 203 bp, Artificial sequence
  synthetic
ggcgcgccagtcctatatctaaggatcctaggccgtcgttaagtttggatgtgctgtggtgaaggcgtgtaaaacgacggccagtgcgcacagtggatcctaggcgacacttggccatactctttagcacataagagttgaaagggcttattagaaagcacattcctgagaggtgcgagtttggacatcgactcggaccgatg

SEQ ID NO: 13129 - DNA, 203 bp, Artificial sequence
  synthetic
ggcgcgccagtccttacaggcaggatcctaggccgtcgttaagtttggatgtgctgtggtgaaggcgtgtaaaacgacggccagtgcgcacagtggatcctaggcgacacttggccatggatgaatatgtccaagagttgaaagggcttattagaaagcaatcgaaaagctatagcgagtttggacatcgactcggaccgatg

SEQ ID NO: 13130 - DNA, 203 bp, Artificial sequence
  synthetic
ggcgcgccagtcctttactgtcggatcctaggcgaaatttgacaatggatgaaaaagtctttgttttgaaagattttatcagaagacaagtgcctgacatacctgaactgtcttatcagaaggaggcattactttctcaagtcgaagtaccaatggtcttaacagagggcttcaagctcctatcatgccgactcggaccgatg

SEQ ID NO: 13131 - DNA, 203 bp, Artificial sequence
  synthetic
ggcgcgccagtcctattcagggggatcctaggcgaaatttgacaatggatgaaaaagtctttgttttgaaagattttatcagaagacaagtgcctgacatacctgaactgtcttatcagaaggaggcattactttctcaagtcgaatgcttgtactagaaaacagagggcttcaagctcctatcatgccgactcggaccgatg

SEQ ID NO: 13132 - DNA, 203 bp, Artificial sequence
  synthetic
ggcgcgccagtcctctgctgaaggatcctaggctattggattgcgctttgcttttgtcatttcctacctgttcgcaagttctttgttgtgtgcatacaacacaacaatctggcgatgagtgcctcaaaggaaataaaatcctttttgtggacacaatctttgaggagggaattatctggttactgctccgactcggaccgatg

SEQ ID NO: 13133 - DNA, 203 bp, Artificial sequence
  synthetic
ggcgcgccagtccttcgcttcgggatcctaggctattggattgcgctttgcttttgtcattttggcagatagtctcagttctttgttgtgtgcatacaacacaacaatctggcgatgagtgcctcaaaggaagagtggcatggagggtggacacaatctttgaggagggaattatctggttactgctccgactcggaccgatg

SEQ ID NO: 13134 - DNA, 203 bp, Artificial sequence
  synthetic
ggcgcgccagtcctggaaagtgggatcctaggctattggattgcgctttgcttttgtcattttggcagatagtctcttggtgcacggtgatgcatacaacacaacaatctggcgatgagtgcctcaaaggaaataaaatcctttttgtggacacaatctttgaggagggaattatctggttactgctccgactcggaccgatg

SEQ ID NO: 13135 - DNA, 203 bp, Artificial sequence
  synthetic
ggcgcgccagtcctgatcgccgggatggcgataggacagctataggctctgcagggccccaggcagctggggtattccttaggggctgagtctcctggtatccctaagactgggcttggcttaggcactgagattccttctggaaccccaacgccttcgagacggattccgacctgccggctggatggcgactcggaccgatg

SEQ ID NO: 13136 - DNA, 203 bp, Artificial sequence
  synthetic
ggcgcgccagtcctctttattgggatttggctccatggcttagggcaacatatctatgaaacttatggggatacttgggcaggagtggaagccataataagaattctgcaacaactgctgtttatccattttcagaattgggtgtcacgggtaatagtggggcgttactcgacagaggagagcaagaacgactcggaccgatg

SEQ ID NO: 13137 - DNA, 203 bp, Artificial sequence
  synthetic
ggcgcgccagtccttaatccagggatttggctccatggcttagggcaacatatctatgaaacttatggggatactttatgccaccgaaccgccataataagaattctgcaacaactgctgtttatccattttcagaattgggtgtcgacatagcagaataggcgttactcgacagaggagagcaagaacgactcggaccgatg

SEQ ID NO: 13138 - DNA, 203 bp, Artificial sequence
  synthetic
ggcgcgccagtccttttcgtccggcaagggggcgaccgatcttataacaagctcggcgttccagagagtggggagggggcaagtgtcagtcaggacgggagtccggcgggttacagcggaggcctaggtggcagacagggggcccgggccgctgcgtgttgtccacccaagatggagttcctcctgggcgactcggaccgatg

SEQ ID NO: 13139 - DNA, 203 bp, Artificial sequence
  synthetic
ggcgcgccagtcctacgccgacggcaagggggcggggccaaaggccctaagctcggcgttccagagagtggggagggggcaagtgtcagtcaggacgggagtccccacccgccggtgcgaggcctaggtggcagacagggggcccgggccgctgcgtgttgtccacccaagatggagttcctcctgggcgactcggaccgatg

SEQ ID NO: 13140 - DNA, 203 bp, Artificial sequence
  synthetic
ggcgcgccagtcctaatgtagaggcaagggggcggggccaaaggccctaagctcggcgttccagagagtggggagggggcaagtgtcagtcaggacgggagtccggcgggttacagcggaggcctaggtggcagacagggggcccgggccgctgcgtgttgtccacccaagatggagttcctcctgggcgactcggaccgatg

SEQ ID NO: 13141 - DNA, 203 bp, Artificial sequence
  synthetic
ggcgcgccagtcctcctcgcaaggcaagggggcggggccaaaggccctaagctcggcgttccagagagtggggagggggcaagtgtcagtcaggacgggagtccggcgggttacagcggaggcctaggtggcgatgtaactctgaaggccgctgcgtgttgtccacccaagatggagttcctcctgggcgactcggaccgatg

SEQ ID NO: 13142 - DNA, 203 bp, Artificial sequence
  synthetic
ggcgcgccagtccttgtgtgggggcaagggggcggggccaaaggccctcgtacttagccataagagagtggggagggggcaagtgtcagtcaggacgggagtccggcgggttacagcggaggcctaggtggcagacagggggcccgggccgctgcgtgttgtccacccaagatggagttcctcctgggcgactcggaccgatg

SEQ ID NO: 13143 - DNA, 203 bp, Artificial sequence
  synthetic
ggcgcgccagtcctagaggagaggcaataacatatatatgtcaaccctgctcattggtttaaggacctcacggagctgttgtgtgatcttgcgcgataaatgctgacgtgaaaacgttgcgtattgctacaacacttggttagctatttagctttactaatcaagacgccgtcgtgcagcccacaaaacgactcggaccgatg

SEQ ID NO: 13144 - DNA, 203 bp, Artificial sequence
  synthetic
ggcgcgccagtcctcgagtaacggcaataacatatatatgtcaaccctgctcattggtttaattgagcgcatttagtgttgtgtgatcttgcgcgataaatgctgacgtgaaaacgttgcgtattgctacaacacttggttagctatttagctttactaatcaagacgccgtcgatgcagaacaggtgcgactcggaccgatg

SEQ ID NO: 13145 - DNA, 203 bp, Artificial sequence
  synthetic
ggcgcgccagtcctgtcaaatgggcaataacatatatatgtcaaccctgctcattggtttaattgagcgcatttagtgttgtgtgatcttgcgcgataaatgctgacgtgaaaacgttgcgtattgctacaacacttggttagctatttagctttactaatcaagacgccgtcgtgcagcccacaaaacgactcggaccgatg

SEQ ID NO: 13146 - DNA, 203 bp, Artificial sequence
  synthetic
ggcgcgccagtcctgacctgaaggcacttgcaccgtgtggacagactcagaacgagataaataatccagtccctgttactccattttggccagaaattcaagacatttcaggtggcagaataaattcaatccttgtttctccatcttatcgagtagtagaagttagttacattctctttgaactcatccgactcggaccgatg

SEQ ID NO: 13147 - DNA, 203 bp, Artificial sequence
  synthetic
ggcgcgccagtcctgcgcaacgggcacttgcaccgtgtggacagactctccggttctggggaaatccagtccctgtgctatgtgcactcgcagaaattcaagacatttcaggtggcagaataaattcaatccttgtttctccatcttatcgagtagtagaagttagttacattctctttgaactcatccgactcggaccgatg

SEQ ID NO: 13148 - DNA, 203 bp, Artificial sequence
  synthetic
ggcgcgccagtcctaaggcatgggcacttgcaccgtgtggacagactctccggttctggggaaatccagtccctgttactccattttggcatagttgctggcttatttcaggtggcagaataaattcaatccttgtttctccatcttatcgagtagtagaagttagttacattctctttgaactcatccgactcggaccgatg

SEQ ID NO: 13149 - DNA, 203 bp, Artificial sequence
  synthetic
ggcgcgccagtcctgtggcttaggcacttgcaccgtgtggacagactctccggttctggggaaatccagtccctgttactccattttggccagaaattcaagacatttcaggtggcagaataaattcaatccttgtttctccatcttatcgagtagtagaagttagttacattctctttgaactcatccgactcggaccgatg

SEQ ID NO: 13150 - DNA, 203 bp, Artificial sequence
  synthetic
ggcgcgccagtcctcgcaaagcggcaggcgatccggggctcgcctccgtagatagggggcgccgcaggcgcgagctggccgcctcacacggagtcggcttgttaagtgcgcacgcgcgggagtttctggcagaaagcaggcgagcctgggccggcgcggggccttgtgggagggcttaaggaagtaaacgactcggaccgatg

SEQ ID NO: 13151 - DNA, 203 bp, Artificial sequence
  synthetic
ggcgcgccagtccttccttcagggcagtccatggaagccccatagaaacgaggcgtcacgtgccgaaaatccctttgcgtttcacagaaccatcctaaccatgggtgtagtatgggaatcgtgtatggggatgattaggatctctcgtagagggataggtgtgccattcaaatccagggagtactctgcgactcggaccgatg

SEQ ID NO: 13152 - DNA, 203 bp, Artificial sequence
  synthetic
ggcgcgccagtcctcctcaaacggccaaatacagaattttggatctccccccccccacccccctttggatcttgtcgggctttccacgtttcacttaaaaaaaattcttgtaacgtccaaggcaagctccccacgacccgaacacgcccagaggaaccttggggcctctggggacttggctagcaggtcgactcggaccgatg

SEQ ID NO: 13153 - DNA, 203 bp, Artificial sequence
  synthetic
ggcgcgccagtcctgtagaactggccaaccagaccctgggtggtgactttttcctgttgggaatcttcagccagatctcacaccctggccgcctctgcttgcttatcttcagtatatttttgatggctgtgtcttggaatattacaggccgctaataaccccacattgactcctctctgcatactccccgactcggaccgatg

SEQ ID NO: 13154 - DNA, 203 bp, Artificial sequence
  synthetic
ggcgcgccagtccttgaggcctggccaaccagaccctgggtggtgactttttcctgttgggaatcttcagccagatctcacaccctggccgcctctgcttgctttgggaagagcataatttgatggctgtgtcttggaatattacattgatacttctgatccacattgactcctctctgcatactccccgactcggaccgatg

SEQ ID NO: 13155 - DNA, 203 bp, Artificial sequence
  synthetic
ggcgcgccagtcctgccgcgggggccacgaatcatttgccatctcctccgtaccctcgaagcaatgtatggccctggtagtcagctgggaaagtctggcaataacagctgggctaaggaacgtggatgctcaattgcctgccaagggtctcttacttcagcccggctacatgcccccagcattggagacgactcggaccgatg

SEQ ID NO: 13156 - DNA, 203 bp, Artificial sequence
  synthetic
ggcgcgccagtcctagatcgggggccacgaatcatttgccatctcctctaccaaagactcaaaatgtatggccctgcactcagcgccctcaagtctggcaataacagctgggctaaggaacgtggatgctcaattgcctgccaagggtctcttacttcagcccggctacatgcccccagcattggagacgactcggaccgatg

SEQ ID NO: 13157 - DNA, 203 bp, Artificial sequence
  synthetic
ggcgcgccagtcctagttagcgggccacgaatcatttgccatctcctctaccaaagactcaaaatgtatggccctggtagtcagctgggaaagtctggcaataacagctgggctaaggaacgtggatgctcaattgcctgccaaggacggggactacacacccggctacatgcccccagcattggagacgactcggaccgatg

SEQ ID NO: 13158 - DNA, 203 bp, Artificial sequence
  synthetic
ggcgcgccagtccttcacccgcggccacgaatcatttgccatctcctctaccaaagactcaaaatgtatggccctggtagtcagctgggaaagtctggcaataacagctgggctaaggaacgtggatgctcagcgcgacagagtcagtctcttacttcagcccggctacatgcccccagcattggagacgactcggaccgatg

SEQ ID NO: 13159 - DNA, 203 bp, Artificial sequence
  synthetic
ggcgcgccagtcctcataaataggccacgaatcatttgccatctcctctaccaaagactcaaaatgtatggccctggtagtcagctgggaaagtctggcaataacagctgggctaagggctaaattcagagtattgcctgccaagggtctcttacttcagcccggctacatgcccccagcattggagacgactcggaccgatg

SEQ ID NO: 13160 - DNA, 203 bp, Artificial sequence
  synthetic
ggcgcgccagtcctacgcgcctggccacgaatcatttgccatctcctctaccaaagactcaagggtctgtcggacagtagtcagctgggaaagtctggcaataacagctgggctaaggaacgtggatgctcaattgcctgccaagggtctcttacttcagcccggctacatgcccccagcattggagacgactcggaccgatg

SEQ ID NO: 13161 - DNA, 203 bp, Artificial sequence
  synthetic
ggcgcgccagtcctagagtttaggccatcgctagcggcttgatccgccagaagcggcaggcgcgggagcagcactgggaccggccgtctgccagcaggaggcggagcagccccagcaagaaccgcgggctctgcaacggcaacctggtggatatcttctccaaagtgcgcatcttcggcctcaagaagcgactcggaccgatg

SEQ ID NO: 13162 - DNA, 203 bp, Artificial sequence
  synthetic
ggcgcgccagtcctaatacccgggccatcgctagcggcttgatccgccagaagcggcaggcgcgggagcagcactgggaccggccgtctgccagcaggaggcggagcagccccagcaagaaccgcgggctcttatcttctgcggccgtggatatcttctccaaagtgcgcatcttcggcctcaagaagcgactcggaccgatg

SEQ ID NO: 13163 - DNA, 203 bp, Artificial sequence
  synthetic
ggcgcgccagtccttgaaaccaggccatcgctagcggcttgatccgccagaagcggcaggcgcgggagcagcactgggaccggccgtctgccagcaggaggcggcagtttttggtttcgaaccgcgggctctgcaacggcaacctggtggatatcttctccaaagtgcgcatcttcggcctcaagaagcgactcggaccgatg

SEQ ID NO: 13164 - DNA, 203 bp, Artificial sequence
  synthetic
ggcgcgccagtcctgcagcctgggccatcgctagcggcttgatccgccagaagcggcaggcgcgggagcagcactgggaccggccgtctgtttagtcatcattcagcagccccagcaagaaccgcgggctctgcaacggcaacctggtggatatcttctccaaagtgcgcatcttcggcctcaagaagcgactcggaccgatg

SEQ ID NO: 13165 - DNA, 203 bp, Artificial sequence
  synthetic
ggcgcgccagtccttgttatggggccatcgctagcggcttgatccgccagaagcggcaggcgtcatctacttctaaggaccggccgtctgccagcaggaggcggagcagccccagcaagaaccgcgggctctgcaacggcaacctggtggatatcttctccaaagtgcgcatcttcggcctcaagaagcgactcggaccgatg

SEQ ID NO: 13166 - DNA, 203 bp, Artificial sequence
  synthetic
ggcgcgccagtcctgtgatctcggccatcgctagcggcttgatccgccttggtaattgcatacgggagcagcactgggaccggccgtctgccagcaggaggcggagcagccccagcaagaaccgcgggctctgcaacggcaacctggtggatatcttctccaaagtgcgcatcttcggcctcaagaagcgactcggaccgatg

SEQ ID NO: 13167 - DNA, 203 bp, Artificial sequence
  synthetic
ggcgcgccagtccttcctggctggccatgtcttaggacctgctgtccgacttacaggacatcagcgacagcgagaggaagaccagctcggccgagtcctcgtcagcagaatcaggctcaggttctgaggaagaagaggaggaggaggaagaggaggaggaggaagggagcaccagtgaagaatcagagcgactcggaccgatg

SEQ ID NO: 13168 - DNA, 203 bp, Artificial sequence
  synthetic
ggcgcgccagtccttttagacgggcccatcagttccaccccttgtagtgcatcactactgctattgagcaggctgctctagcagcggccaactctgcccttgcgaatgctgtggtagttaggccttttctctctcaccagcagattgagatccttattaacctaatgcaacctcgccagcttgttttccgactcggaccgatg

SEQ ID NO: 13169 - DNA, 203 bp, Artificial sequence
  synthetic
ggcgcgccagtccttgacgggcggcccatcagtttattaaggctcctggcatcactactgctattgagcaggctgccggcaacctttgggactctgcccttgcgaatgctgtggtagttaggccttttctctctcaccagcagattgagatccttattaacctaatgcaacctcgccagcttgttttccgactcggaccgatg

SEQ ID NO: 13170 - DNA, 203 bp, Artificial sequence
  synthetic
ggcgcgccagtcctgcgtgtaaggcccatcagtttattaaggctcctggcatcactactgctattgagcaggctgctctagcagcggccaactctgcccttgcgaatgctgtggtagtatccagcaaatatcctcaccagcagattgagatccttattaacctaatgcaacctcgccagcttgttttccgactcggaccgatg

SEQ ID NO: 13171 - DNA, 203 bp, Artificial sequence
  synthetic
ggcgcgccagtccttcagaagaggcccatcagtttattaaggctcctggcatcactactgctattgagcaggctgctctagcagcggccaactctgcccttgcgaatgctgtggtagttaggccttttctctctcaccagcagattttcgatggagaatgcctaatgcaacctcgccagcttgttttccgactcggaccgatg

SEQ ID NO: 13172 - DNA, 203 bp, Artificial sequence
  synthetic
ggcgcgccagtcctatcttagcggcccatcagtttattaaggctcctggcatcactactgctattgagcaggctgctctagcagcggccaactctgcccttgcgaatgctgtggtagttaggccttttctcttaactgcatgctcggagatccttattaacctaatgcaacctcgccagcttgttttccgactcggaccgatg

SEQ ID NO: 13173 - DNA, 203 bp, Artificial sequence
  synthetic
ggcgcgccagtcctgcaaggttggcccatcagtttattaaggctcctggcatcactactgcttccctcgttcgatgtctagcagcggccaactctgcccttgcgaatgctgtggtagttaggccttttctctctcaccagcagattgagatccttattaacctaatgcaacctcgccagcttgttttccgactcggaccgatg

SEQ ID NO: 13174 - DNA, 203 bp, Artificial sequence
  synthetic
ggcgcgccagtccttctaacgaggccccacagccaagatcacacttgtacaactgagttgtaagacgttcatcgccgtgttatccttgagtaaagaatgaactctggaagcccagccagggacaatgcaccttcacagagattctgcactaatctgagtgaaggtctaaggtttggaatctccccctccgactcggaccgatg

SEQ ID NO: 13175 - DNA, 203 bp, Artificial sequence
  synthetic
ggcgcgccagtcctacagatagggccccacagcccctgctgactcaaaacaactgagttgtaagacgttcatcgccgtgttatccttgagtaaagaatgaactctggaagcccagccagggacaatgcaccttcacagagattctgcactaatctgagtgaaggtctaaggtttggaatctccccctccgactcggaccgatg

SEQ ID NO: 13176 - DNA, 203 bp, Artificial sequence
  synthetic
ggcgcgccagtcctgctctataggccccacagcccctgctgactcaaaacaactgagttgtaagacgttcatcgccgtgttatccttgagtaaagaatgaactctggaagcccagccagggacaatgcaccttcacagagattctgcactaatctgagtgaaggtctaaggtttttgtcggaatttcacgactcggaccgatg

SEQ ID NO: 13177 - DNA, 203 bp, Artificial sequence
  synthetic
ggcgcgccagtcctggcggtgtggccccacagcccctgctgactcaaaacaactgagttgtaagacgttcatcgccgtgttatccttgagtaaagaatgaactctggaagcccagccagggacaatgcaccttcacagagattctgcactaatctgagtgcttaaaagcctaggggaatctccccctccgactcggaccgatg

SEQ ID NO: 13178 - DNA, 203 bp, Artificial sequence
  synthetic
ggcgcgccagtccttgtgaacaggccccagggtgtgcagccactgactacctcgtcttcctcggggtagggatgagggagggaggggcattgtgatgtacagggctgctctgtgagatcaagggtctcttaagggtgggagctggggcagggactacgagagcagccagatgggctgaaagtggaactcgactcggaccgatg

SEQ ID NO: 13179 - DNA, 203 bp, Artificial sequence
  synthetic
ggcgcgccagtccttcttacttggccccagggtgtgcagccactgacttggggactgctggtggggtagggatgagggagggaggggcattgtgatgtacagggagtaggccgtcttccaagggtctcttaagggtgggagctggggcagggactacgagagcagccagatgggctgaaagtggaactcgactcggaccgatg

SEQ ID NO: 13180 - DNA, 203 bp, Artificial sequence
  synthetic
ggcgcgccagtccttcggatacggccccagggtgtgcagccactgacttggggactgctggtggggtagggatgagggagggaggggcattgtgatgtacagggctgctctgtgagatcaagggtctcttaagggtgggagctggggcagggactacgagagcagccagatggggaatcgcccagctgcgactcggaccgatg

SEQ ID NO: 13181 - DNA, 203 bp, Artificial sequence
  synthetic
ggcgcgccagtcctgcgttaccggccccagggtgtgcagccactgacttggggactgctggtggggtagggatgagggagggaggggcattgtgatgtacagggctgctctgtgagatcaagggtctcttaataccaactcgcttcgcagggactacgagagcagccagatgggctgaaagtggaactcgactcggaccgatg

SEQ ID NO: 13182 - DNA, 203 bp, Artificial sequence
  synthetic
ggcgcgccagtcctgcctggtcggccccctttccacgcagaagagagagctacagatcgtctgctccctcagcctcgcccgagacccacttccccagtctcgcccgggtggaggtcgacgaggaggagacaagagtcacccttcctccaggcggcgccggccccctcacccgcgggtgtgtcctataacgactcggaccgatg

SEQ ID NO: 13183 - DNA, 203 bp, Artificial sequence
  synthetic
ggcgcgccagtcctaagtctgaggccccctttccttaacagtctcctcgctacagatcgtcactaaattcagcctcgcccgagacccacttccccagtctcgcccgggtggaggtcgacgaggaggagacaagagtcacccttcctccaggcggcgccggccccctcattatacctggtgtcctataacgactcggaccgatg

SEQ ID NO: 13184 - DNA, 203 bp, Artificial sequence
  synthetic
ggcgcgccagtcctctcagagaggccccctttccttaacagtctcctcgctacagatcgtctgctccctcagcctcaagatcctttaggatccccagtctcgcccgggtggaggtcgacgaggaggagacaagagtcacccttcctccaggcggcgccggccccctcacccgcgggtgtgtcctataacgactcggaccgatg

SEQ ID NO: 13185 - DNA, 203 bp, Artificial sequence
  synthetic
ggcgcgccagtcctagtctacaggccccctttccttaacagtctcctcgctacagatcgtctgctccctcagcctcgcccgagacccactgattacccggacatcgggtggaggtcgacgaggaggagacaagagtcacccttcctccaggcggcgccggccccctcacccgcgggtgtgtcctataacgactcggaccgatg

SEQ ID NO: 13186 - DNA, 203 bp, Artificial sequence
  synthetic
ggcgcgccagtcctactgccctggccccctttccttaacagtctcctcgctacagatcgtctgctccctcagcctcgcccgagacccacttccccagtctcgccatctatagaaaaaccgaggaggagacaagagtcacccttcctccaggcggcgccggccccctcacccgcgggtgtgtcctataacgactcggaccgatg

SEQ ID NO: 13187 - DNA, 203 bp, Artificial sequence
  synthetic
ggcgcgccagtcctagcagcttggccccctttccttaacagtctcctcgctacagatcgtctgctccctcagcctcgcccgagacccacttccccagtctcgcccgggtggaggtcgacgaggaggagacaagagtcacccttcctccaggcggcgccggccccctcacccgcgacgcgtcaaatattcgactcggaccgatg

SEQ ID NO: 13188 - DNA, 203 bp, Artificial sequence
  synthetic
ggcgcgccagtcctataaagttggccccctttccttaacagtctcctcgctacagatcgtctgctccctcagcctcgcccgagacccacttccccagtctcgcccgggtggaggtcgacgaggaggagacaagagtcacccttcctccaggcggcgccggccccctcacccgcgggtgtgtcctataacgactcggaccgatg

SEQ ID NO: 13189 - DNA, 203 bp, Artificial sequence
  synthetic
ggcgcgccagtcctcacgtagcggccccctttccttaacagtctcctcgctacagatcgtctgctccctcagcctcgcccgagacccacttccccagtctcgcccgggtggaggtcgacgaggaggagacaagagtcacccttcctttctatatgtaaatccccctcacccgcgggtgtgtcctataacgactcggaccgatg

SEQ ID NO: 13190 - DNA, 203 bp, Artificial sequence
  synthetic
ggcgcgccagtcctgaccactcggccccctttccttaacagtctcctcgctacagatcgtctgctccctcagcctcgcccgagacccacttccccagtctcgcccgggtggaggtcgagttctccccaggtcgagtcacccttcctccaggcggcgccggccccctcacccgcgggtgtgtcctataacgactcggaccgatg

SEQ ID NO: 13191 - DNA, 203 bp, Artificial sequence
  synthetic
ggcgcgccagtcctgtcattctggccccctttccttaacagtctcctcgctacagatcgtcttagtatgagaataagcccgagacccacttccccagtctcgcccgggtggaggtcgacgaggaggagacaagagtcacccttcctccaggcggcgccggccccctcacccgcgggtgtgtcctataacgactcggaccgatg

SEQ ID NO: 13192 - DNA, 203 bp, Artificial sequence
  synthetic
ggcgcgccagtcctctgcaataggccccctttccttaacagtctcctctggcatttcgcggagctccctcagcctcgcccgagacccacttccccagtctcgcccgggtggaggtcgacgaggaggagacaagagtcacccttcctccaggcggcgccggccccctcacccgcgggtgtgtcctataacgactcggaccgatg

SEQ ID NO: 13193 - DNA, 203 bp, Artificial sequence
  synthetic
ggcgcgccagtcctttcatcgcggccgccatgagttccaccttccagcttactggcttcccaggcatggagaaggcacatcactggatattcatcccattattggcagcctacatctccatacttcttggcaatggcactcttctctttctcatcaggaatgatcataacctccatgagcccatgtaccgactcggaccgatg

SEQ ID NO: 13194 - DNA, 203 bp, Artificial sequence
  synthetic
ggcgcgccagtcctaggtaactggccgctccgggcgccttctccctgccccgccgcgtctcgcctgcgcgggctccaagcgcagccttaaacttggaacttgtgtgaatcagcgccccgatcccgagagggctcttccttcggccccatcactcccacaatggaagggcggccgcctccggaaggccgcgactcggaccgatg

SEQ ID NO: 13195 - DNA, 203 bp, Artificial sequence
  synthetic
ggcgcgccagtcctgcattgtaggccgctccgggcgccttctccctgccccgccgcgtctcgcctgcgcgggctccaagcgcagccttaacaggctccgaaacttgaatcagcgccccacattgcgtccacatcttccttcggccccatcactcccacaatggaagggcggccgcctccggaaggccgcgactcggaccgatg

SEQ ID NO: 13196 - DNA, 203 bp, Artificial sequence
  synthetic
ggcgcgccagtcctacaagcgcggccgctccgggcgccttctccctgccccgccgcgtctcgcctgcgcgggctccaagcgcagccttaacaggctccgaaacttgaatcagcgccccgatcccgagagggctcttccttcggccccattcacgttacaatggaagggcggccgcctccggaaggccgcgactcggaccgatg

SEQ ID NO: 13197 - DNA, 203 bp, Artificial sequence
  synthetic
ggcgcgccagtcctcttactagggccggaacccttgagaccagaggctcttagcctattgagctaggagggccaggaactgctgacgtgaccactggacagttattcgtgtctcttacaattaccaaacagaatggacaagcttaataaaataaccgtccccgccagtcagaagttgaggcagcttcacgactcggaccgatg

SEQ ID NO: 13198 - DNA, 203 bp, Artificial sequence
  synthetic
ggcgcgccagtcctagttcctcggccggaacccttgagaccagaggcttaccatgctgctccctaggagggccaggaactgctgacgtgaaactaaagtgtggcttcgtgtctcttacaattaccaaacagaatggacaagcttaataaaataaccgtccccgccagtcagaagttgaggcagcttcacgactcggaccgatg

SEQ ID NO: 13199 - DNA, 203 bp, Artificial sequence
  synthetic
ggcgcgccagtcctcctggacaggccggaacccttgagaccagaggcttaccatgctgctccctaggagggccaggaactgctgacgtgaccactggacagttaagatcacaatgagaaattaccaaacagaatggacaagcttaataaaataaccgtccccgccagtcagaagttgaggcagcttcacgactcggaccgatg

SEQ ID NO: 13200 - DNA, 203 bp, Artificial sequence
  synthetic
ggcgcgccagtcctagattcgtggccggaacccttgagaccagaggcttaccatgctgctccctaggagggccaggaactgctgacgtgaccactggacagttattcgtgtctcttacaattaccaaacagaatggacaagcttaagtggcctgataataccgccagtcagaagttgaggcagcttcacgactcggaccgatg

SEQ ID NO: 13201 - DNA, 203 bp, Artificial sequence
  synthetic
ggcgcgccagtcctcataagcgggccggaacccttgagaccagaggcttaccatgctgctccctaggagggccaggaactgctgacgtgaccactggacagttattcgtgtctcttacaattaccaaacagaatggacaagcttaataaaataaccgtcctgttttcaagagtcttgaggcagcttcacgactcggaccgatg

SEQ ID NO: 13202 - DNA, 203 bp, Artificial sequence
  synthetic
ggcgcgccagtcctcaggtacaggccggaacccttgagaccagaggcttaccatgctgctccctaggagggccaggaactgctgacgtgaccactggacagttattcgtgtctcttacaattaccaaacagacattgatttaaatttaaaataaccgtccccgccagtcagaagttgaggcagcttcacgactcggaccgatg

SEQ ID NO: 13203 - DNA, 203 bp, Artificial sequence
  synthetic
ggcgcgccagtcctctatacaaggccggaacccttgagaccagaggcttaccatgctgctccctaggagggccaggcgtcaaaacaagctccactggacagttattcgtgtctcttacaattaccaaacagaatggacaagcttaataaaataaccgtccccgccagtcagaagttgaggcagcttcacgactcggaccgatg

SEQ ID NO: 13204 - DNA, 203 bp, Artificial sequence
  synthetic
ggcgcgccagtcctaacgcggcggccggcgggcgcttacgtttacagagagaggcgcggggagccaggcctcggggcctcggagcaaccacccgagcagacggagtacacggagcagcggccccggccccgccaacgctgccgccggctactccctcttgatgccctcccctttgcccctcactcaggcgactcggaccgatg

SEQ ID NO: 13205 - DNA, 203 bp, Artificial sequence
  synthetic
ggcgcgccagtccttcgatcgtggccggcgggcgggcggaagagggagagaccaaattataggccaggcctcggggcctcggagcaaccacccgagcagacggagtacacggagcagcggccccggccccgccaacgctgccgccggctactccctcttgatgccctcccctttgcccctcactcaggcgactcggaccgatg

SEQ ID NO: 13206 - DNA, 203 bp, Artificial sequence
  synthetic
ggcgcgccagtcctgatccagaggccggcgggcgggcggaagagggaggagaggcgcggggacgggtcgtagattacctcggagcaaccacccgagcagacggagtacacggagcagcggccccggccccgccaacgctgccgccggctactccctcttgatgccctcccctttgcccctcactcaggcgactcggaccgatg

SEQ ID NO: 13207 - DNA, 203 bp, Artificial sequence
  synthetic
ggcgcgccagtcctcccatttgggccggcgggcgggcggaagagggaggagaggcgcggggagccaggcctcggggcctcggagcaaccacccgagcagacggagtacacggagcagcccagagcctatgcacaacgctgccgccggctactccctcttgatgccctcccctttgcccctcactcaggcgactcggaccgatg

SEQ ID NO: 13208 - DNA, 203 bp, Artificial sequence
  synthetic
ggcgcgccagtcctaatctttaggccggcgggcgggcggaagagggaggagaggcgcggggagccaggcctcggggcctcggagcaaccacccgagcagacggagtacacggagcagcggccccggccccgccaacgctgccgccggcctgaatttcttgatgccctcccctttgcccctcactcaggcgactcggaccgatg

SEQ ID NO: 13209 - DNA, 203 bp, Artificial sequence
  synthetic
ggcgcgccagtcctgggccggcggccggcgggcgggcggaagagggaggagaggcgcggggagccaggcctcggggcctcggagcaaccacccgagcagacggagtacacggagcagcggccccggccccgccaacgctgccgccggctactccctcttgatgccctcccctttgcccctcactcaggcgactcggaccgatg

SEQ ID NO: 13210 - DNA, 203 bp, Artificial sequence
  synthetic
ggcgcgccagtccttttacgacggccggcgggcgggcggaagagggaggagaggcgcggggagccaggcctcggggcctcggagcaaccatgatctgctctttggtacacggagcagcggccccggccccgccaacgctgccgccggctactccctcttgatgccctcccctttgcccctcactcaggcgactcggaccgatg

SEQ ID NO: 13211 - DNA, 203 bp, Artificial sequence
  synthetic
ggcgcgccagtcctgtcgtcaaggcctgctgatgttatggtgacaattgagagattgttaccatatagctattggattggccatccggtgaccaatagagctattatatatctctttgttgggtttataccacttagcttgaaagaggttaaaacattacaattcattgttaagttgaatacagcaaacgactcggaccgatg

SEQ ID NO: 13212 - DNA, 203 bp, Artificial sequence
  synthetic
ggcgcgccagtccttacataacggcgagagcgtatggagccgagccgttagcgcgcgccgtcggtgagtcagtccgtccgtccgtccgtccgtcggggcgccgcagctcccgccaggcccagcggccccggcccctcgtctccccgcacccggagccaccaccattcttctaagttgccgcggcagcccgactcggaccgatg

SEQ ID NO: 13213 - DNA, 203 bp, Artificial sequence
  synthetic
ggcgcgccagtccttcagtgccggcgagagcgtatggagccgagccgttagcgcgcgccgtcggtgagtcagtccgtccgtccgtccgtccgtcggggcgccgcagctcccgccaggcccagcggccccggcccctcgtctccccgcacccggagccacccggtggagcgggccagaatatcaagtaacgactcggaccgatg

SEQ ID NO: 13214 - DNA, 203 bp, Artificial sequence
  synthetic
ggcgcgccagtcctccgccatgggcgagagcgtatggagccgagccgttagcgcgcgccgtcggtgagtcagtccgtccgtccgtccgtccgtcggggcgccgcagctcccgccaggcccagcggccccggctgtcatctctaggacacccggagccacccggtggagcgggccttgccgcggcagcccgactcggaccgatg

SEQ ID NO: 13215 - DNA, 203 bp, Artificial sequence
  synthetic
ggcgcgccagtcctatggctccggcgcggccggagagtataattcactgcgacggcgggccgcgcggcgcatttccgcctctggcgaatggctcgtctgtagtgcacgccgcgggcccagctgcgaccccggccccgcccccgggaccccggccatggacgaactgttccccctcatcttcccggcagcgactcggaccgatg

SEQ ID NO: 13216 - DNA, 203 bp, Artificial sequence
  synthetic
ggcgcgccagtcctcatatcttggcgcggccggattccgggcagtgactgacttaatccttacgcggcgcatttccgcctctggcgaatggctcgtctgtagtgcacgccgcgggcccagctgcgaccccggccccgcccccgggaccccggccatggacgaactgttccccctcatcttcccggcagcgactcggaccgatg

SEQ ID NO: 13217 - DNA, 203 bp, Artificial sequence
  synthetic
ggcgcgccagtccttttgaaatggcgctggcacctcctcttacagcttgctgatcgccagcttgggaaaaggccggagaaggtgaaattctgtggagcggttccggcgagagactttgtcagctcccgcacagtaacgtggaagtccaagaatccgagtggaggctcaccgaggcgaaggggccaacccgactcggaccgatg

SEQ ID NO: 13218 - DNA, 203 bp, Artificial sequence
  synthetic
ggcgcgccagtcctccggctgaggcgctggcacctcctcttacagcttgctgatcgccagcttgggaaaaggccggagaaggtgaaattctgtgtgctccctccggcgagagactttgtcagctcccgcacagtaacgtggaagtccaagaatccgagtggaggctcaccgaggcgaaggggccaacccgactcggaccgatg

SEQ ID NO: 13219 - DNA, 203 bp, Artificial sequence
  synthetic
ggcgcgccagtcctaatattctggcgctggcacctcctcttacagctttactcctgccagcttgggaaaaggccggagaaggtgaaattctgtgtgctccctcccttttctagaaaaatcagctcccgcacagtaacgtggaagtccaagaatccgagtggaggctcaccgaggcgaaggggccaacccgactcggaccgatg

SEQ ID NO: 13220 - DNA, 203 bp, Artificial sequence
  synthetic
ggcgcgccagtcctgagcattgggcgctggcacctcctcttacagctttactcctgccagcttgggaaaaggccggagaaggtgaaattctgtgtgctccctccggcgagagactttgcggagaggatatatgtaacgtggaagtccaagaatccgagtggaggctcaccgaggcgaaggggccaacccgactcggaccgatg

SEQ ID NO: 13221 - DNA, 203 bp, Artificial sequence
  synthetic
ggcgcgccagtccttagttgagggcgctggcacctcctcttacagctttactcctgccagcttgggaaaaggccggagaaggtgaaattctgtgtgctccctccggcgagagactttgtcagctcccgcacatggcatgcactacacaagaatccgagtggaggctcaccgaggcgaaggggccaacccgactcggaccgatg

SEQ ID NO: 13222 - DNA, 203 bp, Artificial sequence
  synthetic
ggcgcgccagtcctaacaacgtggcggcgcgcgggcgcctggggcgggacttccggcgcgctggagcgttttccggccgtgcgtttgtggccgtccggcctccctgacatgcagccctctggaccccgaggttggaccctactgtggagactagctgtgccggacactcttcaacctcctctggcttgcgactcggaccgatg

SEQ ID NO: 13223 - DNA, 203 bp, Artificial sequence
  synthetic
ggcgcgccagtcctggtgtacgggcggcgcgcgggcgcctggggcgggacttccggcgcgctggagcgttttccggggtaagacagtataccgtccggcctccctgacatgcagccctctggaccccgaggttggaccctactgtgacacacctaccatgcggacactcttcaacctcctctggcttgcgactcggaccgatg

SEQ ID NO: 13224 - DNA, 203 bp, Artificial sequence
  synthetic
ggcgcgccagtccttaaacgcgggcggcgcgcggtgcataccacttttacttccggcgcgctggagcgttttccggccgtgcgtttgtggccgtccggcctccctgacatgcagccctctggaccccgaggttggaccctactgtgacacacctaccatgcggacactcttcaacctcctctggcttgcgactcggaccgatg

SEQ ID NO: 13225 - DNA, 203 bp, Artificial sequence
  synthetic
ggcgcgccagtcctaggtccatggcggctgcagcaacctgcacagccggagagcgcagagaagcagaggaccaagaggcagaatgccggcgctccaccgcccgagactgtgtttcctgtgagtccagatgtgtgatccagatatgctgcaatggtgacataaactgttgactgagactaggagcgtgccgactcggaccgatg

SEQ ID NO: 13226 - DNA, 203 bp, Artificial sequence
  synthetic
ggcgcgccagtccttaacagcaggcggctgcagccgtggctctgcagcgagagcgcagagaagcagaggaccaagaggcagaatgccggcgctccaccgcccgagactgtgtttcctgtgagtccagatgtgcctatagatagctttgcaatggtgacataaactgttgactgagactaggagcgtgccgactcggaccgatg

SEQ ID NO: 13227 - DNA, 203 bp, Artificial sequence
  synthetic
ggcgcgccagtcctgttacaatggcgggaggcgcagccgggctgtcggtggacctgcccactaacttaacttataaggaggacgaggaggaggccgtccacgagcaatgccagcatgagagagacaggcagcttcaggcccaggacgaggagggaggcggccatgtccccgagcggccgaagcaggagcgactcggaccgatg

SEQ ID NO: 13228 - DNA, 203 bp, Artificial sequence
  synthetic
ggcgcgccagtcctggccacggggcgggaggcgcagccgggctgtcggtggacctgcccactgctcagtggagcgtggaggacgaggaggaggccgtccacgagcaatgccagcatgagagagacaggcagccagtttaatgtcttgaggagggaggcggccatgtccccgagcggccgaagcaggagcgactcggaccgatg

SEQ ID NO: 13229 - DNA, 203 bp, Artificial sequence
  synthetic
ggcgcgccagtcctgggcatcaggcgggaggcgcagccgggctgtcggtggacctgcccactgctcagtggagcgtggaggacgaggaggaggccgtccacgagcaatgccagcatgagagagacaggcagcttcaggcccaggacgaggagggaggcggccatgtccccgagcacagttgaagctgccgactcggaccgatg

SEQ ID NO: 13230 - DNA, 203 bp, Artificial sequence
  synthetic
ggcgcgccagtcctgcgacagcggcgggaggcgcagccgggctgtcggtggacctgcccactgctcagtggagcgtggaggacgaggaggaggccgtccacgagcaatgccagcatgagagagacaggcagcttcaggcccaggactgtcgcatgtaataccatgtccccgagcggccgaagcaggagcgactcggaccgatg

SEQ ID NO: 13231 - DNA, 203 bp, Artificial sequence
  synthetic
ggcgcgccagtccttaagtctaggcgggaggcgcagccgggctgtcggtggacctgcccactgctcagtggagcgtggaggacgaggaggaggccgtccacgagcaatgccagcatgatttgacagccacttttcaggcccaggacgaggagggaggcggccatgtccccgagcggccgaagcaggagcgactcggaccgatg

SEQ ID NO: 13232 - DNA, 203 bp, Artificial sequence
  synthetic
ggcgcgccagtccttgcaccggggcgtggccggagctgcggcggcaagcgggctgggactgcaattattaacatctcccggcgagcagctcagaccatgtcgcctgaagaatggacgtatctagtggttcttcttatctccatccccatcggcttcctctttaagaaagccggtcctgggctgaagagcgactcggaccgatg

SEQ ID NO: 13233 - DNA, 203 bp, Artificial sequence
  synthetic
ggcgcgccagtcctcgacatttggcgtggccggagctgcggcggcaagcgggctgggactgctcggccgcctcctgcccggcgagcagctcagaccatgtcgcctgaagaatggacgtatctagtggttcttcttatctccatccccatcggcttcctctttaagaaagccggtcctgggctgaagagcgactcggaccgatg

SEQ ID NO: 13234 - DNA, 203 bp, Artificial sequence
  synthetic
ggcgcgccagtcctggttagtcggcgtggccggagctgcggcggcaagcgggctgggactgctcggccgcctcctgcccggcgagcagctcagaccatgtcgcctgaagaatggacgtatctagtggttcttcttatctccatccccatcggcttcctctttaagaaagccggtgtctctggagcccccgactcggaccgatg

SEQ ID NO: 13235 - DNA, 203 bp, Artificial sequence
  synthetic
ggcgcgccagtcctcaaagcacggcgtggccggagctgcggcggcaagcgggctgggactgctcggccgcctcctgcccggcgagcagcttgtgtatacctctgtgaagaatggacgtatctagtggttcttcttatctccatccccatcggcttcctctttaagaaagccggtcctgggctgaagagcgactcggaccgatg

SEQ ID NO: 13236 - DNA, 203 bp, Artificial sequence
  synthetic
ggcgcgccagtcctcaaagtcgggcgtggccggatggcacctttgctacgggctgggactgctcggccgcctcctgcccggcgagcagctcagaccatgtcgcctgaagaatggacgtatctagtggttcttcttatctccatccccatcggcttcctctttaagaaagccggtcctgggctgaagagcgactcggaccgatg

SEQ ID NO: 13237 - DNA, 203 bp, Artificial sequence
  synthetic
ggcgcgccagtcctcaccctctggctcaccgcacgtgcaatgtaaggataaagaagcaacaaaactgacggaggagagggacggcagcctgaaccagagctctgggtaccgctatggcacagaccccacccctcagcactaccccagcttcggtgtgacctccatccccaactacaacaacttccacgcgactcggaccgatg

SEQ ID NO: 13238 - DNA, 203 bp, Artificial sequence
  synthetic
ggcgcgccagtcctggattatcggctccggccgcatcagtatatgccacgctcagcgccctctcaccgcccggctctgtgtgctccgggatggagcaggtgtgcagagggtgagaacccagctctgggaccaagtcacttgcttccttacttagcaagactatcgacttgagcaaacttggacctgggcgactcggaccgatg

SEQ ID NO: 13239 - DNA, 203 bp, Artificial sequence
  synthetic
ggcgcgccagtcctagattaaaggctccggccgcgcgccccgcccttgcgctcagcgccctctcaccgcccggctctgtgtgctccgggacttcctgatgtgtgagagggtgagaacccagctctgggaccaagtcacttgcttccttacttagcaagactatcgacttgagcaaacttggacctgggcgactcggaccgatg

SEQ ID NO: 13240 - DNA, 203 bp, Artificial sequence
  synthetic
ggcgcgccagtcctccagaaccggctccggccgcgcgccccgcccttgcgctcagcgccctctcaccgcccggctctgtgtgctccgggatggagcaggtgtgcagagggtgagaaccacatagccccgagcagtcacttgcttccttacttagcaagactatcgacttgagcaaacttggacctgggcgactcggaccgatg

SEQ ID NO: 13241 - DNA, 203 bp, Artificial sequence
  synthetic
ggcgcgccagtcctagaaccgaggctccggccgcgcgccccgcccttgcgctcagcgccctctcaccgcccggctctgtgtgctccgggatggagcaggtgtgcagagggtgagaacccagctctgggaccaagtcacttgcttccttacttagcaagactatcgacttgagcaaacttggacctgggcgactcggaccgatg

SEQ ID NO: 13242 - DNA, 203 bp, Artificial sequence
  synthetic
ggcgcgccagtcctagcctgggggctccggccgcgcgccccgcccttgcgctcagcgccctctcaccgcccggctctgtgtgctccgggatggagcaggtgtgcagagggtgagaacccagctctgggaccatcgtgacgatgaagttacttagcaagactatcgacttgagcaaacttggacctgggcgactcggaccgatg

SEQ ID NO: 13243 - DNA, 203 bp, Artificial sequence
  synthetic
ggcgcgccagtccttcccataaggctcggattccaagtcatcctatgctcccctcagctagcaggtgtgagcggctttctgcccgcagtctctacacagctcagcatcctgacgcctcctccccttgcaggggcgtgaagctacttcagactctgctgtgacgacttggccgccaggcaccgatcctccgactcggaccgatg

SEQ ID NO: 13244 - DNA, 203 bp, Artificial sequence
  synthetic
ggcgcgccagtcctcccgagctggctcggattccgcccgcgtgcgccaagggtcggcactcgaggtgtgagcggctttctgcccgcagtctctacacagctcagcatcctgacgcctcctccccttgcaggggcgtgaagctacttcagactctgctgtgacgacttggccgccaggcaccgatcctccgactcggaccgatg

SEQ ID NO: 13245 - DNA, 203 bp, Artificial sequence
  synthetic
ggcgcgccagtcctctccaaccggctcggattccgcccgcgtgcgccatcccctcagctagcaggtgtgagcggctttctgcccgcagtctctacacagctcagcatcctgacgcctcctccccttgcagggaatgtctcgagaaacagactctgctgtgacgacttggccgccaggcaccgatcctccgactcggaccgatg

SEQ ID NO: 13246 - DNA, 203 bp, Artificial sequence
  synthetic
ggcgcgccagtccttagagcgcggctcggattccgcccgcgtgcgccatcccctcagctagcaggtgtgagcggctttctgcccgcagtctctacacagctcagcatcctgacgcctcctccccttgcaggggcgtgaagctacttcagactctgctgtgacgacttggccgccaggcaccgatcctccgactcggaccgatg

SEQ ID NO: 13247 - DNA, 203 bp, Artificial sequence
  synthetic
ggcgcgccagtcctggtccgtgggctcggattccgcccgcgtgcgccatcccctcagctagcaggtgtgagcggctttctgcccgcagtctctacacagctcagcatcctgacgcctcctccccttgcaggggcgtgaagctacttcagactctgctgtgcaattaacaggaaaaggcaccgatcctccgactcggaccgatg

SEQ ID NO: 13248 - DNA, 203 bp, Artificial sequence
  synthetic
ggcgcgccagtcctatgtgagaggctcggattccgcccgcgtgcgccatcccctcagctagcccaaacagcgacagttctgcccgcagtctctacacagctcagcatcctgacgcctcctccccttgcaggggcgtgaagctacttcagactctgctgtgacgacttggccgccaggcaccgatcctccgactcggaccgatg

SEQ ID NO: 13249 - DNA, 203 bp, Artificial sequence
  synthetic
ggcgcgccagtcctggacaaccggctgcagcctgcaccgttgctgcccgctgcccaggacgctcaacccaccgttagagccagagtggtgcctcctacagaccaatctgcggccccaaggtggggggccctacagagatgctccgagagccaaggacatgaagaacaagctggggatcttcagacggccgactcggaccgatg

SEQ ID NO: 13250 - DNA, 203 bp, Artificial sequence
  synthetic
ggcgcgccagtcctccgctgccggctgcagtggcattcgtgctcctccagtgcgggttcccggggagggggcgtgcaggatcgggttgtggggggtgcgctgtagggctaaggagaagatgagctttggggggccctgaggaggaggggagtcaggattaaccgaggacagggtcgcagcgggggcatcgactcggaccgatg

SEQ ID NO: 13251 - DNA, 203 bp, Artificial sequence
  synthetic
ggcgcgccagtcctagtattaaggctgcagtggcgacgagcggaacggagtgcgggttcccggggagggggcgtgcaggatcgggttgtggggggtgcgctgtagggctaaggagaagatgagctttggggggccctgaggaggagtctgcagcaaccacaccgaggacagggtcgcagcgggggcatcgactcggaccgatg

SEQ ID NO: 13252 - DNA, 203 bp, Artificial sequence
  synthetic
ggcgcgccagtcctctatagccggctgcagtggcgacgagcggaacggagtgcgggttcccggggagggggcgtgcaggatcgggttgtggggggtgcgctgtatcctctgctcattcatgagctttggggggccctgaggaggaggggagtcaggattaaccgaggacagggtcgcagcgggggcatcgactcggaccgatg

SEQ ID NO: 13253 - DNA, 203 bp, Artificial sequence
  synthetic
ggcgcgccagtcctgcacctcaggctgcagtggcgacgagcggaacggagtgcgggttcccgttcgttcaatagtaaggatcgggttgtggggggtgcgctgtagggctaaggagaagatgagctttggggggccctgaggaggaggggagtcaggattaaccgaggacagggtcgcagcgggggcatcgactcggaccgatg

SEQ ID NO: 13254 - DNA, 203 bp, Artificial sequence
  synthetic
ggcgcgccagtcctaggaacggggctgcagtggcgacgagcggaacggcagtaaccgaggacgggagggggcgtgcaggatcgggttgtggggggtgcgctgtagggctaaggagaagatgagctttggggggccctgaggaggaggggagtcaggattaaccgaggacagggtcgcagcgggggcatcgactcggaccgatg

SEQ ID NO: 13255 - DNA, 203 bp, Artificial sequence
  synthetic
ggcgcgccagtcctatcgggtcggctggtcgatccgccatttcccctggtagacctggcagatgaggctagaaataccccactggcgacagtgttctagcctgcgtggctgcctgcacaccctatgggtgtgaagccaaacaatggacaaggtgtgaagagccccgtgtgctcgctttgagtcctccgcgactcggaccgatg

SEQ ID NO: 13256 - DNA, 203 bp, Artificial sequence
  synthetic
ggcgcgccagtcctcctgctcgggctggtcgatccgccatttcccctggtagacctggcagatgaggctagaaataccccactggcgacagtgttctagcctgcgtggctgcctgcacaccctatgggtgtgtttatccgacggtaacaaggtgtgaagagccccgtgtgctcgctttgagtcctccgcgactcggaccgatg

SEQ ID NO: 13257 - DNA, 203 bp, Artificial sequence
  synthetic
ggcgcgccagtcctcactgtgaggctggtcgatccgccatttcccctggtagacctggcagatgaggctagaaataccccactggcgacagtgttctagcctgctgttggcgtgaggaaccctatgggtgtgaagccaaacaatggacaaggtgtgaagagccccgtgtgctcgctttgagtcctccgcgactcggaccgatg

SEQ ID NO: 13258 - DNA, 203 bp, Artificial sequence
  synthetic
ggcgcgccagtcctcattaggaggctggtcgatccgccatttcccctggtagacctggcagatgaggctagaaataccccactggcgacatatgctgcagtgttgtggctgcctgcacaccctatgggtgtgaagccaaacaatggacaaggtgtgaagagccccgtgtgctcgctttgagtcctccgcgactcggaccgatg

SEQ ID NO: 13259 - DNA, 203 bp, Artificial sequence
  synthetic
ggcgcgccagtcctgttgtaacggcttgggtccagactgcgccacagcctctcgggagacgtgggccctcggaacctttttagtgccggactccgggccgcaggcagtcccgcggcagcaggatcacaggtggcagggactcagctcggaattctgtatacgggccaatttgtcatcccagtctttcacgactcggaccgatg

SEQ ID NO: 13260 - DNA, 203 bp, Artificial sequence
  synthetic
ggcgcgccagtcctgcgcatgcggcttgggtccagactgcgccacagcctctcgggagacgtgggccctcggaacctttttagtgccggactccgggccgcaggcagtcccgcggcagcaggatcacaggtggcagggactcagctcggaattctgtatagaaaaagcacctggatcccagtctttcacgactcggaccgatg

SEQ ID NO: 13261 - DNA, 203 bp, Artificial sequence
  synthetic
ggcgcgccagtcctcctgggtcggcttgggtccagactgcgccacagcctctcgggagacgtgggccctcggaacctttttagtgccggactccgggccgcaggcagtcccgcggcagcaggatcacaggtggcagggactcagctcggaattctgtatagaaaaagcacctggtatgtccatccagtcgactcggaccgatg

SEQ ID NO: 13262 - DNA, 203 bp, Artificial sequence
  synthetic
ggcgcgccagtcctatggtgagggcttgggtccagactgcgccacagcctctcgggagacgtgggccctcggaacctttttagtgccggactccgggccgcaggcagtcccgcggcagcaggatcacaggtggcagggactcagcttaatccatctgcctgaaaaagcacctggatcccagtctttcacgactcggaccgatg

SEQ ID NO: 13263 - DNA, 203 bp, Artificial sequence
  synthetic
ggcgcgccagtcctattacatgggcttgggtccatttctacttgagcgctctcgggagacgtgggccctcggaacctttttagtgccggactccgggccgcaggcagtcccgcggcagcaggatcacaggtggcagggactcagctcggaattctgtatagaaaaagcacctggatcccagtctttcacgactcggaccgatg

SEQ ID NO: 13264 - DNA, 203 bp, Artificial sequence
  synthetic
ggcgcgccagtcctccagctacggctttctgcccgcagtctctacacagctcagcatcctgaaagaaaacagatacgcaggggcgtgaagctacttcagactctgctgtgacgacttggccgccaggcaccgatcctccccggtgagaaggtccacgaatcttactgcagacagatttgctcagcgcgcgactcggaccgatg

SEQ ID NO: 13265 - DNA, 203 bp, Artificial sequence
  synthetic
ggcgcgccagtcctctcccaaaggctttctgcccgcagtctctacacagctcagcatcctgacgcctcctccccttgcaggggcgtgaagctacttcagactctagaaatcgcttgctgccgccaggcaccgatcctccccggtgagaaggtccacgaatcttactgcagacagatttgctcagcgcgcgactcggaccgatg

SEQ ID NO: 13266 - DNA, 203 bp, Artificial sequence
  synthetic
ggcgcgccagtcctttgtagtaggctttctgcccgcagtctctacacagctcagcatcctgacgcctcctccccttgcaggggcgtgaagctacttcagactctgctgtgacgacttggccgccaggcaccgatcctccccggtgagaaggtccacgaattactggcggtctgaatttgctcagcgcgcgactcggaccgatg

SEQ ID NO: 13267 - DNA, 203 bp, Artificial sequence
  synthetic
ggcgcgccagtcctctcggccaggctttctgcccgcagtctctacacagctcagcatcctgacgcctcctccccttgcaggggcgtgaagctacttcagactctgctgtgacgacttggccgccaggcaccgatcctccccggtgatttaacgtcgattacttactgcagacagatttgctcagcgcgcgactcggaccgatg

SEQ ID NO: 13268 - DNA, 203 bp, Artificial sequence
  synthetic
ggcgcgccagtcctatgagcccggctttctgcccgcagtctctacacagctcagcatcctgacgcctcctccccttgcaggggcgtgaagtgctcctcctagtagctgtgacgacttggccgccaggcaccgatcctccccggtgagaaggtccacgaatcttactgcagacagatttgctcagcgcgcgactcggaccgatg

SEQ ID NO: 13269 - DNA, 203 bp, Artificial sequence
  synthetic
ggcgcgccagtcctcgtgtcatggctttctgcccgcagtctctacacagctcagcatcctgacgcctcctcccctttatcatagtatgttctacttcagactctgctgtgacgacttggccgccaggcaccgatcctccccggtgagaaggtccacgaatcttactgcagacagatttgctcagcgcgcgactcggaccgatg

SEQ ID NO: 13270 - DNA, 203 bp, Artificial sequence
  synthetic
ggcgcgccagtcctatgggctgggctttctgcccgcagtctctacacattaagttgcgtcagcgcctcctccccttgcaggggcgtgaagctacttcagactctgctgtgacgacttggccgccaggcaccgatcctccccggtgagaaggtccacgaatcttactgcagacagatttgctcagcgcgcgactcggaccgatg

SEQ ID NO: 13271 - DNA, 203 bp, Artificial sequence
  synthetic
ggcgcgccagtccttccaccatggctttctgccctacacacgactgatgctcagcatcctgacgcctcctccccttgcaggggcgtgaagctacttcagactctgctgtgacgacttggccgccaggcaccgatcctccccggtgagaaggtccacgaatcttactgcagacagatttgctcagcgcgcgactcggaccgatg

SEQ ID NO: 13272 - DNA, 203 bp, Artificial sequence
  synthetic
ggcgcgccagtcctccgtggtggggaaacgcacctgattttttacttattagtttgttttttctttaacctttcagcatcacagaggaagtagactgatattaacaatacttactaataataacgtgcctcatgaaataaagatccttgctccgggctcctaaaaatttcctgcgtctcatgccaagacgactcggaccgatg

SEQ ID NO: 13273 - DNA, 203 bp, Artificial sequence
  synthetic
ggcgcgccagtcctgaatatccgggaaacgcacctgattttttacttattagtttgttttttctttaacctttcagcatcacagaggaagtagactgatattaacaatacttactaatgcctgttactaatgtgaaataaagatccgaaaggaattggaataaaaatttcctgcgtctcatgccaagacgactcggaccgatg

SEQ ID NO: 13274 - DNA, 203 bp, Artificial sequence
  synthetic
ggcgcgccagtcctcttcagatgggaaacgcacctgattttttacttattagtttgttttttctttaacctttcagcatcacagaggaagtagactgatattaatgcgctactggtcgaataacgtgcctcatgaaataaagatccgaaaggaattggaataaaaatttcctgcgtctcatgccaagacgactcggaccgatg

SEQ ID NO: 13275 - DNA, 203 bp, Artificial sequence
  synthetic
ggcgcgccagtcctgcgtaattgggaatgtgagggtcgccggaagtgccaccgagaagcgccggcctcggggctgtctacagcggcccgggagaggctgtggtggccccgagcgcgagtgtgtaggtgacaggacagcggccaggcccgcccctcccctcgtgatggtcattgtcctccagagcagtgcgactcggaccgatg

SEQ ID NO: 13276 - DNA, 203 bp, Artificial sequence
  synthetic
ggcgcgccagtccttcaacctagggaccgctgcatgtatcctcagctcctaacactgtgtctggtacacattgtttgatggttttgatgtttcagattcgttatatttcacaaacacaaggcttgccagctgaatatcttctcagtgccggaacaaaaacaaccaggtttttcaacagagatcctaatcgactcggaccgatg

SEQ ID NO: 13277 - DNA, 203 bp, Artificial sequence
  synthetic
ggcgcgccagtcctcttccctggggagagccatacgtagggttaatcgcggtgagtacaccggaattgccaggacgaccgggtcctttcttggataaacccgctcaatgcctggagatttgggcgtgcccccgcaagactgctagccgagtagtgttgggtcgcgaaaggccttgtggtactgcctgacgactcggaccgatg

SEQ ID NO: 13278 - DNA, 203 bp, Artificial sequence
  synthetic
ggcgcgccagtcctctttaagcgggagagccatagtggtctgcggaaccggtgagtacaccgcgtcgagtttaggtaccgggtcctttcttggataaacccgctcaatgcctggagatttgggcgtgcccccgcaagactgctagccgagtagtgttgggtcgcgaaaggccttgtggtactgcctgacgactcggaccgatg

SEQ ID NO: 13279 - DNA, 203 bp, Artificial sequence
  synthetic
ggcgcgccagtcctaaccgacggggagagccatagtggtctgcggaaccggtgagtacaccggaattgccaggacgaccgggtcctttcttggataaacccgctattacttcatcatgttgggcgtgcccccgcaagactgctagccgagtagtgttgggtcgcgaaaggccttgtggtactgcctgacgactcggaccgatg

SEQ ID NO: 13280 - DNA, 203 bp, Artificial sequence
  synthetic
ggcgcgccagtcctagacggttgggagatttgagagaaagactccagaagcccgcggggagagcaggggttctggggaagataaagcccttcatccaggatcccatgactcgtcgttcatgagatggaccaaacgcccccggcgcgtcctgaatatctggtctcagggattcgaactccccctgtgagcgactcggaccgatg

SEQ ID NO: 13281 - DNA, 203 bp, Artificial sequence
  synthetic
ggcgcgccagtcctcaagttgagggagatttgagagaaagactccagaagcccgcggggagagcaggggttctggggaagataaagcccttcatccaggatccctctgtgaccataagatgagatggaccaaacgcccccggcgcgtcctgaatatctggtctcagggattcgaactccccctgtgagcgactcggaccgatg

SEQ ID NO: 13282 - DNA, 203 bp, Artificial sequence
  synthetic
ggcgcgccagtcctttcgcgcggggatcctaggcatttttggttgcgcaattcaagtgtcctatttaaaatgggacaaatagtgacattcttccaggaagtgcctcatgtaatagaagaggtgatgaacattgttctcattgcactgtctgtactagcagctgatccttagacatacaattttgcaaccgactcggaccgatg

SEQ ID NO: 13283 - DNA, 203 bp, Artificial sequence
  synthetic
ggcgcgccagtccttattaagtgggatcctaggcatttttggttgcgcaattcaagtgtcctcaccttccaattctaaatagtgacattcttccaggaagtgcctcatgtaatagaagaggtgatgaacattgttctcattgcactgtctgtactagcagtgctgaaaggtctgtacaattttgcaaccgactcggaccgatg

SEQ ID NO: 13284 - DNA, 203 bp, Artificial sequence
  synthetic
ggcgcgccagtcctccaacggcgggatcctaggcgttttttagtcacgcttaaatctttgattgcgtcaatcatgggtcaattgttcagcttttttgaagaagttccgaatatcatccatgaggctatcaacatagctctgatagcagtgagcttaattgagatagaagctattatgattaacttgtgcgactcggaccgatg

SEQ ID NO: 13285 - DNA, 203 bp, Artificial sequence
  synthetic
ggcgcgccagtcctaacattgggggatcctaggcgttttttagtcacgcttaaatctttgattgcgtcaatcatgggtcaattgttcagcttttttgaagaagttccgaatatcatccatgaggctatcaacatagctctgatagcagtgagcttaattgctgccttgaaagggatgattaacttgtgcgactcggaccgatg

SEQ ID NO: 13286 - DNA, 203 bp, Artificial sequence
  synthetic
ggcgcgccagtcctggtttcgggggatcctaggcgttttttagtcacgcttaaatctttgattgcgtcaatcatgggtcaattgttcagcttttttgaagaagttccgaatatcatccatgaggctatcaacatagctctgatagctccaccgcgcgcacctgccttgaaagggatgattaacttgtgcgactcggaccgatg

SEQ ID NO: 13287 - DNA, 203 bp, Artificial sequence
  synthetic
ggcgcgccagtccttcattcctgggcagagagagggacgccccctcctcctccccgcctcttgtgaggcgcgcggagccgcctcccctgggtcaggtctgatgggccggtgggcgcgctagtggtggccgccaccgccgaaaccgtcgacctcctgggccagtccaatagtatgagccccgcggcagccgactcggaccgatg

SEQ ID NO: 13288 - DNA, 203 bp, Artificial sequence
  synthetic
ggcgcgccagtcctgggaaatcgggcagagagagggacgccccctcctcctccccgcctcttgtgaggcgcgcggagccgcctcccctgggtcaggtctgatgggccggtgggcgcgctagtggtggccgccaccgccgaaaccgtgacggggggtaatgccagttccgcgtccagccccgcggcagccgactcggaccgatg

SEQ ID NO: 13289 - DNA, 203 bp, Artificial sequence
  synthetic
ggcgcgccagtccttctcagtcgggcataaaacacgcctccacccctgccctcctcaggccccctccgcctccacccctgccctcctcaggccccctgcgtccccgcctcgtcctcctcaggccccctccgcctccggctccgtcctcctctggccccctccgcccccggccccggccccacggcgggcgactcggaccgatg

SEQ ID NO: 13290 - DNA, 203 bp, Artificial sequence
  synthetic
ggcgcgccagtccttgatggcggggcccaagcgtaaccaggctcttctgattggccggtgtacttcagtttccgtccaaggtccgcctcctacctccttctgcttcggtccttaggataagaccatggccttgagagcatgtggctgctgatatgagttgagatgcctcattcccaaagtggacaacacgactcggaccgatg

SEQ ID NO: 13291 - DNA, 203 bp, Artificial sequence
  synthetic
ggcgcgccagtcctgagcggcagggcccaagcgtaaccaggctcttctgattggccggtgtacttcagtttccgtccaaggtccgcctcctacctccttctgcttcggtccttaggataagaccatggccttgagagcatgtggcttgatcatcttccgaagatgcctcattccacgtcatatattgccgactcggaccgatg

SEQ ID NO: 13292 - DNA, 203 bp, Artificial sequence
  synthetic
ggcgcgccagtcctggcatgtcgggcccaagcgtaaccaggctcttctgattggccggtgtacttcagtttccgtccaaggtccgcctcctacctccttctgcttcggtccttaggataagaccatggccttgagagcatgtggcttgatcatcttccgaagatgcctcattcccaaagtggacaacacgactcggaccgatg

SEQ ID NO: 13293 - DNA, 203 bp, Artificial sequence
  synthetic
ggcgcgccagtcctcttcatcagggcccaagcgtaaccaggctcttctgattggccggtgtacttcagtttccgtccaaggtccgcctcctacctccttctgcttcggtccttaggataagaccatggccttttcgcttcaattgatgatcatcttccgaagatgcctcattcccaaagtggacaacacgactcggaccgatg

SEQ ID NO: 13294 - DNA, 203 bp, Artificial sequence
  synthetic
ggcgcgccagtcctggagccgcgggcccaagcgtaaccaggctcttctgattggccggtgtatcggttaggtttcgcaaggtccgcctcctacctccttctgcttcggtccttaggataagaccatggccttgagagcatgtggcttgatcatcttccgaagatgcctcattcccaaagtggacaacacgactcggaccgatg

SEQ ID NO: 13295 - DNA, 203 bp, Artificial sequence
  synthetic
ggcgcgccagtcctcgcgactggggcccaagcgtaaccaggctcttctttgccataacacctcttcagtttccgtccaaggtccgcctcctacctccttctgcttcggtccttaggataagaccatggccttgagagcatgtggcttgatcatcttccgaagatgcctcattcccaaagtggacaacacgactcggaccgatg

SEQ ID NO: 13296 - DNA, 203 bp, Artificial sequence
  synthetic
ggcgcgccagtcctggcccttagggcgggcggccgcagagcagcaccggccgtggctccggtagcagcaagttcgaaccccgctcccgctaatagggccactcggctccttcggcccttgggcctccaaacaccagtccccggcagctcgttgcgcattgcgctctccccgccaccaggatgccggtacgactcggaccgatg

SEQ ID NO: 13297 - DNA, 203 bp, Artificial sequence
  synthetic
ggcgcgccagtcctgttctagggggcgggcggccgcagagcagcaccgtatccttaaggcaaagcagcaagttcgaaccccgctcccgctccgcttcggttctcgctccttcggcccttgggcctccaaacaccagtccccggcagctcgttgcgcattgcgctctccccgccaccaggatgccggtacgactcggaccgatg

SEQ ID NO: 13298 - DNA, 203 bp, Artificial sequence
  synthetic
ggcgcgccagtcctgcccagtggggcgtggcgttacagagcctctagcgctgggtgttggggacctgacgctatggagctctcggagtttaacctaattgtagcgtgagtggggggttcctgctgcgggatgagaacgtagacgccagtggctcactcgctcctggcaccttccctttcaggctccagcgactcggaccgatg

SEQ ID NO: 13299 - DNA, 203 bp, Artificial sequence
  synthetic
ggcgcgccagtcctcattctcagggcgtggcgttacagagcctctagcgctgggtgttggggacctgacgctatggagctctcggagttttgtgggggacggctgtgagtggggggttcctgctgcgggatgagaacgtagacgccagtggctcactcgctcctggcaccttccctttcaggctccagcgactcggaccgatg

SEQ ID NO: 13300 - DNA, 203 bp, Artificial sequence
  synthetic
ggcgcgccagtccttgtaattagggcgtggcgttacagagcctctagcgctgggtgttggggacctgacgctatggagctctcggagttttgtgggggacggctgtgagtggggggttcctgctgcgggatgagaacgtagacgccagtggctcactcgctcctggcaccttcctaggaccatagttacgactcggaccgatg

SEQ ID NO: 13301 - DNA, 203 bp, Artificial sequence
  synthetic
ggcgcgccagtcctcacagttcgggcgtggcgttacagagcctctagcgctgggtgttggggacctgacgctatggagctctcggagttttgtgggggacggctgtgagtggggggttcctgctgcgggatgagaacgtagacgccgtgctgaagtgtcgtcctggcaccttccctttcaggctccagcgactcggaccgatg

SEQ ID NO: 13302 - DNA, 203 bp, Artificial sequence
  synthetic
ggcgcgccagtcctgtgttcgtgggcgtggcgttctcttaatctgctggctgggtgttggggacctgacgctatggagctctcggagttttgtgggggacggctgtgagtggggggttcctgctgcgggatgagaacgtagacgccagtggctcactcgctcctggcaccttccctttcaggctccagcgactcggaccgatg

SEQ ID NO: 13303 - DNA, 203 bp, Artificial sequence
  synthetic
ggcgcgccagtcctcgcagaatgggctaaggatgggaactgatggttagcacgtaaccttcagagagtgcggatctgagtaggagaccgtggtgcactgctttacagatgcagcccggtttaaaaagcgtctatgcccctacagggtagcggtgggccgcgccctttccttttaaaactacttgttctcgactcggaccgatg

SEQ ID NO: 13304 - DNA, 203 bp, Artificial sequence
  synthetic
ggcgcgccagtcctgggcgcgtgggctaaggatgtcctacaggtaccccacaaatgaaaattgagagtgcggatctgagtaggagaccgtggtgcactgctttacagatgcagcccggtttaaaaagcgtctatgcccctacagggtagcggtgggccgcgccctttccttttaaaactacttgttctcgactcggaccgatg

SEQ ID NO: 13305 - DNA, 203 bp, Artificial sequence
  synthetic
ggcgcgccagtcctcgtggttagggctaaggatgtcctacaggtacccgcacgtaaccttcaattgtgagctcggcgagtaggagaccgtggtgcactgctttacagatgcagcccggtttaaaaagcgtctatgcccctacagggtagcggtgggccgcgccctttccttttaaaactacttgttctcgactcggaccgatg

SEQ ID NO: 13306 - DNA, 203 bp, Artificial sequence
  synthetic
ggcgcgccagtccttaacgcccgggctaaggatgtcctacaggtacccgcacgtaaccttcagagagtgcggatctgagtaggagaccgtggtgcactgctttacagatgcagcccggtttaaaaagcgtctatgcccctacagggtagcggtgggccgcgccctttccttttaaaactacttgttctcgactcggaccgatg

SEQ ID NO: 13307 - DNA, 203 bp, Artificial sequence
  synthetic
ggcgcgccagtcctgaggcaccgggctccgggatctggtcgttagggtcaggtgagaaagcgagacaggcaggtagggaaatcgtgaggtgagcgtggtcctagctccttgtggcagagcctagagagaaggcgaggacgctgaagaaccaggcggacagctggcagagagagaagttggctagcatgcgactcggaccgatg

SEQ ID NO: 13308 - DNA, 203 bp, Artificial sequence
  synthetic
ggcgcgccagtcctccatcacagggctccgggatgaaaggagggaacgcaggtgagaaagcgagacaggcaggtagccggtgttcactcggagcgtggtcctagctccttgtggcagagcctagagagaaggcgaggacgctgaagaaccaggcggacagctggcagagagagaagttggctagcatgcgactcggaccgatg

SEQ ID NO: 13309 - DNA, 203 bp, Artificial sequence
  synthetic
ggcgcgccagtcctttgtcaccgggctccgggatgaaaggagggaacgcaggtgagaaagcgagacaggcaggtagggaaatcgtgaggtgagcgtggtcctagctccttgtggcagagcctagagagaaggcgaggacgctgaagaaccaggcggacagtcttatcttgtttcagttggctagcatgcgactcggaccgatg

SEQ ID NO: 13310 - DNA, 203 bp, Artificial sequence
  synthetic
ggcgcgccagtcctacgactaggggctccgggatgaaaggagggaacgcaggtgagaaagcgagacaggcaggtagggaaatcgtgaggttccttgctcgtactctccttgtggcagagcctagagagaaggcgaggacgctgaagaaccaggcggacagctggcagagagagaagttggctagcatgcgactcggaccgatg

SEQ ID NO: 13311 - DNA, 203 bp, Artificial sequence
  synthetic
ggcgcgccagtccttttcacaagggctccgggatgaaaggagggaacgttacgctacgttaaagacaggcaggtagggaaatcgtgaggtgagcgtggtcctagctccttgtggcagagcctagagagaaggcgaggacgctgaagaaccaggcggacagctggcagagagagaagttggctagcatgcgactcggaccgatg

SEQ ID NO: 13312 - DNA, 203 bp, Artificial sequence
  synthetic
ggcgcgccagtcctgagagtttggggaggttggggacgggcctggcagttgtgaactcgaacctgccgctgtcgccgcggcggggcggggagcgagagtgggccgcggaggccggccttcgggctccatggacgggcgccgcgtccagaatggtggacgagcagagcagaggaagaaccgatgctggacgactcggaccgatg

SEQ ID NO: 13313 - DNA, 203 bp, Artificial sequence
  synthetic
ggcgcgccagtcctttcagcctggggcagacagcgccggtggtgttcagtacgccacaagcgacacaaatgaacaccgtcataatcatgagccagcacttctaccctagccgggcccagcccccgagcagtgcagcctcccgagtgcagagtgcagcccctgcccgccctggcccagctgcccatgtccgactcggaccgatg

SEQ ID NO: 13314 - DNA, 203 bp, Artificial sequence
  synthetic
ggcgcgccagtcctcgcctactggggcagacagcgccggtggtgttcagtacgccacaagcgacacaaatgaacacgccttctcagcccccgtctataggtggtcctagccgggcccagcccccgagcagtgcagcctcccgagtgcagagtgcagcccctgcccgccctggcccagctgcccatgtccgactcggaccgatg

SEQ ID NO: 13315 - DNA, 203 bp, Artificial sequence
  synthetic
ggcgcgccagtcctctccatagggggcagacagcgccggtggtgttcagtacgccacaagcgacacaaatgaacacgccttctcagccccgccagcacttctaccctagccgggcccagcccccgagcagtgcagcctcccgagtgcagagtgcagccccattatatgtcaatgcagctgcccatgtccgactcggaccgatg

SEQ ID NO: 13316 - DNA, 203 bp, Artificial sequence
  synthetic
ggcgcgccagtcctttgctaacggggcagacagcgccggtggtgttcagtacgccacaagcgacacaaatgaacacgccttctcagccccgccagcacttctaccctagccgggcccagcccccgagcagtgcagcctcccgagtgcagagtgcagcccctgcccgccctggcccagctgcccatgtccgactcggaccgatg

SEQ ID NO: 13317 - DNA, 203 bp, Artificial sequence
  synthetic
ggcgcgccagtcctggtaacacggggcagacagcgccggtggtgttcagtacgccacaagcgacacaaatgaacacgccttctcagccccgccagcacttctaccctagccgggcccagcccccgagcagtgcagcctcccgagtggcttcctgcaagagtgcccgccctggcccagctgcccatgtccgactcggaccgatg

SEQ ID NO: 13318 - DNA, 203 bp, Artificial sequence
  synthetic
ggcgcgccagtcctcgaacttaggggcagacagcgccggtggtgttcagtacgccacaagcgacacaaatgaacacgccttctcagccccgccagcacttctacgagcctgtttgatcgcccccgagcagtgcagcctcccgagtgcagagtgcagcccctgcccgccctggcccagctgcccatgtccgactcggaccgatg

SEQ ID NO: 13319 - DNA, 203 bp, Artificial sequence
  synthetic
ggcgcgccagtcctcataatatggggccacagcccgggctggggggagccggggtgcaagagggcaggctggatcaccggattagacgcgggaccgggctccgagtgtcaacgagagctagagacatgaggctgagctggttccgggtcctgacagtactgtccatctgcctgagcgccgtggccacgcgactcggaccgatg

SEQ ID NO: 13320 - DNA, 203 bp, Artificial sequence
  synthetic
ggcgcgccagtcctctatcttcggggccacagcccgggctggggggagccggggtgcaagagggcaggctggatcaggccgggcagaaggggaccgggctccgagtgtcaacgagagctagagacatgaggcaatttattgcaaatgtcctgacagtactgtccatctgcctgagcgccgtggccacgcgactcggaccgatg

SEQ ID NO: 13321 - DNA, 203 bp, Artificial sequence
  synthetic
ggcgcgccagtcctgtttctggggggccgcgcgtccaggcggcgagcggaagtgggtgtgagagcggaagtggccgataccttgtctttcctgggcggggaccgggcttgtcggtgaagcggcagtggcggcggcggcggcggctcggcaggcgggttcaggcttcgggggccagccgccgccatgatcgactcggaccgatg

SEQ ID NO: 13322 - DNA, 203 bp, Artificial sequence
  synthetic
ggcgcgccagtcctctgaggctggggccgcgcgtccaggcggcgagcggaagtgggtgtgagagcggaagtggccggctagagccgggggctgggcggggaccgggcttgtcggtgaagcggcagtggcggcggcggcggcggctctaatacaatccggcggcttcgggggccagccgccgccatgatcgactcggaccgatg

SEQ ID NO: 13323 - DNA, 203 bp, Artificial sequence
  synthetic
ggcgcgccagtccttacttcttggggccgcgcgtgttcttcttacttagaagtgggtgtgagagcggaagtggccggctagagccgggggctgggcggggaccgggcttgtcggtgaagcggcagtggcggcggcggcggcggctcggcaggcgggttcaggcttcgggggccagccgccgccatgatcgactcggaccgatg

SEQ ID NO: 13324 - DNA, 203 bp, Artificial sequence
  synthetic
ggcgcgccagtcctcggcagcgggggccgggcggccggcgcccccggctgctcccgccgccgcccggacccgcgccccgccggggcagcggtggtgagagccccgactccccggacgccgcccgccgtgccatggggttcccggccaatcgaaaatcagccgcgctgtgctgcggcctcctggccccgcgactcggaccgatg

SEQ ID NO: 13325 - DNA, 203 bp, Artificial sequence
  synthetic
ggcgcgccagtccttcgtatgtggggcgcatcccctggcgactcctcccgttccctcttccgcttgcgctgccgcaaacttgcattagcgctggagcgcaccttcatcgccatcaagccggacggcgtgcagcgcggcctggtgggcgagatcatcaagcgcttcgagcagaagggattccgcctcgtcgactcggaccgatg

SEQ ID NO: 13326 - DNA, 203 bp, Artificial sequence
  synthetic
ggcgcgccagtcctagaaagacggggcgcatcccctggcgactcctcccgttccctcttccgcttgcgctgccgcaggaccatggccaacctggagcgcaccttcatcgccatcaagccggacggcgtgcagcgcggcctggtgggcgagatcatcaagctacgttgatcagctggattccgcctcgtcgactcggaccgatg

SEQ ID NO: 13327 - DNA, 203 bp, Artificial sequence
  synthetic
ggcgcgccagtcctatcgaggaggggcgcatcccctggcgactcctcccgttccctcttccgcttgcgctgccgcaggaccatggccaacctggagcgcaccttcatcgccatcaagccggacggcgtgcagcgcggcctggtgggttttcgatcattttgcttcgagcagaagggattccgcctcgtcgactcggaccgatg

SEQ ID NO: 13328 - DNA, 203 bp, Artificial sequence
  synthetic
ggcgcgccagtcctactaacatggggcgcatcccctggcgactcctcccgttccctcttccgcttgcgctgccgcaggaccatggccaacctggagcgcaccttcatcgccatcaagccggacggcgtgcaggtttaagctaaatccgagatcatcaagcgcttcgagcagaagggattccgcctcgtcgactcggaccgatg

SEQ ID NO: 13329 - DNA, 203 bp, Artificial sequence
  synthetic
ggcgcgccagtcctaataggccggggcgcatcccctggcgactcctccttacggtggcctatcttgcgctgccgcaggaccatggccaacctggagcgcaccttcatcgccatcaagccggacggcgtgcagcgcggcctggtgggcgagatcatcaagcgcttcgagcagaagggattccgcctcgtcgactcggaccgatg

SEQ ID NO: 13330 - DNA, 203 bp, Artificial sequence
  synthetic
ggcgcgccagtcctgatttctagggggtccgggagtctgctatgtgggcggaggtctagtgattccccgggataagcctcactcgtcccctctcggggggcggaacacccacctgctagccccgctgctctctttgctttcctcctcgcttcggtctcccccaactcctagcatcccctcctatcgctcgactcggaccgatg

SEQ ID NO: 13331 - DNA, 203 bp, Artificial sequence
  synthetic
ggcgcgccagtccttcatcatcgggggtccgggagtctgctatgtggggacgataagtcgaggctgaaaactgtcccctcactcgtcccctctcggggggcggaacacccacctgctagccccgctgctctctttgctttcctcctcgcttcggtctcccccaactcctagcatcccctcctatcgctcgactcggaccgatg

SEQ ID NO: 13332 - DNA, 203 bp, Artificial sequence
  synthetic
ggcgcgccagtcctccttagaggggggtccgggagtctgctatgtggggacgataagtcgagttccccgggataagcctcactcgtcccccgggaactcagcagacacccacctgctagccccgctgctctctttgctttcctcctcgcttcggtctcccccaactcctagcatcccctcctatcgctcgactcggaccgatg

SEQ ID NO: 13333 - DNA, 203 bp, Artificial sequence
  synthetic
ggcgcgccagtcctcgctcgccgggggtccgggagtctgctatgtggggacgataagtcgagttccccgggataagcctcactcgtcccctctcggggggcggaacacccacctgctagccccgctgctctctttgctttcctcctcgcttcggtctcccaatttggagttttgcccctcctatcgctcgactcggaccgatg

SEQ ID NO: 13334 - DNA, 203 bp, Artificial sequence
  synthetic
ggcgcgccagtcctggcctatggggggtccgggagtctgctatgtggggacgataagtcgagttccccgggataagcctcactcgtcccctctcggggggcggaacacccacctgctatgagattcaaagaatttgctttcctcctcgcttcggtctcccccaactcctagcatcccctcctatcgctcgactcggaccgatg

SEQ ID NO: 13335 - DNA, 203 bp, Artificial sequence
  synthetic
ggcgcgccagtcctaatttaccgggggtccgggatatcctggaccaaagacgataagtcgagttccccgggataagcctcactcgtcccctctcggggggcggaacacccacctgctagccccgctgctctctttgctttcctcctcgcttcggtctcccccaactcctagcatcccctcctatcgctcgactcggaccgatg

SEQ ID NO: 13336 - DNA, 203 bp, Artificial sequence
  synthetic
ggcgcgccagtcctgactctgcggggtatactggcaaacttgcacattcggaaaaaatggggcaaataagaatttgataagtgctatttaagtctaaccttttcaatcagaaatggggtgcaattcactgagcatgataaaggttagattacaaaatttatttgacaatgacgaagtagcattgttaacgactcggaccgatg

SEQ ID NO: 13337 - DNA, 203 bp, Artificial sequence
  synthetic
ggcgcgccagtcctcgttacccggggtcgactgccgctgcggtgcatgagggcgcatgcgcagcggggccgtgggtgtacgcggcgcagcgcggcagtcctgatggcccggcatgggttaccgctgctgcccctgctgtcgctcctggtcggcgcgtggctcaagctaggaaatggacaggctactagcgactcggaccgatg

SEQ ID NO: 13338 - DNA, 203 bp, Artificial sequence
  synthetic
ggcgcgccagtcctgcgggatcgggtagcccaagaaccttcgggtgagattttactcttacatcttttcctataccgatcatggcagtccttctgctcctactcgtggtggaggccggggctattttagccccggccacccatgcttgtagcgcgaaagggcaatatttcctcacaaactgttgcgcccgactcggaccgatg

SEQ ID NO: 13339 - DNA, 203 bp, Artificial sequence
  synthetic
ggcgcgccagtcctccgtccgcgggtagcccaagaaccttcgggtgagggcgggtggcatttcggacaaggggtttgatcatggcagtccttctgctcctactcgtggtggaggccggggctattttagccccggccacccatgcttgtagcgcgaaagggcaatatttcctcacaaactgttgcgcccgactcggaccgatg

SEQ ID NO: 13340 - DNA, 203 bp, Artificial sequence
  synthetic
ggcgcgccagtcctcttagtttgggtagcccaagaaccttcgggtgagggcgggtggcattttcttttcctataccgatcatggcagtccttctgctcctactccgatgaagcagataggctattttagccccggccacccatgcttgtagcgcgaaagggcaatatttcctcacaaactgttgcgcccgactcggaccgatg

SEQ ID NO: 13341 - DNA, 203 bp, Artificial sequence
  synthetic
ggcgcgccagtcctgtataagagggtagcccaagaaccttcgggtgagggcgggtggcattttcttttcctataccgatcatggcagtccttctgctcctactcgtggtggaggccggggctattttagcccttcgtgttgtgaggtgtagcgcgaaagggcaatatttcctcacaaactgttgcgcccgactcggaccgatg

SEQ ID NO: 13342 - DNA, 203 bp, Artificial sequence
  synthetic
ggcgcgccagtccttggtggttgggtagcccaagaaccttcgggtgagggcgggtggcattttcttttcctataccgatcatggcagtccttctgctcctactcgtggtggaggccggtctgtgaggccgtacggccacccatgcttgtagcgcgaaagggcaatatttcctcacaaactgttgcgcccgactcggaccgatg

SEQ ID NO: 13343 - DNA, 203 bp, Artificial sequence
  synthetic
ggcgcgccagtcctcagacgtggggtccgccgcgagaatattcaacttaggtttgtccccgccgccccgacgcttccgccgggtccgtcggcacgtcggccctgcctcccggaccaccctgcggggcgcaccagcgatctggggtgcggggctcggcctccctgcgctcctggctgacggtcttaacccgactcggaccgatg

SEQ ID NO: 13344 - DNA, 203 bp, Artificial sequence
  synthetic
ggcgcgccagtcctggcgaagagggtccgccgcggtcgaggatcctggaggtttgtccccgccgccccgacgcttccgccgggtccgtcggcacgtcggccctgcctcccggaccaccctgcggggcgcaccagcgatctggggtgcggggctcggcctccctgcgctcctggctgacggtcttaacccgactcggaccgatg

SEQ ID NO: 13345 - DNA, 203 bp, Artificial sequence
  synthetic
ggcgcgccagtcctgattgtaggggtccgccgcggtcgaggatcctggaggtttgtccccgccgccccgacgcttccgccgggtccgtcggcacgtcggccctgcctcccggaccaccctgcggggcgcaccagcgatctggggtgcggggctcggcctctaatatacaggctttgacggtcttaacccgactcggaccgatg

SEQ ID NO: 13346 - DNA, 203 bp, Artificial sequence
  synthetic
ggcgcgccagtcctagggagtcgggtccgccgcggtcgaggatcctgggacaaaaggagtcacgccccgacgcttccgccgggtccgtcggcacgtcggccctgcctcccggaccaccctgcggggcgcaccagcgatctggggtgcggggctcggcctccctgcgctcctggctgacggtcttaacccgactcggaccgatg

SEQ ID NO: 13347 - DNA, 203 bp, Artificial sequence
  synthetic
ggcgcgccagtcctgttggcatgggtgtaaactagcgccgccgggtgttactttgccccgccggcggggcggtcagcctcctgtcaccgcctgttccggctatggtcccgtccggtgttctgtaagttggcaacctaggctcctgacgcgaccctggtcctgatggcggcggcgacggccgcggcagccgactcggaccgatg

SEQ ID NO: 13348 - DNA, 203 bp, Artificial sequence
  synthetic
ggcgcgccagtcctgtaagacagggttctacttgagatttccctcgtggtgccagggtccggcgagcatcacgccgaggcccattttccagacgaccacgacgacagaatatattgttactctggcgccccttaccagcttccagtctctcgaggtggccagtgtggtgcttggtccttgtttccaggcgactcggaccgatg

SEQ ID NO: 13349 - DNA, 203 bp, Artificial sequence
  synthetic
ggcgcgccagtcctacagccaagggttctacttgagatttccctcgtggtgccagggtccggcgagcatcacgccgaggcccattttccagacgaccacgacgaggccggggtcacgaactctggcgccccttaccagcttccagtctctcgaggtggccagtgtggtgcttggtccttgtttccaggcgactcggaccgatg

SEQ ID NO: 13350 - DNA, 203 bp, Artificial sequence
  synthetic
ggcgcgccagtcctgaagttacgggttctacttgagatttccctcgtggtgccagggtccggcgagcatcacgccgaggcccattttccagacgaccacgacgaggccggggtcacgaactctggcgccccttaccagcttccagtctctcgaggtggccctctgtccatggaatccttgtttccaggcgactcggaccgatg

SEQ ID NO: 13351 - DNA, 203 bp, Artificial sequence
  synthetic
ggcgcgccagtcctcccttgcagggttctacttgagatttccctcgtggtgccagggtccggcgagcatcacgccgaggcccattttccagacgaccacgacgaggccggggtcacgaactctggcgccccttaccagcttccagttatatagacccttgagtgtggtgcttggtccttgtttccaggcgactcggaccgatg

SEQ ID NO: 13352 - DNA, 203 bp, Artificial sequence
  synthetic
ggcgcgccagtcctcttaccgtgggttctacttgagatttccctcgtggtgccagggtccggcgagcatcacgccgtttatacacgatatgacgaccacgacgaggccggggtcacgaactctggcgccccttaccagcttccagtctctcgaggtggccagtgtggtgcttggtccttgtttccaggcgactcggaccgatg

SEQ ID NO: 13353 - DNA, 203 bp, Artificial sequence
  synthetic
ggcgcgccagtccttgagataagggttctacttgttgcgatatgatgagtgccagggtccggcgagcatcacgccgaggcccattttccagacgaccacgacgaggccggggtcacgaactctggcgccccttaccagcttccagtctctcgaggtggccagtgtggtgcttggtccttgtttccaggcgactcggaccgatg

SEQ ID NO: 13354 - DNA, 203 bp, Artificial sequence
  synthetic
ggcgcgccagtcctataagttggggttgctgacgaaaagagaaaaaatcagtgatctgtgtcgagggcaatattgcaagtgggaagacgacatgcctggaattcttctccaacgcgacagacgtcgaggtgttaacggagcctgtgtccaagtggagaaatgtccgtggccacaatcctctgggcctgcgactcggaccgatg

SEQ ID NO: 13355 - DNA, 203 bp, Artificial sequence
  synthetic
ggcgcgccagtccttgagtgatggtaaggagaggaggttacggggaacgacgcgctgctttcatgccctttcttgttctaccttcatcggccgaggtggacacccttaacacctcagaccctccggcccctgaagcatggccagcagcggcatggctgacagcgccaaccacctgcccttctttttcgcgactcggaccgatg

SEQ ID NO: 13356 - DNA, 203 bp, Artificial sequence
  synthetic
ggcgcgccagtcctaccatcaaggtaaggagaggaggttacggggaacgacgcgctgctttcatgccctttcttgttctaccttcatcggccgaggtggacacctgcgcaggtgtgtgattctttctatgctaagcatggccagcagcggcatggctgacagcgccaaccacctgcccttctttttcgcgactcggaccgatg

SEQ ID NO: 13357 - DNA, 203 bp, Artificial sequence
  synthetic
ggcgcgccagtcctgaatcctcggtaaggagaggaggttacggggaacgacgcgctgctttcatgccctttcttgttctaccttcatcggccgaggtggacacctgcgcaggtgtgtgccctccggcccctgaagcatggccagcagcggcatggctgacagcgccaaccacctgcccttctttttcgcgactcggaccgatg

SEQ ID NO: 13358 - DNA, 203 bp, Artificial sequence
  synthetic
ggcgcgccagtcctggagactaggtaaggagaggaggttacggggaacgacgcgctgctttcatgccctttcttgttctaccttcatcggccgaggtggacacctgcgcaggtgtgtgccctccggcccctgaagcatggccagcagcggcatggctgacttgtatcggactaagcccttctttttcgcgactcggaccgatg

SEQ ID NO: 13359 - DNA, 203 bp, Artificial sequence
  synthetic
ggcgcgccagtcctagctgcggggtaaggagaggaggttacggggaacgacgcgctgctttcatgccctttcttgttctaccttcatcggccgaggtggacacctgcgcaggtgtgtgccctccggcccctgaagcatggccagcattaattgccaccctagcgccaaccacctgcccttctttttcgcgactcggaccgatg

SEQ ID NO: 13360 - DNA, 203 bp, Artificial sequence
  synthetic
ggcgcgccagtcctcttatgtgggtaaggagaggaggttacggggaacgacgcgctgctttcatgccctttcttgttctaccttcatcggccgaggtggacacctgcgcaggtgtgtgccctccggcccctggtttggtcgacattgcggcatggctgacagcgccaaccacctgcccttctttttcgcgactcggaccgatg

SEQ ID NO: 13361 - DNA, 203 bp, Artificial sequence
  synthetic
ggcgcgccagtccttaaacaatggtaaggagaggaggttacggggaacgacgcgctgctttctgctggacgtaatctctaccttcatcggccgaggtggacacctgcgcaggtgtgtgccctccggcccctgaagcatggccagcagcggcatggctgacagcgccaaccacctgcccttctttttcgcgactcggaccgatg

SEQ ID NO: 13362 - DNA, 203 bp, Artificial sequence
  synthetic
ggcgcgccagtccttcccgttcggtacggggcgtctgtgtgccgctttagtgcgctcgccgtcggctctacctgcgtgctttagctccttctcgcctgatccttctgtctctcccaaccccggacacccggcttcgactggttatatcttcggtgttcttttcctctcttcttctttcgcggttcagccgactcggaccgatg

SEQ ID NO: 13363 - DNA, 203 bp, Artificial sequence
  synthetic
ggcgcgccagtcctggagtagtggtagattttgtgctacattcactctttatggtaaatccaaacattatgataaaccaggctcccgccaaaatggtttcacagcattcgctaatactgtagaggatgctgttaacaaactggttttcttagctgttgactttattacctggcgcagacaggagttaacgactcggaccgatg

SEQ ID NO: 13364 - DNA, 203 bp, Artificial sequence
  synthetic
ggcgcgccagtcctcttccactggtagattttgtgctacattcactctttatggtaaatccatcggccggagacggtattttggagtaataaatggtttcacagcattcgctaatactgtagaggatgctgttaacaaactggttttcttagctgttgactttattacctggcgcagacaggagttaacgactcggaccgatg

SEQ ID NO: 13365 - DNA, 203 bp, Artificial sequence
  synthetic
ggcgcgccagtcctaggtattgggtagcaacagtggtgagttcgttggatggcttaagccctccagcggttaggtacgtcagtggttcgacgccttggaataaaggtctcgagatgccacgtggacgagggcatgcccaaagcacatcttaacctgagcgggggtcgcccaggtaaaagcagttttaacgactcggaccgatg

SEQ ID NO: 13366 - DNA, 203 bp, Artificial sequence
  synthetic
ggcgcgccagtcctgaaaccctggtagcaacagtggtgagttcgttggatggcttaagccctgagtacagggtagtcgtcagtggttcgacgccttggaataaaggtctcgagatgccacgtggacgagggcatgcccaaagcacatcttaacctgagcgggggtcgcccaggtggctaatacagccccgactcggaccgatg

SEQ ID NO: 13367 - DNA, 203 bp, Artificial sequence
  synthetic
ggcgcgccagtcctacggattaggtagcaacagtggtgagttcgttggcatctcgtttaagagagtacagggtagtcgtcagtggttcgacgccttggaataaaggtctcgagatgccacgtggacgagggcatgcccaaagcacatcttaacctgagcgggggtcgcccaggtaaaagcagttttaacgactcggaccgatg

SEQ ID NO: 13368 - DNA, 203 bp, Artificial sequence
  synthetic
ggcgcgccagtcctgtgagtacggtatcgattcgcctcgcagagttgcggccgcccgccccttcagccccggctctccgtatgcgcatgagcagaggcgcctccctctgttcctcccaaggctaaactttctaattcccttctttgggctcgggggctcccggagcagggcgagagctcgcgtcgccgcgactcggaccgatg

SEQ ID NO: 13369 - DNA, 203 bp, Artificial sequence
  synthetic
ggcgcgccagtcctttgaagatggtcaagtgttcggtctaatatagtctgtgtgacctgcaggcattttgtgaaaagggtaaagtatgaaagctactctcagaaaagtacttatgtattgatgagagccttaaaatgactttatattcacaaaactgctggaagacaatgatctggggtatcacattccgactcggaccgatg

SEQ ID NO: 13370 - DNA, 203 bp, Artificial sequence
  synthetic
ggcgcgccagtcctggcagtaaggtccttttgtgcctgggcggaactcctcggccaggtccttccccgggccctggcccttcccctggagccatgctgggccctagcccgggtccctcgccgggctccgcccacagcatgatggggcccagcccagggccgccctcagcaggacaccccatccccacccgactcggaccgatg

SEQ ID NO: 13371 - DNA, 203 bp, Artificial sequence
  synthetic
ggcgcgccagtcctaccggcagggtctggcatctacaaagcctcttggccgtgttctgaacttgaagcctggaggagttctctgctcagcacagccaaggaacagaattagaagaaaaggaaccctggcctgaggcaggtgacaaacattaccaccccagctgtgcacgatgcagcagatgcaaccagcgactcggaccgatg

SEQ ID NO: 13372 - DNA, 203 bp, Artificial sequence
  synthetic
ggcgcgccagtcctagtgggacggtctggcatctacaaagcctcttggccgtgttctgaacttgaagcctggaggagttctctgctcagcacagccaaggaacagaattagaagaaaaggaaccctggcctgaggcaggtgacaaacattaccaccccaggacacacgacccatgcagatgcaaccagcgactcggaccgatg

SEQ ID NO: 13373 - DNA, 203 bp, Artificial sequence
  synthetic
ggcgcgccagtccttcccacctggtctggcatctacaaagcctcttggccgtgttctgaacttgaagcctggaggagttctctgctcagcacagccaaggaacagaattagaagaaaaggaaccctggcctggcttccaactatcgcattaccaccccagctgtgcacgatgcagcagatgcaaccagcgactcggaccgatg

SEQ ID NO: 13374 - DNA, 203 bp, Artificial sequence
  synthetic
ggcgcgccagtccttatacgtaggtctggcatctacaaagcctcttggccgtgttctgaacttgaagcctggaggagttctctgctcagcacagccaaggaacagaattagaagaaaatccggtagtagtgcaggcaggtgacaaacattaccaccccagctgtgcacgatgcagcagatgcaaccagcgactcggaccgatg

SEQ ID NO: 13375 - DNA, 203 bp, Artificial sequence
  synthetic
ggcgcgccagtcctacaagaatggtctggcatctacaaagcctcttggccgtgttctgaacttgaagcctggaggagttctctgctcagcgacaaaggttcctggaattagaagaaaaggaaccctggcctgaggcaggtgacaaacattaccaccccagctgtgcacgatgcagcagatgcaaccagcgactcggaccgatg

SEQ ID NO: 13376 - DNA, 203 bp, Artificial sequence
  synthetic
ggcgcgccagtcctcggcgtgaggtgataattcaggccccgcgctcgcccgccccgcttccgcccgctgtcctgctgcacgaacccttccaactctcctttcctcccccacccttgagttacccctctgtctttcctgctgttgcgcgggtgctcccacagcggagcggagattacagagccgccgggcgactcggaccgatg

SEQ ID NO: 13377 - DNA, 203 bp, Artificial sequence
  synthetic
ggcgcgccagtcctactatgacggtgcaagtactttgtacctataaacgtgcctttttagataagttagatgttaatagtggttttgctgtttttgttaagtctaaagttggtaactatcgtttaccgtctagtaaacctagtggtatggatactgccttgttaagagcttaaactcctcactccgcacgactcggaccgatg

SEQ ID NO: 13378 - DNA, 203 bp, Artificial sequence
  synthetic
ggcgcgccagtccttggtacgcggtgctggtcctagggaagctcaagtcactttgtaaccgagtgattgcacatgatttcctggccttcattctgcaccggctctctctgccccgtgaccgacaggccttggtcaaaaagcatgcccagacctttttggccctctgtgctacagattatacctttgcccgactcggaccgatg

SEQ ID NO: 13379 - DNA, 203 bp, Artificial sequence
  synthetic
ggcgcgccagtcctaatgagaaggtgctggtcctagggaagctcaagtgggacctggctgctgtgattgcacatgaccctagaaggcagcttctgcaccggctctctctgccccgtgaccgacaggccttggtcaaaaagcatgcccagacctttttggccctctgtgctacagattatacctttgcccgactcggaccgatg

SEQ ID NO: 13380 - DNA, 203 bp, Artificial sequence
  synthetic
ggcgcgccagtcctgttcaattggtgctggtcctagggaagctcaagtgggacctggctgctgtgattgcacatgatttcctggccttcagcggatcaatcacgtctctgccccgtgaccgacaggccttggtcaaaaagcatgcccagacctttttggccctctgtgctacagattatacctttgcccgactcggaccgatg

SEQ ID NO: 13381 - DNA, 203 bp, Artificial sequence
  synthetic
ggcgcgccagtcctcacgctggggtgctggtcctagggaagctcaagtgggacctggctgctgtgattgcacatgatttcctggccttcattctgcaccggctcgggggagtggaccgccgacaggccttggtcaaaaagcatgcccagacctttttggccctctgtgctacagattatacctttgcccgactcggaccgatg

SEQ ID NO: 13382 - DNA, 203 bp, Artificial sequence
  synthetic
ggcgcgccagtcctgatgaatcggtgctggtcctagggaagctcaagtgggacctggctgctgtgattgcacatgatttcctggccttcattctgcaccggctctctctgccccgtgaccgacaggccttggattggcgcgcgtagcagacctttttggccctctgtgctacagattatacctttgcccgactcggaccgatg

SEQ ID NO: 13383 - DNA, 203 bp, Artificial sequence
  synthetic
ggcgcgccagtcctttaaggagggtgctggtcctagggaagctcaagtgggacctggctgctgtgattgcacatgatttcctggccttcattctgcaccggctctctctgccccgtgaccgacaggccttggtcaaaaagcatgccacacgggccggcttcctctgtgctacagattatacctttgcccgactcggaccgatg

SEQ ID NO: 13384 - DNA, 203 bp, Artificial sequence
  synthetic
ggcgcgccagtcctcgggtttgggtgctggtcctagggaagctcaagtgggacctggctgctgtgattgcacatgatttcctggccttcattctgcaccggctctctctgccccgtgaccgacaggccttggtcaaaaagcatgcccagacctttttggccctctgtgctacagattatacctttgcccgactcggaccgatg

SEQ ID NO: 13385 - DNA, 203 bp, Artificial sequence
  synthetic
ggcgcgccagtcctttgggactggtgctggtcctagggaagctcaagtgggacctggctgctgtgattgcacatgatttcctggccttcattctgcaccggctctctctgccccgtgaccgacaggccttggtcaaaaagcatgcccagacctttttggccctctgtgctacagcgctccgaagatatcgactcggaccgatg

SEQ ID NO: 13386 - DNA, 203 bp, Artificial sequence
  synthetic
ggcgcgccagtcctgggtagaaggtgctggtcctccctcgagaaggtggggacctggctgctgtgattgcacatgatttcctggccttcattctgcaccggctctctctgccccgtgaccgacaggccttggtcaaaaagcatgcccagacctttttggccctctgtgctacagattatacctttgcccgactcggaccgatg

SEQ ID NO: 13387 - DNA, 203 bp, Artificial sequence
  synthetic
ggcgcgccagtcctgaggttcgggtgcttagccgcgttttactgtcagctcgacttcggagaggcagcgcggttcctctgggtgcttccgcctccccttctcctgcttctccagcctcttcggcctcctcgcccgccgcgggaacccgagaccccagtgtatgccccacccctgaccccgctcgcgaccgactcggaccgatg

SEQ ID NO: 13388 - DNA, 203 bp, Artificial sequence
  synthetic
ggcgcgccagtcctagttaagaggtgcttagccggcgccagaccgaccctcgacttcggagaggcagcgcggttcctctgggtgcttccgaagattaagaagaggcttctccagcctcttcggcctcctcgcccgccgcgggaacccgagaccccagtgtatgccccacccctgaccccgctcgcgaccgactcggaccgatg

SEQ ID NO: 13389 - DNA, 203 bp, Artificial sequence
  synthetic
ggcgcgccagtcctagaccctgggtgcttagccggcgccagaccgaccctcgacttcggagaggcagcgcggttcctctgggtgcttccgcctccccttctcctcggggcagtatactttcggcctcctcgcccgccgcgggaacccgagaccccagtgtatgccccacccctgaccccgctcgcgaccgactcggaccgatg

SEQ ID NO: 13390 - DNA, 203 bp, Artificial sequence
  synthetic
ggcgcgccagtccttttgtataggtgcttagccggcgccagaccgaccctcgacttcggagaggcagcgcggttcctctgggtgcttccgcctccccttctcctgcttctccagcctccggtatggtgcactccgccgcgggaacccgagaccccagtgtatgccccacccctgaccccgctcgcgaccgactcggaccgatg

SEQ ID NO: 13391 - DNA, 203 bp, Artificial sequence
  synthetic
ggcgcgccagtcctgcaattccggtgcttagccggcgccagaccgaccctcgacttcggagaggcagcgcggttcctctgggtgcttccgcctccccttctcctgcttctccagcctcttcggcctcctcgcccgccgcgggaacccgagaccccagtgtgcatattggtaggcaccccgctcgcgaccgactcggaccgatg

SEQ ID NO: 13392 - DNA, 203 bp, Artificial sequence
  synthetic
ggcgcgccagtccttgaccattggtgcttagccggcgccagaccgaccctcgacttcggagaggcagcgcggttcctctgggtgcttccgcctccccttctcctgcttctccagcctcttcggcctcctcgcccgccgcgggaaccgtgtgtatgtcgtaatgccccacccctgaccccgctcgcgaccgactcggaccgatg

SEQ ID NO: 13393 - DNA, 203 bp, Artificial sequence
  synthetic
ggcgcgccagtcctatatccttggtgcttagccggcgccagaccgaccctcgacttcggagatctttactctactgtctgggtgcttccgcctccccttctcctgcttctccagcctcttcggcctcctcgcccgccgcgggaacccgagaccccagtgtatgccccacccctgaccccgctcgcgaccgactcggaccgatg

SEQ ID NO: 13394 - DNA, 203 bp, Artificial sequence
  synthetic
ggcgcgccagtcctctcgaattggtggagttctccttcccactcgcctcagatagattctgtctgacgggcagtggcgagctgtggtggcaggcggagagggcttcctcctccaagtcttggatcacctttgacctgaagaacaaggaagtgtctgtaaaacgggttacccaggaccctaagctccagcgactcggaccgatg

SEQ ID NO: 13395 - DNA, 203 bp, Artificial sequence
  synthetic
ggcgcgccagtcctttgcgtgtggtggagttctccttcccactcgcctttacagttgaaaagctgacgggcagtggatgatcccccatctaggcggagagggcttcctcctccaagtcttggatcacctttgacctgaagaacaaggaagtgtctgtaaaacgggttacccaggaccctaagctccagcgactcggaccgatg

SEQ ID NO: 13396 - DNA, 203 bp, Artificial sequence
  synthetic
ggcgcgccagtcctggatgcttggtggagttctccttcccactcgcctttacagttgaaaagctgacgggcagtggcgagctgtggtggcaggcggagagggcttcctcctccaagtcttggatcacctttgacctgaagaacaagacttgaataccttcacgggttacccaggaccctaagctccagcgactcggaccgatg

SEQ ID NO: 13397 - DNA, 203 bp, Artificial sequence
  synthetic
ggcgcgccagtcctatatgaacggtggagttctccttcccactcgcctttacagttgaaaagctgacgggcagtggcgagctgtggtggcaggcggagagggcttcctcctccaagtcttggatcacctttgacctgaagaacaaggaagtgtctgtaaaacgggttacccagggtagcgctagggcacgactcggaccgatg

SEQ ID NO: 13398 - DNA, 203 bp, Artificial sequence
  synthetic
ggcgcgccagtcctactgtcgcggtggagttctccttcccactcgcctttacagttgaaaagctgacgggcagtggcgagctgtggtggcgtaacatcccactatcctcctccaagtcttggatcacctttgacctgaagaacaaggaagtgtctgtaaaacgggttacccaggaccctaagctccagcgactcggaccgatg

SEQ ID NO: 13399 - DNA, 203 bp, Artificial sequence
  synthetic
ggcgcgccagtcctcgagcccgggtggcggctcggctactgctcgtggaggggaatacaggccaatatcttgttttaatgcagggttgctggggctgggcccagaagcagcagcaccagggaagaggattcgaaaaccctctctcttgtatgagggctttgagagccccacaatggcttcggtgcctgcgactcggaccgatg

SEQ ID NO: 13400 - DNA, 203 bp, Artificial sequence
  synthetic
ggcgcgccagtcctgccgtcctggtggcggctcggctactgctcgtggaggggaatacaggctccctggggaagggaatgcagggttgctacttggcaagaagaaagcagcagcaccagggaagaggattcgaaaaccctctctcttgtatgagggctttgagagccccacaatggcttcggtgcctgcgactcggaccgatg

SEQ ID NO: 13401 - DNA, 203 bp, Artificial sequence
  synthetic
ggcgcgccagtcctcaagcgatggtggcggctcggctactgctcgtggaggggaatacaggctccctggggaagggaatgcagggttgctggggctgggcccagaagcagcagcaccaactgctgctggagtaaaaccctctctcttgtatgagggctttgagagccccacaatggcttcggtgcctgcgactcggaccgatg

SEQ ID NO: 13402 - DNA, 203 bp, Artificial sequence
  synthetic
ggcgcgccagtcctcagtacagggtggcggctcggctactgctcgtggaggggaatacaggctccctggggaagggaatgcagggttgctggggctgggcccagaagcagcagcaccagggaagaggattcgaaaaccctctctctacctacgactggcagagagccccacaatggcttcggtgcctgcgactcggaccgatg

SEQ ID NO: 13403 - DNA, 203 bp, Artificial sequence
  synthetic
ggcgcgccagtccttgctcaaaggtgtacagttcggcgcccgaacagggacctgaaagcgaaagggaaaccagaggagctctctcgacgcaggactcggcttgctgaagcgcgcacggcaagaggcgaggggcggcgactggtgagtacgccaaaaattttgactagcggaggctagaaggagagagacgactcggaccgatg

SEQ ID NO: 13404 - DNA, 203 bp, Artificial sequence
  synthetic
ggcgcgccagtccttgaatacgggtgtatgtcgtacccgtccccttccccaccctctggcccccaccttcttggaggcgacaacccccgggaggcattagaagggatttttcccgcaggttgcgaagggaagcaaacttggtggcaacttgcctcccggtgcgggcgtctctcccccaccgtctcaaccgactcggaccgatg

SEQ ID NO: 13405 - DNA, 203 bp, Artificial sequence
  synthetic
ggcgcgccagtcctataaatccggtgtgcaaatcacgcctggcagcccctgcccacagtacccgaagatggcaggccttgttcccttcacctaaattcataaacgcttagacgcatctttctgatgctgatttgtttctcttttcagtaagtgtggacctttgtgtaccagagagaacatcatggtggcgactcggaccgatg

SEQ ID NO: 13406 - DNA, 203 bp, Artificial sequence
  synthetic
ggcgcgccagtcctcgttctacggtgtgcaaatcacgcctggcagcccctgcccacagtacccgaagatggcaggccttgttcccttcactggccgcacccgcgctgggtgtagtggcttctgatgctgatttgtttctcttttcagtaagtgtggacctttgtgtaccagagagaacatcatggtggcgactcggaccgatg

SEQ ID NO: 13407 - DNA, 203 bp, Artificial sequence
  synthetic
ggcgcgccagtcctacgaagaaggtgtgcaaatcacgcctggcagcccctgcccacagtacccgaagatggcaggcggacgcgaaggggtctaaattcataaacctgggtgtagtggcttctgatgctgatttgtttctcttttcagtaagtgtggacctttgtgtaccagagagaacatcatggtggcgactcggaccgatg

SEQ ID NO: 13408 - DNA, 203 bp, Artificial sequence
  synthetic
ggcgcgccagtcctgcgttctgggtgtgcaaatcacgcctggcagcccctgcccacagtaccgtgcacatcagccacttgttcccttcacctaaattcataaacctgggtgtagtggcttctgatgctgatttgtttctcttttcagtaagtgtggacctttgtgtaccagagagaacatcatggtggcgactcggaccgatg

SEQ ID NO: 13409 - DNA, 203 bp, Artificial sequence
  synthetic
ggcgcgccagtcctttcgctttggttacccatagtccatccgttgaagcaataaactcagtattaaggcttgttgtgttggacaaggtgccctatttagggtgaggagccttactggcagccccagtgaatcctccattggataggaacagctatattgggtagttgtagcagttgtattcaaatgaacgactcggaccgatg

SEQ ID NO: 13410 - DNA, 203 bp, Artificial sequence
  synthetic
ggcgcgccagtcctccaggctaggttacccatcattagaggaaatttccaataaactctggtcctgatacatctaggatggtcgaggtgccctatttagggtgaggagcctcggtggcagccccaccaaatcctctattggataggaacagctgtactgggcagttacagcagtcgtatggtaacacacgactcggaccgatg

SEQ ID NO: 13411 - DNA, 203 bp, Artificial sequence
  synthetic
ggcgcgccagtcctgctgggcgggttacccatcattagaggaaatttccaataaactctggtgtaaggcttagagtgatggtcgaggtgccctatttagggtgaggagcctcggtggcagccccaccaaatcctctattggataggaacagctgtactggattaagtgcaaccccgtatggtaacacacgactcggaccgatg

SEQ ID NO: 13412 - DNA, 203 bp, Artificial sequence
  synthetic
ggcgcgccagtcctacctatgaggttacccatcattagaggaaatttccaataaactctggtgtaaggcttagagtgatggtcgaggtgccctatttagggtgaggagcctcggtggcagccccaccaaatcctctattggataggcttttgcacctatcgcagttacagcagtcgtatggtaacacacgactcggaccgatg

SEQ ID NO: 13413 - DNA, 203 bp, Artificial sequence
  synthetic
ggcgcgccagtcctgagtaaacggttacccatcattagaggaaatttcggtccccaaagcaagtaaggcttagagtgatggtcgaggtgccctatttagggtgaggagcctcggtggcagccccaccaaatcctctattggataggaacagctgtactgggcagttacagcagtcgtatggtaacacacgactcggaccgatg

SEQ ID NO: 13414 - DNA, 203 bp, Artificial sequence
  synthetic
ggcgcgccagtcctgagaccggggttcgaagtaaagcgaccggcgcctttggctgaggaggaggagaaggaggaatcgcgccaggcggagcgtcaggtcccgttttcctctccggcgtctccaatacaaagattacggtgcagaaggaaattgcactcgtctcctccgcgcccccggtacccaacacacgactcggaccgatg

SEQ ID NO: 13415 - DNA, 203 bp, Artificial sequence
  synthetic
ggcgcgccagtcctattcgtagggttctccgcccctgccactgggccatggagactgtggcacagtagactgtagtgtgaggctcgcgggggcagtggccatggaggccgtgctgaacgagctggtgtctgtggaggacctgctgaagtttgaaaagaaatttcagtctgagaaggcagcaggctcggcgactcggaccgatg

SEQ ID NO: 13416 - DNA, 203 bp, Artificial sequence
  synthetic
ggcgcgccagtcctacaactctggttctccgcccctgccactgggccatggagactgtggcacagtagactgtagtgtgaggctcgcgggggcagtggccatggccttatccacccgagagctggtgtctgtggaggacctgctgaagtttgaaaagaaatttcagtctgagaaggcagcaggctcggcgactcggaccgatg

SEQ ID NO: 13417 - DNA, 203 bp, Artificial sequence
  synthetic
ggcgcgccagtcctgtaatggaggttctccgcccgatagctgataagttggagactgtggcacagtagactgtagtgtgaggctcgcgggggcagtggccatggaggccgtgctgaacgagctggtgtctgtggaggacctgctgaagtttgaaaagaaatttcagtctgagaaggcagcaggctcggcgactcggaccgatg

SEQ ID NO: 13418 - DNA, 203 bp, Artificial sequence
  synthetic
ggcgcgccagtcctaaacagtgggttgatgaaatgatatggactcaaaaagaattaaaagaagctttgtccgatgggatagtgaagtctcacaccaacatttacaattgttatttagatgcaccgttctcagtatatgtcaaggcttacttaagttagtaaaaacacatcagagtgggataagtgacacgactcggaccgatg

SEQ ID NO: 13419 - DNA, 203 bp, Artificial sequence
  synthetic
ggcgcgccagtccttagctctgggttgtgcatttatagtcccaaatcttttgtggtgagtatgttgctattatgttgttgttctactggttgctgtggcttctttagttgttttgcatcttctattagaggttgttgtgaatcaactaaacttccttattacgacgttgaaaagatccacatacagtacgactcggaccgatg

SEQ ID NO: 13420 - DNA, 203 bp, Artificial sequence
  synthetic
ggcgcgccagtcctcttggtacggttgtgcatttcagtcgtgctcatctttgtggtgagtatgttgctattatgttgttgttctactggttgctgtggcttctttagttgttttgcatcttctattagaggttgttgtgaatcaactaaacttccttattacgacgttgaaaagggtgcaccgattgtcgactcggaccgatg

SEQ ID NO: 13421 - DNA, 203 bp, Artificial sequence
  synthetic
ggcgcgccagtcctggaacgccggttgtgcatttcagtcgtgctcatctttgtggtgagtatgttgctattatgtttgataaggcggcactgctgtggcttctttagttgttttgcatcttctattagaggttgttgtgaatcaactaaacttccttattacgacgttgaaaagatccacatacagtacgactcggaccgatg

SEQ ID NO: 13422 - DNA, 203 bp, Artificial sequence
  synthetic
ggcgcgccagtccttacaggcagtaaaaaaacagctcaacgcctttttcgacaccagcggcggcttttgctgcaattttgtgaaggggaagatactgttgacgggaaacgcaaaaaaccagaaaggttaactgaaaaaccagaaagttaactggtaagtttagtctttttgtcttttatttcaggtcccgactcggaccgatg

SEQ ID NO: 13423 - DNA, 203 bp, Artificial sequence
  synthetic
ggcgcgccagtcctgcacaggagtaaaaaaacagctcaacgcctttttgtgtttgttttagagcttttgctgcaattttgtgaaggggaagatactgttgacggttccgcatgggtgacagaaaggttaactgaaaaaccagaaagttaactggtaagtttagtctttttgtcttttatttcaggtcccgactcggaccgatg

SEQ ID NO: 13424 - DNA, 203 bp, Artificial sequence
  synthetic
ggcgcgccagtcctgggtccgagtaacagcactgaaagcggtgtatcaagcatgacggccgtgggaactcctccttggtaacaaggacccacggggccaaaagccacgcccacacgggcccgtcatgtgtgcaaccccagcacggcgactttactgcgaaacccactttaaagtgacattgaaactggcgactcggaccgatg

SEQ ID NO: 13425 - DNA, 203 bp, Artificial sequence
  synthetic
ggcgcgccagtcctggtacctagtaacagcactgttgcttcgtagcggagcatgacggccgtatctcaaggcgtcaggtaacaaggacccacggggccaaaagccacgcccacacgggcccgtcatgtgtgcaaccccagcacggcgactttactgcgaaacccactttaaagtgacattgaaactggcgactcggaccgatg

SEQ ID NO: 13426 - DNA, 203 bp, Artificial sequence
  synthetic
ggcgcgccagtcctgtccgtcggtaacagcactgttgcttcgtagcggagcatgacggccgtgggaactcctccttctagctggcattttacggggccaaaagccacgcccacacgggcccgtcatgtgtgcaaccccagcacggcgactttactgcgaaacccactttaaagtgacattgaaactggcgactcggaccgatg

SEQ ID NO: 13427 - DNA, 203 bp, Artificial sequence
  synthetic
ggcgcgccagtcctggcgggcagtaacagcactgttgcttcgtagcggagcatgacggccgtgggaactcctccttggtaacaaggacccacggggccaaaagccacgcccacacgggcccgtcatgtgtgcaaccccagcacggcccgcccgggaaacgacccactttaaagtgacattgaaactggcgactcggaccgatg

SEQ ID NO: 13428 - DNA, 203 bp, Artificial sequence
  synthetic
ggcgcgccagtcctactgtgcagtaacagcactgttgcttcgtagcggagcatgacggccgtgggaactcctccttggtaacaaggacccacggggccaaaagccacgcccacacgggtatcgacatgcgagaaccccagcacggcgactttactgcgaaacccactttaaagtgacattgaaactggcgactcggaccgatg

SEQ ID NO: 13429 - DNA, 203 bp, Artificial sequence
  synthetic
ggcgcgccagtcctctgctgaagtaacagcactgttgcttcgtagcggcagcaacgccaaaagggaactcctccttggtaacaaggacccacggggccaaaagccacgcccacacgggcccgtcatgtgtgcaaccccagcacggcgactttactgcgaaacccactttaaagtgacattgaaactggcgactcggaccgatg

SEQ ID NO: 13430 - DNA, 203 bp, Artificial sequence
  synthetic
ggcgcgccagtccttcgcttcggtaacgtccaaggcaagctccccacgacccgaacacgcccagaggaaccttggggcctctggggacttggctagcaggtattcatgctagcctggaccatttttcagatttagccttcagaagaggatctgggaaagcctttggattatacttgtcgcagccggcccgactcggaccgatg

SEQ ID NO: 13431 - DNA, 203 bp, Artificial sequence
  synthetic
ggcgcgccagtcctggaaagtggtaacgtccaaggcaagctccccacgacccgaacacgcccagaggaaccttggggcctctggggacttggctagcaggtattgccttacagaattcccatttttcagatttagccttcagaagaggatctgggaaagcctttggattatactgaaactcattcaagcgactcggaccgatg

SEQ ID NO: 13432 - DNA, 203 bp, Artificial sequence
  synthetic
ggcgcgccagtcctgcctcactgtaacgtccaaggcaagctccccacgacccgaacacgcccagaggaaccttgggtaggtcccccttgcggctagcaggtattcatgctagcctggaccatttttcagatttagccttcagaagaggatctgggaaagcctttggattatactgaaactcattcaagcgactcggaccgatg

SEQ ID NO: 13433 - DNA, 203 bp, Artificial sequence
  synthetic
ggcgcgccagtcctccacaccagtaactgagagggtactgtgatctgcccaaagtcctaatgtgcagtcaggtgaatttattgaaaaatttgaggctcctggtggtgcaaatcaaagaactgctcctcagtggatgttgcctttacttctaggcctgtacggaagtgttacttctgctctaaaagcttcgactcggaccgatg

SEQ ID NO: 13434 - DNA, 203 bp, Artificial sequence
  synthetic
ggcgcgccagtcctttaaactcgtaactgagaggtgggaagctcaaagccaaagtcctaatgtgcagtcaggtgaaggatacactttccgtgaggctcctggtggtgcaaatcaaagaactgctcctcagtggatgttgcctttacttctaggcctgtacggaagtgttacttctgctctaaaagcttcgactcggaccgatg

SEQ ID NO: 13435 - DNA, 203 bp, Artificial sequence
  synthetic
ggcgcgccagtcctgatggtgagtaactgagaggtgggaagctcaaagccaaagtcctaatgtgcagtcaggtgaatttattgaaaaatttgaggctcctggtggtgcaaatcaaagaactgctcctcagtggatgttgcctttacggtccttgtccgtgggaagtgttacttctgctctaaaagcttcgactcggaccgatg

SEQ ID NO: 13436 - DNA, 203 bp, Artificial sequence
  synthetic
ggcgcgccagtcctgactaatagtaactgagaggtgggaagctcaaagccaaagtcctaatgtgcagtcaggtgaatttattgaaaaatttgaggctcctggtggtgcaaatcaaagactctggtaggccacgatgttgcctttacttctaggcctgtacggaagtgttacttctgctctaaaagcttcgactcggaccgatg

SEQ ID NO: 13437 - DNA, 203 bp, Artificial sequence
  synthetic
ggcgcgccagtcctaccgcacagtaccttccgtgattcagtatggaaagaataaaagaactacggaacctgatgtcgcagtctcgcactcgcgagatactgacaaaaaccacagtggaccatatggccataattaagaagtacacatcggggagacaggaaaagaacccgtcacttaggatgaaatggcgactcggaccgatg

SEQ ID NO: 13438 - DNA, 203 bp, Artificial sequence
  synthetic
ggcgcgccagtcctgagatggcgtagacaaagacgttctgcctaaagctgaattcccagcgctttggcttctctgagttggggttgtgtataggggtcttcgaacagttccggaaccagccagcagcctttaattcttgggcggaccacggccggttctgtgttcttggctaagatgagcagccaccacgactcggaccgatg

SEQ ID NO: 13439 - DNA, 203 bp, Artificial sequence
  synthetic
ggcgcgccagtcctcccggaacgtagatatagtcaatcaactggtctgacaagtcataccccaaacaatccaaatctggaatcacctgttcgctcagtagtaattatcgaatggggcgtacactaacctcgtctgtactgtctgaaagtggtcaggattgattgacagttattatttatctttaagcacgactcggaccgatg

SEQ ID NO: 13440 - DNA, 203 bp, Artificial sequence
  synthetic
ggcgcgccagtcctaaggcatggtagatatagtccccggtacccgtgcacaagtcataccccaaacaatccaaatctggaatcacctgttcgctcagtagtaatatcttggcaaacactacactaacctcgtctgtactgtctgaaagtggtcaggattgattgacagttattatttatctttaagcacgactcggaccgatg

SEQ ID NO: 13441 - DNA, 203 bp, Artificial sequence
  synthetic
ggcgcgccagtccttaggatcagtagatgcagctatgttgtaaggctttagagaaataagggagtgtcctatttaggatgaggtgctccggtggcagccccaccaaaacctctagcgactaggaacagctatatcgggttgctatagcagtcaggatgtcattctggcgttccgaaatacccaaacctcgactcggaccgatg

SEQ ID NO: 13442 - DNA, 203 bp, Artificial sequence
  synthetic
ggcgcgccagtcctattacggagtagcaagtgaagccctgcccccgggccctgtgcttataacctgggatgggcacccctgccagtcctgctctgccgcctgccaccgctgcccgagcccgagtggttcactgcactgtgaaaacagattccagacgccgggaactcacgcctccaatcccagacgctcgactcggaccgatg

SEQ ID NO: 13443 - DNA, 203 bp, Artificial sequence
  synthetic
ggcgcgccagtcctccgtctatgtaggacataccccaaatattgggttccactcgtagagaagaaaattagtggcgaaacgtacggtttaccgtgttccctcctgtgattttaattgcacctgaagcaaccctaggtcttccctttgatgtgagctaataaggagtaaccgattcttacaatgtgatccgactcggaccgatg

SEQ ID NO: 13444 - DNA, 203 bp, Artificial sequence
  synthetic
ggcgcgccagtcctaacactacgtaggacataccccaaatattgggttccactcgtagagaagaaaattagtggcgaaacgtacggtttatgtcaaaggagaaggtgattttaattgcacctgaagcaaccctaggtcttccctttgatgtgagctaatattcgtcgttgttcacttacaatgtgatccgactcggaccgatg

SEQ ID NO: 13445 - DNA, 203 bp, Artificial sequence
  synthetic
ggcgcgccagtcctcggtcatcgtaggacataccccaaatattgggttccactcgtagagaagaaaattagtggcgccggtgcgaacgagtgtcaaaggagaaggtgattttaattgcacctgaagcaaccctaggtcttccctttgatgtgagctaataaggagtaaccgattcttacaatgtgatccgactcggaccgatg

SEQ ID NO: 13446 - DNA, 203 bp, Artificial sequence
  synthetic
ggcgcgccagtcctcaattgtggtaggacatacctattgctaaatacgccactcgtagagaagaaaattagtggcgaaacgtacggtttatgtcaaaggagaaggtgattttaattgcacctgaagcaaccctaggtcttccctttgatgtgagctaataaggagtaaccgattcttacaatgtgatccgactcggaccgatg

SEQ ID NO: 13447 - DNA, 203 bp, Artificial sequence
  synthetic
ggcgcgccagtccttccttcaggtatatgcatgtatgtgtatgtgtatatatgtatgtgtgtgtatgtatatgtgtgtgtatgtgtatgtgtgtgtgtatgtgtgtgtgtatgtatgtatgtatgtatatgtcagtgggttggcgccacatattggtttttttaatcatttgagagttagttgaagatcgactcggaccgatg

SEQ ID NO: 13448 - DNA, 203 bp, Artificial sequence
  synthetic
ggcgcgccagtccttagggcaagtatatgcatgtatgtgtatgtgtatatatgtatgtgtgtgtatgtatatgtgtgtgtatgtgtatgtgtgtgtgtatgtgtgtgtgtatgtatgtgctaccactatatgattatacacatatacacatattggtttttttaatcatttgagagttagttgaagatcgactcggaccgatg

SEQ ID NO: 13449 - DNA, 203 bp, Artificial sequence
  synthetic
ggcgcgccagtcctatcacgctgtatatgcatgtatgtgtatgtgtatatatgtatgtgtgtgtatgtatatgtgttgtatccgtccacagtgtgtgtatgtgtgtgtgtatgtatgtatgtatgtatatgtattatacacatatacacatattggtttttttaatcatttgagagttagttgaagatcgactcggaccgatg

SEQ ID NO: 13450 - DNA, 203 bp, Artificial sequence
  synthetic
ggcgcgccagtcctttatttatgtatatgcatgtatgtgtatgtgtatgggccggcagtaaagtatgtatatgtgtgtgtatgtgtatgtgtgtgtgtatgtgtgtgtgtatgtatgtatgtatgtatatgtattatacacatatacacatattggtttttttaatcatttgagagttagttgaagatcgactcggaccgatg

SEQ ID NO: 13451 - DNA, 203 bp, Artificial sequence
  synthetic
ggcgcgccagtcctctaatgatgtatcctatgagcgccggcgctcgcaggccgcggatgaagaagaaaacccggcgccgctcgacccggagcgaggagttgacccggagcgaggagttgaccctgagtgaggaagcgacctggagtgaagaggcgacccagagtgaggaggcgacccagggcgaagagcgactcggaccgatg

SEQ ID NO: 13452 - DNA, 203 bp, Artificial sequence
  synthetic
ggcgcgccagtccttctcctgagtatgggaatcggcatgaacttactctaggatctctcgtagagggataggtgtgccattcaaatccagggagtactctggctctgacattgggacatttgatgtaaccggacctggttcagtatccgggttgtcctgtattgttacggtgtatccgtcttggcacacgactcggaccgatg

SEQ ID NO: 13453 - DNA, 203 bp, Artificial sequence
  synthetic
ggcgcgccagtcctgaccatgtgtatgggaatcgtgtatggggatgattaggatctctcgtagagggataggtgtgccattcaaatccagggagtactctggctctgacattgggacatttgatgtaaccggacctggttcagtatccgggttgtcctgtattgttacggtgtatccgtcttggcacacgactcggaccgatg

SEQ ID NO: 13454 - DNA, 203 bp, Artificial sequence
  synthetic
ggcgcgccagtccttacgaaaggtatgggaatcgtgtatggggatgattaggatctctcgtatgtttcgcctccaaccattcaaatccagggagtactctggctctgacattgggacatttgatgtaaccggacctggttcagtatccgggttgtcctgtattgttacggtgtatccgtcttggcacacgactcggaccgatg

SEQ ID NO: 13455 - DNA, 203 bp, Artificial sequence
  synthetic
ggcgcgccagtccttgaaaccagtcatcgtaatatagccatagtggcgagctccctgggtggtctaagtcctgagtacaggacagtcgtcagtagttcgacgtgagcagaagcccacctcgagatgctacgtggacgagggcatgccaagacacaccttaaccctagcgggggtcgctagggtgaaatcgactcggaccgatg

SEQ ID NO: 13456 - DNA, 203 bp, Artificial sequence
  synthetic
ggcgcgccagtccttcctggctgtccacgatgcagccccggggccccgccgcgggaccgcgagccttgtgtgagcggaggggtgcccggccccgcgggagccggcgatcctgaggctacgacctttcggaagcacctgcctccgtcaccagcgcaagcttttccaacacccctgagtacgatacacaccgactcggaccgatg

SEQ ID NO: 13457 - DNA, 203 bp, Artificial sequence
  synthetic
ggcgcgccagtcctaaacatacgtccacgatgcagccccggggccccgccgcgggaccgcgagccttgtgtgagcggaggggtgcccggccccgcgggagccggcgatcctgaggctacgacctttcggaaggttacaagctttaaaccagcgcaagcttttccaacacccctgctccgcccttcttgcgactcggaccgatg

SEQ ID NO: 13458 - DNA, 203 bp, Artificial sequence
  synthetic
ggcgcgccagtcctgcgtgtaagtccacgatgcagccccggggccccgccgcgggaccgcgagccttgtgtgagcggaggggtgcccggcgataattcttaatccgatcctgaggctacgacctttcggaagcacctgcctccgtcaccagcgcaagcttttccaacacccctgctccgcccttcttgcgactcggaccgatg

SEQ ID NO: 13459 - DNA, 203 bp, Artificial sequence
  synthetic
ggcgcgccagtcctgacaaaccgtccacgatgcagccccggggccccggaatttttgtaaacgccttgtgtgagcggaggggtgcccggccccgcgggagccggcgatcctgaggctacgacctttcggaagcacctgcctccgtcaccagcgcaagcttttccaacacccctgctccgcccttcttgcgactcggaccgatg

SEQ ID NO: 13460 - DNA, 203 bp, Artificial sequence
  synthetic
ggcgcgccagtcctctcgttgtgtccactaccttaactagctcgctgacccgttgtcccaaggcttcccagagcgaacctgtgcggctgcaggcaccggcgcgtcgagtttccggcgtccggaaggaccgagctcttctcgcggatccagtgttccgtttccagcccccaatctcagagcggagccgacgactcggaccgatg

SEQ ID NO: 13461 - DNA, 203 bp, Artificial sequence
  synthetic
ggcgcgccagtccttcagaagagtccactacctttttcgagagtgactcccgttgtcccaaggcttcccagagcgaacctgtgcggctgcaggcaccggcgcgtaataacataataccccggaaggaccgagctcttctcgcggatccagtgttccgtttccagcccccaatctcagagcggagccgacgactcggaccgatg

SEQ ID NO: 13462 - DNA, 203 bp, Artificial sequence
  synthetic
ggcgcgccagtcctgcagattcgtccactacctttttcgagagtgactcccgttgtcccaaggcttcccagagcgaacctgtgcggctgcgccttggtaattagcgagtttccggcgtccggaaggaccgagctcttctcgcggatccagtgttccgtttccagcccccaatctcagagcggagccgacgactcggaccgatg

SEQ ID NO: 13463 - DNA, 203 bp, Artificial sequence
  synthetic
ggcgcgccagtcctgattagatgtccgcaaagccggtggcgcccggaggctgcacggagagcggtgcccgcgtcagtgaccgaaggaagagaccaagatgaatgatcgttagtcagtcaagtttggcgtggtggtggttggtgttggccgagccggctccgtgcggatgagggacttgcggaatccaccgactcggaccgatg

SEQ ID NO: 13464 - DNA, 203 bp, Artificial sequence
  synthetic
ggcgcgccagtcctgacatattgtcctgaagctcgactgcccggaaaggttcatgcaccttcttgccaagcctcagtctttgggatctggggaggccgcctggttttcctccctccttctgcacgtctgctggggtctcttcctctccaggccttgccgtccccctggcctctcttcccagctcacaccgactcggaccgatg

SEQ ID NO: 13465 - DNA, 203 bp, Artificial sequence
  synthetic
ggcgcgccagtcctgcgttaccgtcctgaagctctcgcagtgcagtgagttcatgcaccttcccaggtctagcacttctttgggatctggggaggccgcctggttttcctccctccttctgcacgtctgctggggtctcttcctctccaggccttgccgtccccctggcctctcttcccagctcacaccgactcggaccgatg

SEQ ID NO: 13466 - DNA, 203 bp, Artificial sequence
  synthetic
ggcgcgccagtcctgcctggtcgtcctgaagctctcgcagtgcagtgagttcatgcaccttcttgccaagcctcagtctttgggatctggggaggccgcctggtgggtgaagtcgaggctgcacgtctgctggggtctcttcctctccaggccttgccgtccccctggcctctcttcccagctcacaccgactcggaccgatg

SEQ ID NO: 13467 - DNA, 203 bp, Artificial sequence
  synthetic
ggcgcgccagtcctaagtctgagtcctgaagctctcgcagtgcagtgagttcatgcaccttcttgccaagcctcagtctttgggatctggggaggccgcctggttttcctccctccttctgcacgtctgctgcctcggtgattaagccaggccttgccgtccccctggcctctcttcccagctcacaccgactcggaccgatg

SEQ ID NO: 13468 - DNA, 203 bp, Artificial sequence
  synthetic
ggcgcgccagtcctagtctacagtcctgaagctctcgcagtgcagtgagttcatgcaccttcttgccaagcctcagtctttgggatctggggaggccgcctggttttcctccctccttctgcacgtctgctggggtctcttcctctccaggccttgccgtccccctggcctctccctgatcggttattcgactcggaccgatg

SEQ ID NO: 13469 - DNA, 203 bp, Artificial sequence
  synthetic
ggcgcgccagtcctactgccctgtcctgaagctctcgcagtgcagtgagttcatgcaccttcttgccaagcctcagtctttgggatctggggaggccgcctggttttcctccctccttctgcacgtctgctggggtctcttcctctccaggccttgccgtccccctggcctctcttcccagctcacaccgactcggaccgatg

SEQ ID NO: 13470 - DNA, 203 bp, Artificial sequence
  synthetic
ggcgcgccagtcctatcaagaggtcctgaagctctcgcagtgcagtgagttcatgcaccttcttgccaagcctcagtctttgggatctggggaggccgcctggttttcctccctccttctgcacgtctgctggggtctcttcctctttcacataactatcccccctggcctctcttcccagctcacaccgactcggaccgatg

SEQ ID NO: 13471 - DNA, 203 bp, Artificial sequence
  synthetic
ggcgcgccagtcctagcagcttgtcctgaagctctcgcagtgcagtgagttcatgcaccttcttgccaagcctcagtctttgggatctggtcttataaatgttatttcctccctccttctgcacgtctgctggggtctcttcctctccaggccttgccgtccccctggcctctcttcccagctcacaccgactcggaccgatg

SEQ ID NO: 13472 - DNA, 203 bp, Artificial sequence
  synthetic
ggcgcgccagtcctggacccatgtcctggcagcagcctctgacctgtccaggtgccctgtccagctgactgcaaggacagagaggagtcctgcccagctcttggatcagtctgctggccgaggagcccggtgataagtccaacagtcctggagcccagcctgccccgaggaggccccggctcagagcccgactcggaccgatg

SEQ ID NO: 13473 - DNA, 203 bp, Artificial sequence
  synthetic
ggcgcgccagtcctgaccactcgtcctggcagcagcctctgacctgtccaggtgccctgtccagctgactgcaaggacagagaggagtcctgcccagctcttggatcagtctgctggccgaggagcccggtggagccaggggtgaccctggagcccagcctgccccgaggaggcaagacactgccaatcgactcggaccgatg

SEQ ID NO: 13474 - DNA, 203 bp, Artificial sequence
  synthetic
ggcgcgccagtcctgtcattctgtcctggcagcagcctctgacctgtccaggtgccctgtccagctgactgcaaggacagagaggagtcctgcccagctcttggatcagtctgctggccgaggagcccggtggagccaggggtgaccctggagcccagcctgccccgaggaggccccggctcagagcccgactcggaccgatg

SEQ ID NO: 13475 - DNA, 203 bp, Artificial sequence
  synthetic
ggcgcgccagtccttcttcacggtcctggcagcagcctctgacctgtctttcccgggcagttagctgactgcaaggacagagaggagtcctgcccagctcttggatcagtctgctggccgaggagcccggtggagccaggggtgaccctggagcccagcctgccccgaggaggccccggctcagagcccgactcggaccgatg

SEQ ID NO: 13476 - DNA, 203 bp, Artificial sequence
  synthetic
ggcgcgccagtcctttcatcgcgtcgagccgcgctcacctcgggctcccgctccgtctccacctccgcctttgccctggcggcgcgaccccgtcccgggcgcggcccccagcagtcgcgcgccgttagcctcgcgcccgccgcgcacaatcattagcatacgatgggggccgccgccggccggagccccgactcggaccgatg

SEQ ID NO: 13477 - DNA, 203 bp, Artificial sequence
  synthetic
ggcgcgccagtccttaacgatagtcgccgccgcagtcctcgccgcagtcgccgccgccgccgccgccgccgccgctgctcctccgcctggaagactagtctaagccgcagccatgagcgtgctcggccccggtggagcccgcagtcctctagattagtctccaccgccgtccaggacccacttgcagccgactcggaccgatg

SEQ ID NO: 13478 - DNA, 203 bp, Artificial sequence
  synthetic
ggcgcgccagtccttgaaccacgtcgccgccgcagtcctcgccgcagtcgccgccgccgccgccgccgccgccgctgctcctccgcctggcctgggccgtctgcccgcagccatgagcgtgctcggccccggtggagcccgcagtcctctagattagtctccaccgccgtccagccggagtaccttttcgactcggaccgatg

SEQ ID NO: 13479 - DNA, 203 bp, Artificial sequence
  synthetic
ggcgcgccagtcctcctggacagtcgccgccgcagtcctcgccgcagttattaatattcgtcccgccgccgccgctgctcctccgcctggcctgggccgtctgcccgcagccatgagcgtgctcggccccggtggagcccgcagtcctctagattagtctccaccgccgtccaggacccacttgcagccgactcggaccgatg

SEQ ID NO: 13480 - DNA, 203 bp, Artificial sequence
  synthetic
ggcgcgccagtcctagattcgtgtcggagaccgggcgcgggagcccaggccagctttggggttgtccctggacttgtcttggttccagaacctgacgacccggcgacggcgacgtctcttttgactaaaagacagtgtccagtgctccagcctaggagtctacggggaccgcctcccgcgccgccacccgactcggaccgatg

SEQ ID NO: 13481 - DNA, 203 bp, Artificial sequence
  synthetic
ggcgcgccagtcctcataagcggtctacgtggacatgtcctctgtaggtctttgagggagctaagctcaacgtagttctaacagttttttaattagagagcagatctctgatgaataaccaacggaaaaaggcgaaaaacacgcctttcaatatgctgaaacgcgagagaaaccgcgtgtcgactgtgcgactcggaccgatg

SEQ ID NO: 13482 - DNA, 203 bp, Artificial sequence
  synthetic
ggcgcgccagtccttcgatcgtgtctacgtggaccgacaaagacagattctttgagggagctaagctcaacgtagttctaacagttttttaattagagagcagatctctgatgaataaccaacggaaaaaggcgaaaaacacgcctttcaatatgctgaaacgcgagagaaaccgcgtgtcgactgtgcgactcggaccgatg

SEQ ID NO: 13483 - DNA, 203 bp, Artificial sequence
  synthetic
ggcgcgccagtcctcggctagggtctacgtggaccgacaaagacagattctttgagggagctaagctcaacgtagttctaacagttttttctaagcccgtttagtctctgatgaataaccaacggaaaaaggcgaaaaacacgcctttcaatatgctgaaacgcgagagaaaccgcgtgtcgactgtgcgactcggaccgatg

SEQ ID NO: 13484 - DNA, 203 bp, Artificial sequence
  synthetic
ggcgcgccagtcctaatctttagtctacgtggaccgacaaagacagattctttgagggagctcccgatccgtgctctctaacagttttttaattagagagcagatctctgatgaataaccaacggaaaaaggcgaaaaacacgcctttcaatatgctgaaacgcgagagaaaccgcgtgtcgactgtgcgactcggaccgatg

SEQ ID NO: 13485 - DNA, 203 bp, Artificial sequence
  synthetic
ggcgcgccagtcctataatatcgtctacgtggaccgacaagaacagttatacgctacttaaatgcttaacgtagttctaacagttttttattagagagcagatctctgatgaacaaccaacggaaaaagacgggtcgaccgtctttcaatatgctgaaacgcgcgagaaaccgcgtgtcaactgtttccgactcggaccgatg

SEQ ID NO: 13486 - DNA, 203 bp, Artificial sequence
  synthetic
ggcgcgccagtcctgggccggcgtctacgtggaccgacaagaacagttcttttaaatttaaatgcttaacgtagtgctgacagttttttattagagagcagatctctgatgaacaaccaacggaagaagacgggaaaaccgtctatcaatatgctgaaacgcgtgagaaaccgtgtgtcaactggatccgactcggaccgatg

SEQ ID NO: 13487 - DNA, 203 bp, Artificial sequence
  synthetic
ggcgcgccagtcctctactgcggtctacgtggaccgacaagaacagtttcgaatcggaagcttgcttaacgtagtttccgttacccgcctttagagagcagatctctgatgaacaaccaacggaaaaagacgggtcgaccgtctttcaatatgctgaaacgcgcgagaaaccgcgtgtcaactgtttccgactcggaccgatg

SEQ ID NO: 13488 - DNA, 203 bp, Artificial sequence
  synthetic
ggcgcgccagtccttcagtgccgtctacgtggaccgacaagaacagtttcgactcggaagcttgcttaacgtagtgctgacagttttttacattgactagccagtctgatgaacaaccaacggaagaagacgggaaaaccgtctatcaatatgctgaaacgcgtgagaaaccgtgtgtcaactggatccgactcggaccgatg

SEQ ID NO: 13489 - DNA, 203 bp, Artificial sequence
  synthetic
ggcgcgccagtcctatacgtctgtctacgtggaccgacaagaacagtttcgactcggaagcttgcttaacgtagtgctgacagttttttattagagagcagatctctgatgaacaaccttgttctccgtggtggaaaaccgtctatcaatatgctgaaacgcgtgagaaaccgtgtgtcaactggatccgactcggaccgatg

SEQ ID NO: 13490 - DNA, 203 bp, Artificial sequence
  synthetic
ggcgcgccagtccttgggcaacgtctacgtggacgtggcgatgggtaatcgaatcggaagcttgcttaacgtagttctaacagttttttattagagagcagatctctgatgaacaaccaacggaaaaagacgggtcgaccgtctttcaatatgctgaaacgcgcgagaaaccgcgtgtcaactgtttccgactcggaccgatg

SEQ ID NO: 13491 - DNA, 203 bp, Artificial sequence
  synthetic
ggcgcgccagtcctctccgtgcgtctagggctatgtaactttcacgcctataagttgagattttcacaacttgaacccatttacaaacatgggcaattcaaaatctaaatccaacccatccagttcctcagagtctcaaaaaggggcaccaacagtcacagaatttaggaggactgccattcacagtccgactcggaccgatg

SEQ ID NO: 13492 - DNA, 203 bp, Artificial sequence
  synthetic
ggcgcgccagtccttggtgtccgtctccctcctcccctaaccaccccccgaagtgggtcaaacccgcagtaataaaggcccctgaacgtgtatgttggtctcccgggagctgcttgctgaagatccgcgcccctgtcgccgtctggtaggagctgtttgcagggtcctaactcaatcggcttgttgtgcgactcggaccgatg

SEQ ID NO: 13493 - DNA, 203 bp, Artificial sequence
  synthetic
ggcgcgccagtcctcaccacaagtctgacgccagggagctggagcaccgtgaggaagaagcgaggttctttttaagagttcagctgcgagatatcaaacaaagaattactctgtacaaagccagaacacatatatcaaagtaatcctgaagtatcagaacaaaataataggctgtaacagaggaggaacgactcggaccgatg

SEQ ID NO: 13494 - DNA, 203 bp, Artificial sequence
  synthetic
ggcgcgccagtcctaatgctatgtctgtgtggaccgacaaggacagttaggggctacctcaatgcttaacacagttctaacagtttgtttgaatagagagcagatctctggaaaaatgaaccaacgaaaaaaggtggttagaccacctttcaatatgctgaaacgcgagagaaaccgcgtatcaaccccgactcggaccgatg

SEQ ID NO: 13495 - DNA, 203 bp, Artificial sequence
  synthetic
ggcgcgccagtcctaaatggcagtctgtgtggaccgacaaggacagttccaaatcggaagcttgcttaacacagttctaacagtttgtttcttacactgagccttctctggaaaaatgaaccaacgaaaaaaggtggttagaccacctttcaatatgctgaaacgcgagagaaaccgcgtatcaaccccgactcggaccgatg

SEQ ID NO: 13496 - DNA, 203 bp, Artificial sequence
  synthetic
ggcgcgccagtccttggcattcgtctgtgtggaccgacaaggacagttccaaatcggaagcttgcttaacacagttctaacagtttgtttgaatagagagcagagtgtacatcctgataaccaacgaaaaaaggtggttagaccacctttcaatatgctgaaacgcgagagaaaccgcgtatcaaccccgactcggaccgatg

SEQ ID NO: 13497 - DNA, 203 bp, Artificial sequence
  synthetic
ggcgcgccagtcctgagcattggtctgttctgaactacaccatttactgctgtgaagaatgccctggaggcaagctggttacagccctgaccaggccctgcccgtgactctcgaccggcgcagggtcaaaaaagtatatcttccgtgcaggaacgcgggagcgtttcttttccttttgtactgacatgcgactcggaccgatg

SEQ ID NO: 13498 - DNA, 203 bp, Artificial sequence
  synthetic
ggcgcgccagtcctggcacggagtctgttctgaactacaccatttactgctgtgaagaatgccctggaggcaagctggttacagccctgaccaggccctgcccgtgactctcgaccggcgcagggtcaaaaattgtctaagcagcagcaggaacgcgggagcgtttcttttcctacctgcaccgttctcgactcggaccgatg

SEQ ID NO: 13499 - DNA, 203 bp, Artificial sequence
  synthetic
ggcgcgccagtcctacgtcgctgtctgttctgaactacaccatttactgctgtgaagaatgccctggaggcaagctggttacagccctgaccaggccctgcccgtgactctcgaccggcgcagggtcaaaaattgtctaagcagcagcaggaacgcgggataagccagccaaactttgtactgacatgcgactcggaccgatg

SEQ ID NO: 13500 - DNA, 203 bp, Artificial sequence
  synthetic
ggcgcgccagtccttagttgaggtctgttctgaactacaccatttactgctgtgaagaatgccctggaggcaagctggttacagccctgataccaggagagagttgactctcgaccggcgcagggtcaaaaattgtctaagcagcagcaggaacgcgggagcgtttcttttccttttgtactgacatgcgactcggaccgatg

SEQ ID NO: 13501 - DNA, 203 bp, Artificial sequence
  synthetic
ggcgcgccagtccttgtaagaggtctgttctgaactacaccatttactgctgtgaagaatgcgggctgtatggctgggttacagccctgaccaggccctgcccgtgactctcgaccggcgcagggtcaaaaattgtctaagcagcagcaggaacgcgggagcgtttcttttccttttgtactgacatgcgactcggaccgatg

SEQ ID NO: 13502 - DNA, 203 bp, Artificial sequence
  synthetic
ggcgcgccagtcctgattgcgtgtctgttctgaactacaccatttacttactcccccctgttcctggaggcaagctggttacagccctgaccaggccctgcccgtgactctcgaccggcgcagggtcaaaaattgtctaagcagcagcaggaacgcgggagcgtttcttttccttttgtactgacatgcgactcggaccgatg

SEQ ID NO: 13503 - DNA, 203 bp, Artificial sequence
  synthetic
ggcgcgccagtccttaaacgcggtctgttgtgtgactctggtaactagagatccctcagaccgaccccacggagaaggaaaatctctagcagtggcgcccgaacagggacctgaaagcgaaagggaaaccagaggagctctctcgacgcaggactcggcttgctgaagcgcgcacggcaagaggcgagcgactcggaccgatg

SEQ ID NO: 13504 - DNA, 203 bp, Artificial sequence
  synthetic
ggcgcgccagtcctgtcctggcgtgaacttgcctctctcaacaaaaagccaccgacattaagagagagagtattgcactggcccattgctcaggccctatttagggttaccgcccaggatctgcaacagcattcctgtatcatccagggcaccggtggacttggtgaggattgagttgacctcatcatcgactcggaccgatg

SEQ ID NO: 13505 - DNA, 203 bp, Artificial sequence
  synthetic
ggcgcgccagtcctagctacaagtgaacttgcctctctcaacaaaaagccaccgacattaagagagagagtattgctgcttagttaactgcaggccctatttagtccccaatttgtctatctgcaacagcattcctgtatcatccagggcaccggtggacttggtgaggattgagttgacctcatcatcgactcggaccgatg

SEQ ID NO: 13506 - DNA, 203 bp, Artificial sequence
  synthetic
ggcgcgccagtcctgaaacatagtgaacttgcctgcggatcgtgcgtcccaccgacattaagagagagagtattgctgcttagttaactgcaggccctatttagggttaccgcccaggatctgcaacagcattcctgtatcatccagggcaccggtggacttggtgaggattgagttgacctcatcatcgactcggaccgatg

SEQ ID NO: 13507 - DNA, 203 bp, Artificial sequence
  synthetic
ggcgcgccagtccttaacagcagtgaagggtgagatcgggaaacaaagggtatggccccctagttcccaaagggagcagggagatgggaatagaattgaaggtacagacctcctctgatgggaggaggaatatttaggtaattgtggagactttctcctgtgtgatgaaggcggcagacactgtgatccgactcggaccgatg

SEQ ID NO: 13508 - DNA, 203 bp, Artificial sequence
  synthetic
ggcgcgccagtcctacaatacagtgaagggtgagatcgggaaacaaagggtatggccccctagttcccaaagggagcagggagatgggaatagaattgaaggtaggttttaggctactattagcttaagtgttttaggtaattgtggagactttctcctgtgtgatgaaggcggcagacactgtgatccgactcggaccgatg

SEQ ID NO: 13509 - DNA, 203 bp, Artificial sequence
  synthetic
ggcgcgccagtcctgtaagcgtgtgaagggtgagatcgggaaacaaagggtatggccccctagttcccaaagggagcagggagatgggaatagaattgaaggtaggttttaggctacttgggaggaggaatatttaggtaattgtggagactttctcctgtgtgatgaaggcgggctggtgaagttagcgactcggaccgatg

SEQ ID NO: 13510 - DNA, 203 bp, Artificial sequence
  synthetic
ggcgcgccagtcctgttacaatgtgaagggtgagatcgggaaacaaagtacccccagtgagcgttcccaaagggagcagggagatgggaatagaattgaaggtaggttttaggctacttgggaggaggaatatttaggtaattgtggagactttctcctgtgtgatgaaggcggcagacactgtgatccgactcggaccgatg

SEQ ID NO: 13511 - DNA, 203 bp, Artificial sequence
  synthetic
ggcgcgccagtcctggccacgggtgatctgattagaagtaagaaaattcctagttataatatcgacgcgttataatcatttttaagacccttagttatttagctttaccgcccaggatggggtgcagcgttcctgcaatatccagggcacctaggtgcagccttgtagttttagtggactttaggctacgactcggaccgatg

SEQ ID NO: 13512 - DNA, 203 bp, Artificial sequence
  synthetic
ggcgcgccagtcctgggcatcagtgatctgattagaagtaagaaaattcctagttataatatttttaatactgctacatttttaagacccttagttatttagctcccggtaagcctggggggtgcagcgttcctgcaatatccagggcacctaggtgcagccttgtagttttagtggactttaggctacgactcggaccgatg

SEQ ID NO: 13513 - DNA, 203 bp, Artificial sequence
  synthetic
ggcgcgccagtccttgcaccgggtgatctgattagaagtaagaaaattcctagttataatatttttaatactgctaggagcccttctttgttagttatttagctttaccgcccaggatggggtgcagcgttcctgcaatatccagggcacctaggtgcagccttgtagttttagtggactttaggctacgactcggaccgatg

SEQ ID NO: 13514 - DNA, 203 bp, Artificial sequence
  synthetic
ggcgcgccagtcctacttgggtgtgatctgattagaagtaagaaaatttgcctagcattaggttttaatactgctacatttttaagacccttagttatttagctttaccgcccaggatggggtgcagcgttcctgcaatatccagggcacctaggtgcagccttgtagttttagtggactttaggctacgactcggaccgatg

SEQ ID NO: 13515 - DNA, 203 bp, Artificial sequence
  synthetic
ggcgcgccagtcctcgacacaggtgatctgattatgttggttgcgcaacctagttataatatttttaatactgctacatttttaagacccttagttatttagctttaccgcccaggatggggtgcagcgttcctgcaatatccagggcacctaggtgcagccttgtagttttagtggactttaggctacgactcggaccgatg

SEQ ID NO: 13516 - DNA, 203 bp, Artificial sequence
  synthetic
ggcgcgccagtcctgcgcccaggtgatcttgcttccttatacaattttctaccaccgtacctaaggaagtagtgctatcttaataattaggttaactatttagttttactgttcaggatgcctattggcagccccataatatccaggacaccctctctgcttcttatatgattaggttgtcatttagacgactcggaccgatg

SEQ ID NO: 13517 - DNA, 203 bp, Artificial sequence
  synthetic
ggcgcgccagtcctcaaagcacgtgatcttgcttccttatacaattttgagaggttaataagaaggaagtagtgctatcttaataattaggttaactatttagttttactgttcaggagtttggcgatggtacccataatatccaggacaccctctctgcttcttatatgattaggttgtcatttagacgactcggaccgatg

SEQ ID NO: 13518 - DNA, 203 bp, Artificial sequence
  synthetic
ggcgcgccagtcctcaaagtcggtgatcttgcttccttatacaattttgagaggttaataagaaggaagtagtgctatcttaataattaggttaactatttagttttactgttcaggatgcctattggcagccccataatatccaggacaccctctctgcttcttatatgattataggaagggcatttcgactcggaccgatg

SEQ ID NO: 13519 - DNA, 203 bp, Artificial sequence
  synthetic
ggcgcgccagtcctcgcgtggagtgatcttgcttccttatacaattttgagaggttaataagaaggaagtagtgctatcttaataattaggttaactatttagttttactgttcaggatgcctattggcagccccataatatccagtcgtagggtgggtattcttatatgattaggttgtcatttagacgactcggaccgatg

SEQ ID NO: 13520 - DNA, 203 bp, Artificial sequence
  synthetic
ggcgcgccagtcctccagaaccgtgatcttgcttgcggaggcaaaatttgcacagtataaaatctgcaagtagtgctattgttggaatcaccgtacctatttaggtttacgctccaagatcggtggatagcagccctatcaatatcccttcctctgagaatatgtttagaagattaggtagtctctaacgactcggaccgatg

SEQ ID NO: 13521 - DNA, 203 bp, Artificial sequence
  synthetic
ggcgcgccagtcctagaaccgagtgatcttgcttgcggaggcaaaatttgcacagtataaaatctgcaagtagtgctattgttggaatcaccgtacctatttaggtttacgctccaagatcggtggatagcagccctatcaatatctaggagaactgtgctatgtttagaagattaggtagtctctaacgactcggaccgatg

SEQ ID NO: 13522 - DNA, 203 bp, Artificial sequence
  synthetic
ggcgcgccagtcctaggagtgtgtgatcttgcttgcggaggcaaaatttgcacagtataaaatctgcaagtagtgctattgttggaatcattccgtaacgggttgtttacgctccaagatcggtggatagcagccctatcaatatctaggagaactgtgctatgtttagaagattaggtagtctctaacgactcggaccgatg

SEQ ID NO: 13523 - DNA, 203 bp, Artificial sequence
  synthetic
ggcgcgccagtcctctccaaccgtgatgctgggcgagagagagccgccgcgccggagcctccttctttcctgcctctgattccgggctgtcatggcgacccccaacaatctgacccccaccaactgcagctggtggcccatctccgacgaacccgaatgggcggccaagccagcggaggcccccgacgcgactcggaccgatg

SEQ ID NO: 13524 - DNA, 203 bp, Artificial sequence
  synthetic
ggcgcgccagtcctgtgcgaatgtgatgctgggcgagagagagccgccgcgccggagcctccttctttcctgcctctgattccgggctgtcatggcgacccccaacaatctgacccccaccaactgcagctggtggcccatctccgcgctggagagcgatagttagtgttgcctggaggcccccgacgcgactcggaccgatg

SEQ ID NO: 13525 - DNA, 203 bp, Artificial sequence
  synthetic
ggcgcgccagtccttagagcgcgtgatgctgggcgagagagagccgccgcgccggagcctccttctttcctgcctctgattccgggctgtcatggcgacccccaacaatctgacccccaccaactgcagctggtggcccatctccgcgctggagagcgatgcggccaagccagcggaggcccccgacgcgactcggaccgatg

SEQ ID NO: 13526 - DNA, 203 bp, Artificial sequence
  synthetic
ggcgcgccagtcctggtccgtggtgatgctgggcgagagagagccgccgcgccggagcctccttctttcctgcctctgattccgggctgtcatggcgacccccaacaatctgacccccaccaactgcagctgtctaagtcgtataccgctggagagcgatgcggccaagccagcggaggcccccgacgcgactcggaccgatg

SEQ ID NO: 13527 - DNA, 203 bp, Artificial sequence
  synthetic
ggcgcgccagtcctagcgcgaggtgatgctgggcgagagagagccgccgcgccggagcctccttctttcctgcctctgattccgggctgtcatggcgacccccaacaatctgacccccctaggtgctgctacgtggcccatctccgcgctggagagcgatgcggccaagccagcggaggcccccgacgcgactcggaccgatg

SEQ ID NO: 13528 - DNA, 203 bp, Artificial sequence
  synthetic
ggcgcgccagtcctcagtatttgtgattagaacggtggctgagtccctggcggggcgcggcggtggaaggtgtcgcgtacgggcttcccgagctgacgtggcttgaattgggaggggggcagctggagcctcaggcggcagcgcttctagaaatgctgagccgattatcaggattagcaaatgttgttcgactcggaccgatg

SEQ ID NO: 13529 - DNA, 203 bp, Artificial sequence
  synthetic
ggcgcgccagtccttccctgtagtgcactattcaacgggagatctattttccccttcgtcgatgttggagtgtcggctctcctgctagcagccggatgctggggacaagtcaccctcaccgttacggtaacagcggcaacactccttttttgccactatgcctacatggttcccggttggcaagctgacgactcggaccgatg

SEQ ID NO: 13530 - DNA, 203 bp, Artificial sequence
  synthetic
ggcgcgccagtcctctttggcggtgcactattcacactcgcgcgaggcaggattacttattgtgttggagtgtcggctctcctgctagcagccggatgctggggacaagtcaccctcaccgttacggtaacagcggcaacactccttttttgccactatgcctacatggttcccggttggcaagctgacgactcggaccgatg

SEQ ID NO: 13531 - DNA, 203 bp, Artificial sequence
  synthetic
ggcgcgccagtcctggacaaccgtgcactattcacactcgcgcgaggcttccccttcgtcgatgttggagtgtcggctctcctgctagcagccggatgctggggtgccactcttagtcccgttacggtaacagcggcaacactccttttttgccactatgcctacatggttcccggttggcaagctgacgactcggaccgatg

SEQ ID NO: 13532 - DNA, 203 bp, Artificial sequence
  synthetic
ggcgcgccagtcctccgctgccgtgcactattcacactcgcgcgaggcttccccttcgtcgatgttggagtgtcggtgtcagctacgtaggccggatgctggggacaagtcaccctcaccgttacggtaacagcggcaacactccttttttgccactatgcctacatggttcccggttggcaagctgacgactcggaccgatg

SEQ ID NO: 13533 - DNA, 203 bp, Artificial sequence
  synthetic
ggcgcgccagtcctctatagccgtggcaagacaagctcagaactgagaagctgtcaccacagttctggaggctgggaagttcaagatcaaagtgccagcagattcagtgtcatgtgaggacgtgcttcctgcttcatagataagagtagcttggagctcgatacgttgcgactgaccatctggtcgcgcgactcggaccgatg

SEQ ID NO: 13534 - DNA, 203 bp, Artificial sequence
  synthetic
ggcgcgccagtcctggtgtttcgtggcaagacaagctcagaactgagaagctgtcaccacagttctggaggctgggaagttcaagatcaaagtgccagcagattcagtgtcatgtgaggacgtgcttcctgcttcatagataagagtagcttggagctcggcggcacaaccagcaccatctggtcgcgcgactcggaccgatg

SEQ ID NO: 13535 - DNA, 203 bp, Artificial sequence
  synthetic
ggcgcgccagtccttaagattggtggcaagacaagctcagaactgagaagctgtcaccacagttctggaggctgggaagttcaagatcaaagtgccagcagattcagtgtcatgtgaggacgtgcttcctgcttcatagataagagtagcttggagctcggcggcacaaccagctaatcgcaagtatccgactcggaccgatg

SEQ ID NO: 13536 - DNA, 203 bp, Artificial sequence
  synthetic
ggcgcgccagtcctaggaacgggtggcaagacaagctcagaactgagaagctgtcaccacagttctggaggctgggaagttcaagatcaagtattggatgatgccagtgtcatgtgaggacgtgcttcctgcttcatagataagagtagcttggagctcggcggcacaaccagcaccatctggtcgcgcgactcggaccgatg

SEQ ID NO: 13537 - DNA, 203 bp, Artificial sequence
  synthetic
ggcgcgccagtcctgggagccagtggcaagacaagctcagaactgagaagctgtcaccacagttctggaggctgggctcacttccgaactagtgccagcagattcagtgtcatgtgaggacgtgcttcctgcttcatagataagagtagcttggagctcggcggcacaaccagcaccatctggtcgcgcgactcggaccgatg

SEQ ID NO: 13538 - DNA, 203 bp, Artificial sequence
  synthetic
ggcgcgccagtcctagtttggcgtggcaagacaagctcagaactgagatctacgtgtggagtttctggaggctgggaagttcaagatcaaagtgccagcagattcagtgtcatgtgaggacgtgcttcctgcttcatagataagagtagcttggagctcggcggcacaaccagcaccatctggtcgcgcgactcggaccgatg

SEQ ID NO: 13539 - DNA, 203 bp, Artificial sequence
  synthetic
ggcgcgccagtcctcactgtgagtggcagggacaaccacaaccacaacggccgggggaggagaaggcggcagcggcgattctaggcggcccaggcggcggggaggaggagaaggaggagggtggcggccgggcttggcttcggctctcgataacaacttgggcggcgcgacccggggaaccggcattgcgactcggaccgatg

SEQ ID NO: 13540 - DNA, 203 bp, Artificial sequence
  synthetic
ggcgcgccagtcctgcggatctgtggcagggacaaccacaaccacaacggccgggggaggaggccatacgccatttgattctaggcggcccaggcggcggggaggaggagaaggaggagggtggcggccgggcttggcttcggctccttgaggagttggcggcggcgcgacccggggaaccggcattgcgactcggaccgatg

SEQ ID NO: 13541 - DNA, 203 bp, Artificial sequence
  synthetic
ggcgcgccagtcctattgtcttgtggcagggacaggtgagcagtttttggccgggggaggagaaggcggcagcggcgattctaggcggcccaggcggcggggaggaggagaaggaggagggtggcggccgggcttggcttcggctccttgaggagttggcggcggcgcgacccggggaaccggcattgcgactcggaccgatg

SEQ ID NO: 13542 - DNA, 203 bp, Artificial sequence
  synthetic
ggcgcgccagtcctctcccaaagtggctgggctgctcgggttagatcgtcaggtgagggaggccacccatcaagaagcgaaggaagtgctggagtcgtgtgttttggctgcgcgtgatcctgcgtgggtcgggaggtgtttctgtgaaaagcctaaagattagactgtaagaaaagaaaatagaagcccgactcggaccgatg

SEQ ID NO: 13543 - DNA, 203 bp, Artificial sequence
  synthetic
ggcgcgccagtcctctctccacgtgggcatgggagtcagctgcacagtcactcgggaagatggaaccaatcgcagaggacttctattactaaccgatcacatgatgtcacccagacatcaggcatacccactagtgtgaaatagacatcagaattaagaaaaacgtagggtccaagtggtttcccgttcgactcggaccgatg

SEQ ID NO: 13544 - DNA, 203 bp, Artificial sequence
  synthetic
ggcgcgccagtcctttgtagtagtgggcatgggagtcagctgcacagtcactcgggaagatggaaccaatcgcagatagggctgccagtgaaccgatcacatgagtaatgagtttaggcaggcatacccactagtgtgaaatagacatcagaattaagaaaaacgtagggtccaagtggtttcccgttcgactcggaccgatg

SEQ ID NO: 13545 - DNA, 203 bp, Artificial sequence
  synthetic
ggcgcgccagtcctgcccgcttgtggtggtggtggaaggggggaggtgctagcagggccagccttgaactcgctggacagagctacagacctatggggcctggaagtgcccgctgagaaagggagaagacagagttttttaatgtcaggtgaggggttgcctccgaggcaacctccaagtcccagatccgactcggaccgatg

SEQ ID NO: 13546 - DNA, 203 bp, Artificial sequence
  synthetic
ggcgcgccagtcctggaggcaggtggtggtggtggaaggggggaggtgctagcagggccagccttgaactcgctggacagagctacagacctatggggcctggaagtgcccgctgagaaagggagaagacagcagaggggttgccgaggtgaggggttgcctccgaggcaaccttggtagggagacgacgactcggaccgatg

SEQ ID NO: 13547 - DNA, 203 bp, Artificial sequence
  synthetic
ggcgcgccagtcctcggcctccgtggtggtggtggaaggggggaggtgctagcagggccagccttgaactcgctggcacttaggtacagtctatggggcctggaagtgcccgctgagaaagggagaagacagcagaggggttgccgaggtgaggggttgcctccgaggcaacctccaagtcccagatccgactcggaccgatg

SEQ ID NO: 13548 - DNA, 203 bp, Artificial sequence
  synthetic
ggcgcgccagtcctcttccctggtgtaaatccaggctcgaaccctactgcgaggtggagagcctcttaaccggatgctacgggtgatgactgggaggaggagaaaaattacctctttatcttgcatgaacatcttaattttcaggaccagaggagcgagagcagcaagaaccacacccagcagcaatgcgactcggaccgatg

SEQ ID NO: 13549 - DNA, 203 bp, Artificial sequence
  synthetic
ggcgcgccagtcctctttaagcgtgtaaatccagttagaccaaaatgacgcgttcccctctgctcttaaccggatgctacgggtgatgactgggaggaggagaaaaattacctctttatcttgcatgaacatcttaattttcaggaccagaggagcgagagcagcaagaaccacacccagcagcaatgcgactcggaccgatg

SEQ ID NO: 13550 - DNA, 203 bp, Artificial sequence
  synthetic
ggcgcgccagtcctaggcgtacgtgtaaatccagttagaccaaaatgagcgaggtggagagcctcttaaccggatgctacgggtgatgacaatccatcctgcgcaaattacctctttatcttgcatgaacatcttaattttcaggaccagaggagcgagagcagcaagaaccacacccagcagcaatgcgactcggaccgatg

SEQ ID NO: 13551 - DNA, 203 bp, Artificial sequence
  synthetic
ggcgcgccagtcctccgggcccgtgtaaatccagttagaccaaaatgagcgaggtggagagcctcttaaccggatgctacgggtgatgactgggaggaggagaaaaattacctctttatcttgcatgaacatcttaattttcaggaccagaggagcgagaatctagtagcttgaacccagcagcaatgcgactcggaccgatg

SEQ ID NO: 13552 - DNA, 203 bp, Artificial sequence
  synthetic
ggcgcgccagtccttatcataggtgtgagagggaagcgccgcggcctgcgcagacgaggggtcccttcgcctggttcgtggcgccttgtgaccccgggcccctgccgcctgcaagtcggaaattgcgctgtgctcctgtgctacggcctgtggctggactgcctgctgctgcccaactggctggcaagcgactcggaccgatg

SEQ ID NO: 13553 - DNA, 203 bp, Artificial sequence
  synthetic
ggcgcgccagtcctgacgtgccgtgtgagagggaagcgccgcggcctgtatttctagacctgcccttcgcctggttcgtggcgccttgtgaccccgggcccctgaacaggcattaaacgaaattgcgctgtgctcctgtgctacggcctgtggctggactgcctgctgctgcccaactggctggcaagcgactcggaccgatg

SEQ ID NO: 13554 - DNA, 203 bp, Artificial sequence
  synthetic
ggcgcgccagtcctatgacctagtgtgagagggaagcgccgcggcctgtatttctagacctgcccttcgcctggttcgtggcgccttgtgaccccgggcccctgccgcctgcaagtcggaaattgcgctgtgctcctgtgctacggcctgtggctggactgcctgctgctgccccgtcaatgccttgccgactcggaccgatg

SEQ ID NO: 13555 - DNA, 203 bp, Artificial sequence
  synthetic
ggcgcgccagtcctgtctgagtgtgtgagagggaagcgccgcggcctgtatttctagacctgcccttcgcctggttcgtggcgccttgtgaccccgggcccctgccgcctgcaagtcggaaattgcgctgtgctcctgtgctacggcctgtggctggactgcctgctgctgcccgctaaaaacattttcgactcggaccgatg

SEQ ID NO: 13556 - DNA, 203 bp, Artificial sequence
  synthetic
ggcgcgccagtcctatctaacagtgtgagagggaagcgccgcggcctgtatttctagacctgcccttcgcctggttcgtggcgccttgtgaccccgggcccctgccgcctgcaagtcggaaattgcgctgtgtcgtatctggttaccctgtggctggactgcctgctgctgcccaactggctggcaagcgactcggaccgatg

SEQ ID NO: 13557 - DNA, 203 bp, Artificial sequence
  synthetic
ggcgcgccagtcctgtctgcccgtgtgagagggaagcgccgcggcctgtatttctagacctgcccttcgcctggttcgtggcgccttgtgtttattacggggatccgcctgcaagtcggaaattgcgctgtgctcctgtgctacggcctgtggctggactgcctgctgctgcccaactggctggcaagcgactcggaccgatg

SEQ ID NO: 13558 - DNA, 203 bp, Artificial sequence
  synthetic
ggcgcgccagtcctaactcctagtgtgagagggaagcgccgcggcctgtatttctagacctgcccttcgcctggttgtcacgagaaaagaaccccgggcccctgccgcctgcaagtcggaaattgcgctgtgctcctgtgctacggcctgtggctggactgcctgctgctgcccaactggctggcaagcgactcggaccgatg

SEQ ID NO: 13559 - DNA, 203 bp, Artificial sequence
  synthetic
ggcgcgccagtcctgcacacacgtgtgagagggatatagacgaattcttatttctagacctgcccttcgcctggttcgtggcgccttgtgaccccgggcccctgccgcctgcaagtcggaaattgcgctgtgctcctgtgctacggcctgtggctggactgcctgctgctgcccaactggctggcaagcgactcggaccgatg

SEQ ID NO: 13560 - DNA, 203 bp, Artificial sequence
  synthetic
ggcgcgccagtcctccaacggcgtgtgatcttgcgcgataaatgctgacgtgaaaacgttgcgtattgctacaacacttggttagctatttagctttactaatcaagacgccgtcgtgcagcccacaaaagtctagatacgtcacaggagagcatacgctaggtcgcgttgactgctgaatgtgtcatcgactcggaccgatg

SEQ ID NO: 13561 - DNA, 203 bp, Artificial sequence
  synthetic
ggcgcgccagtccttaaatggtgttaagtttcgcactactaggaatttttgcgaaaattcttaattccattcttatggtgtagtgtttgttcttttcaattggggcgtatctctctttcgcagagaccctggcccaaccctgaaatgaataaaattttactggtcgcgcgtctcaatcgaccttctagcgactcggaccgatg

SEQ ID NO: 13562 - DNA, 203 bp, Artificial sequence
  synthetic
ggcgcgccagtcctgggaaatcgttaagtttcgcactactaggaatttttgcgaaaattcttaattccattcttatggtgtagtgtttgttcttttcaattggggcgtatctctctttcgcagagaccctggcccaaccctgaaattcgagcggcgagggaaaaattcatcgaaaatcgaccttctagcgactcggaccgatg

SEQ ID NO: 13563 - DNA, 203 bp, Artificial sequence
  synthetic
ggcgcgccagtcctcacgtcaggttaccctccttagtttagctgtgagctcccttctccggtagctcctacccctgcctgtgcgggcctcgtccccgcgcccagccctcggtgctgcctccgacagcgccgcgctctctcagccgcccccctgcccctcgggcccccctctctgctgcccctggcgcccgactcggaccgatg

SEQ ID NO: 13564 - DNA, 203 bp, Artificial sequence
  synthetic
ggcgcgccagtcctggcccttagttaccctccttccggacagcaccccctcccttctccggtagctcctacccctgcctgtgcgggcctcccaaagatttaagaccctcggtgctgcctccgacagcgccgcgctctctcagccgcccccctgcccctcgggcccccctctctgctgcccctggcgcccgactcggaccgatg

SEQ ID NO: 13565 - DNA, 203 bp, Artificial sequence
  synthetic
ggcgcgccagtcctgctaagtagttaccctccttccggacagcaccccctcccttctccggtagctcctacccctgcctgtgcgggcctcgtccccgcgcccagattgtaccttacaatccgacagcgccgcgctctctcagccgcccccctgcccctcgggcccccctctctgctgcccctggcgcccgactcggaccgatg

SEQ ID NO: 13566 - DNA, 203 bp, Artificial sequence
  synthetic
ggcgcgccagtcctcggtcgaggttaccctccttccggacagcaccccctcccttctccggtagctcctacccctgcctgtgcgggcctcgtccccgcgcccagccctcggtgctgcccttactctgcgatagctctctcagccgcccccctgcccctcgggcccccctctctgctgcccctggcgcccgactcggaccgatg

SEQ ID NO: 13567 - DNA, 203 bp, Artificial sequence
  synthetic
ggcgcgccagtcctagtcatctgttaccctccttccggacagcaccccctcccttctccggtagctcctacccctgcctgtgcgggcctcgtccccgcgcccagccctcggtgctgcctccgacagcgccgcatggagcggattctccccctgcccctcgggcccccctctctgctgcccctggcgcccgactcggaccgatg

SEQ ID NO: 13568 - DNA, 203 bp, Artificial sequence
  synthetic
ggcgcgccagtcctaaccagatgttaccctccttccggacagcaccccctcccttctccggtagctcctacccctgcctgtgcgggcctcgtccccgcgcccagccctcggtgctgcctccgacagcgccgcgctctctcagccgcccccctgcccctcgctaagtagaaatgcctgcccctggcgcccgactcggaccgatg

SEQ ID NO: 13569 - DNA, 203 bp, Artificial sequence
  synthetic
ggcgcgccagtcctgttgcctcgttaccctccttccggacagcaccccctcccttctccggtagctcctacccctgcctgtgcgggcctcgtccccgcgcccagccctcggtgctgcctccgacagcgccgcgctctctcagccgcttagtctgatacgcggcccccctctctgctgcccctggcgcccgactcggaccgatg

SEQ ID NO: 13570 - DNA, 203 bp, Artificial sequence
  synthetic
ggcgcgccagtcctcggattcagttaccctccttccggacagcaccccctcccttctccggtagctcctacccctgttaacagcttgaaggtccccgcgcccagccctcggtgctgcctccgacagcgccgcgctctctcagccgcccccctgcccctcgggcccccctctctgctgcccctggcgcccgactcggaccgatg

SEQ ID NO: 13571 - DNA, 203 bp, Artificial sequence
  synthetic
ggcgcgccagtccttctctagtgttaccctccttccggacagcaccccctcccttctccggtcatctactttgggtcctgtgcgggcctcgtccccgcgcccagccctcggtgctgcctccgacagcgccgcgctctctcagccgcccccctgcccctcgggcccccctctctgctgcccctggcgcccgactcggaccgatg

SEQ ID NO: 13572 - DNA, 203 bp, Artificial sequence
  synthetic
ggcgcgccagtcctgttctagggttaccctccttccggacagcaccccgggttccggtgaacagctcctacccctgcctgtgcgggcctcgtccccgcgcccagccctcggtgctgcctccgacagcgccgcgctctctcagccgcccccctgcccctcgggcccccctctctgctgcccctggcgcccgactcggaccgatg

SEQ ID NO: 13573 - DNA, 203 bp, Artificial sequence
  synthetic
ggcgcgccagtcctcacagttcgttccatgccccgcaaaggtggctctgcagcataatttaggcattggaggagctgtggttgtaacactctacaagatgggttttccggaagccgccagttcttttagaactcatcaaattgaagctgttccaaccagctctgcaagtgatggatttaaggcaaatccgactcggaccgatg

SEQ ID NO: 13574 - DNA, 203 bp, Artificial sequence
  synthetic
ggcgcgccagtcctggatcaaggttccccaacttcctcggcgctccggactcccaagtctccgccggaccctcctttggatattcctcgtgtctccgattctgacgttttttaccggtacggtggggcctccccacctgccccgcagaagatgcagttctttggccgcctggtcaataccttcagtggcgactcggaccgatg

SEQ ID NO: 13575 - DNA, 203 bp, Artificial sequence
  synthetic
ggcgcgccagtcctgtgttcgtgttccccaacttcctcggcgctccggactcccaagtctccgccggaccctcctttggatattcctcgtgtctccgattctgagacagagggggaagacggtggggcctccccacctgccccgcagaagatgcagttctttggccgcctggtcgtagatacactatacgactcggaccgatg

SEQ ID NO: 13576 - DNA, 203 bp, Artificial sequence
  synthetic
ggcgcgccagtcctgggcgcgtgttccccaacttcctcggcgctccggactcccaagtctccgccggaccctcctttggatattcctcgtgtctccgattctgagacagagggggaagacggtggggcctccgggaggatgagcacgaagatgcagttctttggccgcctggtcaataccttcagtggcgactcggaccgatg

SEQ ID NO: 13577 - DNA, 203 bp, Artificial sequence
  synthetic
ggcgcgccagtccttgggacaggttccccaacttttaaacaaggtgacactcccaagtctccgccggaccctcctttggatattcctcgtgtctccgattctgagacagagggggaagacggtggggcctccccacctgccccgcagaagatgcagttctttggccgcctggtcaataccttcagtggcgactcggaccgatg

SEQ ID NO: 13578 - DNA, 203 bp, Artificial sequence
  synthetic
ggcgcgccagtccttaacgcccgttcttaaacggcgtgacgcggtgcctggcgccgagcctcccaagatggcggtgtgcatcgcggtgattgccaaggagaattaccccctctacattcgcagcacccctacggagaacgagctgaagttccactacatggtgcacacatctctggacgtggtggatgcgactcggaccgatg

SEQ ID NO: 13579 - DNA, 203 bp, Artificial sequence
  synthetic
ggcgcgccagtcctgaggtcatgttgaagcattacaggccaggtctctgcctcggaagaagagctgaggtttgccatccagaacaagcacctctgccaccggatgtcctctgcgctggaatcagtcactgtcagcgacagacccctcggggtgtccatcacaaaagccgaggtagcccctgaagaagacgactcggaccgatg

SEQ ID NO: 13580 - DNA, 203 bp, Artificial sequence
  synthetic
ggcgcgccagtcctaattacgggttgattttttatttactttgcaaaacgcgtccgccattcgagcatctagtttcaacttccttttgcagcaagttctttcctgcactaatcacaattcttggaagaggagaactggacgttgtgaacagagttagctggtaaatgtcctcttaaaagatccaaaaacgactcggaccgatg

SEQ ID NO: 13581 - DNA, 203 bp, Artificial sequence
  synthetic
ggcgcgccagtcctattagcgggttgattttttatttactttgcaaaagtttctgataggcgtctttatatagggaaacttccttttgcagcaagttctttcctgcactaatcacaattcttggaagaggagaactggacgttgtgaacagagttagctggtaaatgtcctcttaaaagatccaaaaacgactcggaccgatg

SEQ ID NO: 13582 - DNA, 203 bp, Artificial sequence
  synthetic
ggcgcgccagtcctttgctaacgttgcaagcctaatgctcacctgcagagacagaattcctgagtgaacgaacagagcagctcctcttccatctccagaaatgacctccaccttcaacccccgagaatgtaagaaacagctcgtctaagggcaaaactatggcttcttcctgcgaattgagaaggacacgactcggaccgatg

SEQ ID NO: 13583 - DNA, 203 bp, Artificial sequence
  synthetic
ggcgcgccagtcctgcgcactagtttcccctggactcgttcataacctgattggcatgctacaggctgttgctgacggcaaggctcatttcactgagtcagtgaagccagtgctcgacctgacaaattcaatgggtgtggttcattaatgaataacatgtcttctgctgcgcccatgggttcgcgacccgactcggaccgatg

SEQ ID NO: 13584 - DNA, 203 bp, Artificial sequence
  synthetic
ggcgcgccagtccttacctgcggtttcccctggactcgttcataacctgattggcatgctacaggctgttgctgacggcaaggctcatttcactgagtcagtgaagccagtgctcgactaacagctgatttgcctgtgtcgggtggaatgaataacatgtcttctgctgcgcccatgggttcgcgacccgactcggaccgatg

SEQ ID NO: 13585 - DNA, 203 bp, Artificial sequence
  synthetic
ggcgcgccagtcctgatacttggtttcccctggactcgttcataacctgattggcatgctacaggctgttgctgacggcaaggctcattttcaaccagatcattagccagtgctcgacctgacaaattcaatcctgtgtcgggtggaatgaataacatgtcttctgctgcgcccatgggttcgcgacccgactcggaccgatg

SEQ ID NO: 13586 - DNA, 203 bp, Artificial sequence
  synthetic
ggcgcgccagtcctgtttctgggtttggtgcgtcgcgcttcaatcaccgcgagtttacgcgggccagttgttgctggtcgcatgggagctgctgctaaataatttctgctcagccatgtcgccggctccagatgcagccccggctcctgcgtcgatctccctgtttgacctcagcgcggatgctccggcgactcggaccgatg

SEQ ID NO: 13587 - DNA, 203 bp, Artificial sequence
  synthetic
ggcgcgccagtcctcctctccggtttggtgcgtcttctaagggcgtgggcgagtttacgcgggccagttgttgctggtcgcatgggagctatctagttcctggatctgctcagccatgtcgccggctccagatgcagccccggctcctgcgtcgatctccctgtttgacctcagcgcggatgctccggcgactcggaccgatg

SEQ ID NO: 13588 - DNA, 203 bp, Artificial sequence
  synthetic
ggcgcgccagtcctattagaaagtttggtgcgtcttctaagggcgtgggcgagtttacgcgggccagttgttgctggtcgcatgggagctgctgctaaataatttctgctcagccatgtcgccggctccagatgcagccccggctcctgcgtcgatctccctgtttgacctcaggatcatcctcgtctcgactcggaccgatg

SEQ ID NO: 13589 - DNA, 203 bp, Artificial sequence
  synthetic
ggcgcgccagtccttacttcttgtttggtgcgtcttctaagggcgtggtgagtgagcaattcgccagttgttgctggtcgcatgggagctgctgctaaataatttctgctcagccatgtcgccggctccagatgcagccccggctcctgcgtcgatctccctgtttgacctcagcgcggatgctccggcgactcggaccgatg

SEQ ID NO: 13590 - DNA, 203 bp, Artificial sequence
  synthetic
ggcgcgccagtccttctgcattgttttgaaactgacttccagagctccactgcctccctgcaccatgccctacaacttctgcctgcccagcctgagctgccgcaccagctgcgttagatggccctgtgtgccccccagctgccacggctacaccctgcccggggcctgcaacatccctgccaatgtgacgactcggaccgatg

SEQ ID NO: 13591 - DNA, 203 bp, Artificial sequence
  synthetic
ggcgcgccagtccttggcgccggttttgaaactgacttccagagctccactgcctccctgcaccatgccctacaacttctgcctgcccagcctgagctgccgcaccagctgctcctccatcgtgcaaacctaccccagctgccacggctacaccctgcccggggcctgcaacatccctgccaatgtgacgactcggaccgatg

SEQ ID NO: 13592 - DNA, 203 bp, Artificial sequence
  synthetic
ggcgcgccagtcctaatccgaggttttgaaactgacttccagagctccactgcctccctgcaccatgccctacaacttctgcctgcccagcctgagctgccgcaccagctgctcctcccggccctgtgtgccccccagctgccacggcactcttttgcccggggcctgcaacatccctgccaatgtgacgactcggaccgatg

SEQ ID NO: 13593 - DNA, 203 bp, Artificial sequence
  synthetic
ggcgcgccagtcctgtacgtaagttttgaaactgacttccagagctccactgcctccctgcaccatgccctacaacttctgcctgcccagcctgagctgccgcaccagctgctcctcccggccctgtgtgccccccagctgccacggctacaccctgcccggggcctgcaacataggaagtttctgtccgactcggaccgatg

SEQ ID NO: 13594 - DNA, 203 bp, Artificial sequence
  synthetic
ggcgcgccagtcctgttcatacgttttgaaactgacttccagagctccactgcctccctgcaccatgccctacaacttctgcctgcccagcctgagctgccgcaccagctgctcctcccggccctgtgtgccccccagctgccacggctacaccctgcccggggcctgcaacatccctgccaatgtgacgactcggaccgatg

SEQ ID NO: 13595 - DNA, 203 bp, Artificial sequence
  synthetic
ggcgcgccagtcctcagagagtgttttgaaactgacttccagagctccactgcctccctgcaccatgccctacaacttctgcctgcccagcctgagctgccgcagtctactgatacagcggccctgtgtgccccccagctgccacggctacaccctgcccggggcctgcaacatccctgccaatgtgacgactcggaccgatg

SEQ ID NO: 13596 - DNA, 203 bp, Artificial sequence
  synthetic
ggcgcgccagtcctggacgttcgttttgaaactgacttccagagctcctgccggagttacatccatgccctacaacttctgcctgcccagcctgagctgccgcaccagctgctcctcccggccctgtgtgccccccagctgccacggctacaccctgcccggggcctgcaacatccctgccaatgtgacgactcggaccgatg

SEQ ID NO: 13597 - DNA, 203 bp, Artificial sequence
  synthetic
ggcgcgccagtcctcaagacttgttttgaaactggtccatgattagtaactgcctccctgcaccatgccctacaacttctgcctgcccagcctgagctgccgcaccagctgctcctcccggccctgtgtgccccccagctgccacggctacaccctgcccggggcctgcaacatccctgccaatgtgacgactcggaccgatg

SEQ ID NO: 13598 - DNA, 203 bp, Artificial sequence
  synthetic
ggcgcgccagtccttcgtatgttaaaagctgtccgcgcgggagcccagcaagttcgcttcactgtccctggacttgtcttggttccagaacctgacgacccggcgacggcgacgtctcttttgactaaaagacagtgtccagtgctccagcctaggagtctacggggaccgcctcccgcgccgccacccgactcggaccgatg

SEQ ID NO: 13599 - DNA, 203 bp, Artificial sequence
  synthetic
ggcgcgccagtcctgacccaactaaaagctgtccgcgcgggagcccaggccagctttggggttgtccctggacttgtcttggttccagaacctgacgacccggcgacggcgacgtctcttttgactaaaagacagtgtccagtgctccagcctaggagtctacggggaccgcctcccgcgccgccacccgactcggaccgatg

SEQ ID NO: 13600 - DNA, 203 bp, Artificial sequence
  synthetic
ggcgcgccagtcctgaagaaggtaaacaggctctcgcgatcactaccaggccgtggcaggctggctgggtaccggctgtcgctgacccaggagaagctgcctgtctacatcagcctgggctgcagcgcgctgccgccgcggggccggcagagcagaactcctctagggaacctggatgggaaacagcccgactcggaccgatg

SEQ ID NO: 13601 - DNA, 203 bp, Artificial sequence
  synthetic
ggcgcgccagtcctgtcgggagtaaacaggctctgtatccgtggcagcggccgtggcaggctggctgggtaccggctgtcgctgacccaggagaagctgcctgtctacatcagcctgggctgcagcgcgctgccgccgcggggccggcagagcagaactcctctagggaacctggatgggaaacagcccgactcggaccgatg

SEQ ID NO: 13602 - DNA, 203 bp, Artificial sequence
  synthetic
ggcgcgccagtcctggagatcgtaaacaggctctgtatccgtggcagcggccgtggcaggctggctgggtaccggctgtcgctgacccaggagaagctgcctgtctacatcagcctgggctgcagcgcgctgtgagtatatacgtcgcagagcagaactcctctagggaacctggatgggaaacagcccgactcggaccgatg

SEQ ID NO: 13603 - DNA, 203 bp, Artificial sequence
  synthetic
ggcgcgccagtcctcgaaaggataaacaggctctgtatccgtggcagcggccgtggcaggctggctgggtgggttaatgcgctgacccaggagaagctgcctgtctacatcagcctgggctgcagcgcgctgccgccgcggggccggcagagcagaactcctctagggaacctggatgggaaacagcccgactcggaccgatg

SEQ ID NO: 13604 - DNA, 203 bp, Artificial sequence
  synthetic
ggcgcgccagtccttgtccggttaaacaggctctgtatccgtggcagctttgtgccagctaaggctgggtaccggctgtcgctgacccaggagaagctgcctgtctacatcagcctgggctgcagcgcgctgccgccgcggggccggcagagcagaactcctctagggaacctggatgggaaacagcccgactcggaccgatg

SEQ ID NO: 13605 - DNA, 203 bp, Artificial sequence
  synthetic
ggcgcgccagtcctagaggtcctaaacaggctctgtatccgtggccctaagacgggcaggctggctgggtaccggctgtcgctgacccaggagaagctgcctgtctacatcagcctgggctgcagcgcgctgccgccgcggggccggcagagcagaactcctctagggaacctggatgggaaacagcccgactcggaccgatg

SEQ ID NO: 13606 - DNA, 203 bp, Artificial sequence
  synthetic
ggcgcgccagtccttacccggataaacaggctctgtatccgtggccctaagacgggcaggctggctgggtgggttaatgcgctgacccaggagaagctgcctgtctacatcagcctgggctgcagcgcgctgccgccgcggggccggcagagcagaactcctctagggaacctggatgggaaacagcccgactcggaccgatg

SEQ ID NO: 13607 - DNA, 203 bp, Artificial sequence
  synthetic
ggcgcgccagtcctggcgcatttaaactgtgccgtgtggtgagagagttcgtcgtcctcggcttctcatccctggccaggctgcagcagctgctctttgttatcttcctgctcctctacctgttcactctgggcaccaatgcaatcatcatttccaccattgtgctggacagagcccttcatactccccgactcggaccgatg

SEQ ID NO: 13608 - DNA, 203 bp, Artificial sequence
  synthetic
ggcgcgccagtcctttgcacggtaaagaacaggaaaaagagaaaaaatcagtgatctgtgtcgagggcaatattgcaagtgggaagacgacatgcctggaattcttctccaacgcgacagacgtcgaggtgttaacggagcctgtgtccaagtggagaaatgtccgtggccacagattcagttaaaaccgactcggaccgatg

SEQ ID NO: 13609 - DNA, 203 bp, Artificial sequence
  synthetic
ggcgcgccagtcctcatgatcctaaagaacaggaaaaagagaaaaaatcagtgatctgtgtcgagggcaatattgcaagtgggaagacgagcatttcccttacattctccaacgcgacagacgtcgaggtgttaacggagcctgtgtccaagtggagaaatgtccgtggccacaatcctctgggcctgcgactcggaccgatg

SEQ ID NO: 13610 - DNA, 203 bp, Artificial sequence
  synthetic
ggcgcgccagtcctgtcaccagtaaagaacaggatttcccccgttgcacagtgatctgtgtcgagggcaatattgcaagtgggaagacgacatgcctggaattcttctccaacgcgacagacgtcgaggtgttaacggagcctgtgtccaagtggagaaatgtccgtggccacaatcctctgggcctgcgactcggaccgatg

SEQ ID NO: 13611 - DNA, 203 bp, Artificial sequence
  synthetic
ggcgcgccagtcctataccggctaaagatgaggtttttgctaaatttttttgagtttatatttgtatgtcttatgctgaaaaatcttgtttcctaattagtaacgggcgatgaaggacgatgggtaaatattttagggccgattctttggttttatagccaagataccctgttgataaagtcttgtggcgactcggaccgatg

SEQ ID NO: 13612 - DNA, 203 bp, Artificial sequence
  synthetic
ggcgcgccagtcctaagcctcgtaaatattactttcctcaaaaagagaaaacaaaaatgctagattttactttatgacttgaatgatgtggtaatgtcgaactctagtatttagaattagaatgtttcttagcggtcgtgtagttatttttatgtcataacctaggcgcagaccagctcctataacaacgactcggaccgatg

SEQ ID NO: 13613 - DNA, 203 bp, Artificial sequence
  synthetic
ggcgcgccagtcctgtaagacataaatcccacgagggtcctttcttggattaacccgctcaatgcccggaaatttgggcgtgcccccgcaagactgctagccgagtagtgttgggtcgcgaaaggccttgcggtactgcctgatagggtgcttgcgagtgccccgggaggtctcgtagaccgtgcacccgactcggaccgatg

SEQ ID NO: 13614 - DNA, 203 bp, Artificial sequence
  synthetic
ggcgcgccagtcctacacgacctaaatcccggccgatatggactcaaaaagaattaaaagaagctttgtccgatgggatagtgaagtctcacaccaacatttacaattgttatttagaaaacatagaaattatatatgtcaaggcttacttaagttagtaaaaacacatcagagtgggataagtgacacgactcggaccgatg

SEQ ID NO: 13615 - DNA, 203 bp, Artificial sequence
  synthetic
ggcgcgccagtcctaacgattttaaattcccgcttaagttggctggtactgccgtaataaatttaagagcagaccatgcagccatgtatctttattcccttcttgaaaagggtaaactacttattagagatacaaataaagaagttttcgttggtgacagtttggttaatgtaatctaaactttaaaacgactcggaccgatg

SEQ ID NO: 13616 - DNA, 203 bp, Artificial sequence
  synthetic
ggcgcgccagtcctaccatcaataaccttacactgtaaggggggggtgaagaaggggccggccttcaagcaagagcgacgcaagatggcagccaccacgggctcgggagtaaaagtccctcgcaatttccgactgttggaagaactcgaagaaggccagaaaggagtaggagatggcacagttagctgcgactcggaccgatg

SEQ ID NO: 13617 - DNA, 203 bp, Artificial sequence
  synthetic
ggcgcgccagtccttgaggtggtaagacacttgctgtcctaacacctgctataggctatccactgcatcatctctcctgccatacttcctactcacatcatatctattttaaagaaaaaataggcccgaacactaatcgtgccggcagtgccactgcacacacaacactacacagcaccggactgtgccgactcggaccgatg

SEQ ID NO: 13618 - DNA, 203 bp, Artificial sequence
  synthetic
ggcgcgccagtcctcttccacttaagacacttgctgtcctaacacctgctataggctatccactgcatcatctctcctgccatacttcctactcacatcatatctattttaaagaaaaaataggcccgaacactaatcgtgccggctaacttctgtgcatcacaacactacacatacaatacactacacgactcggaccgatg

SEQ ID NO: 13619 - DNA, 203 bp, Artificial sequence
  synthetic
ggcgcgccagtcctgaaacccttaagacacttgctgtcctaacacctgctataggctatccactgcatcatctctcggcggtggtcatagactcacatcatatctattttaaagaaaaaataggcccgaacactaatcgtgccggcagtgccactgcacacacaacactacacatacaatacactacacgactcggaccgatg

SEQ ID NO: 13620 - DNA, 203 bp, Artificial sequence
  synthetic
ggcgcgccagtcctctctctcgtaagacacttgctgtcctaacacctggcgattttaccattctgcatcatctctcctgccatacttcctactcacatcatatctattttaaagaaaaaataggcccgaacactaatcgtgccggcagtgccactgcacacacaacactacacatacaatacactacacgactcggaccgatg

SEQ ID NO: 13621 - DNA, 203 bp, Artificial sequence
  synthetic
ggcgcgccagtcctaagtgctctaagatcgacaccggcgactgcggcgggctcgacgaggcggctgacggggcggcggcgggaagacggccgggtgcgccttggggtttagtggcggcttctccatgggtccagccagccgcttccctgtgctgtgagtgtttccaccactccaggagacagcattcacgactcggaccgatg

SEQ ID NO: 13622 - DNA, 203 bp, Artificial sequence
  synthetic
ggcgcgccagtcctacggattataagcctgagaaaggttacggggaacgacgcgctgctttcatgccctttcttgttctaccttcatcggccgaggtggacacctgcgcaggtgtgtgccctccggcccctgaagcatggccagcagcggcatggctgacagcgccaaccacctgcccttctttttcgcgactcggaccgatg

SEQ ID NO: 13623 - DNA, 203 bp, Artificial sequence
  synthetic
ggcgcgccagtcctagatcacctaaggataatggggcaggattcagccgcaggctcctccggaagaccaggggcagacggggcggtggcggggtcgtgcccagtgggaggggtcgggtctgcccaatgggttctcccgggcggggggcggggctctatttcagcagctctcagggccttgggctcatccgactcggaccgatg

SEQ ID NO: 13624 - DNA, 203 bp, Artificial sequence
  synthetic
ggcgcgccagtcctcgatgcgctaaggccaatacacgggagctggttgtgagtcaccaaggaaggcagcggcagctccactcagccagtacccagatacgctgggaaccttccccagcacccaagatttactggcagatcctcttctggagcataattagcatcatcattattctggctggagcaattcgactcggaccgatg

SEQ ID NO: 13625 - DNA, 203 bp, Artificial sequence
  synthetic
ggcgcgccagtccttcccaccttaaggccaatacacgggagctggttgtgagtcaccaaggaaggcagcggcagctccactcagccagtacccagatacgctgggaaccttccccagccatggcttccctggggcagatcctcttccctgtgggctggttcatcatcattattctggctggagcaattcgactcggaccgatg

SEQ ID NO: 13626 - DNA, 203 bp, Artificial sequence
  synthetic
ggcgcgccagtcctgactagggtaaggccaatacacgggagctggttgtgagtcaccaaggaaggcagcggcagctccactcagccagtacccagatacgctgggaaccttccccagccatggcttccctggtcgcagggaggacttggagcataattagcatcatcattattctggctggagcaattcgactcggaccgatg

SEQ ID NO: 13627 - DNA, 203 bp, Artificial sequence
  synthetic
ggcgcgccagtcctggctcctgtaaggccaatacacgggagctggttgtgagtcaccaaggaaggcagcggcagctccactcagccagtataacctccactgacgaaccttccccagccatggcttccctggggcagatcctcttctggagcataattagcatcatcattattctggctggagcaattcgactcggaccgatg

SEQ ID NO: 13628 - DNA, 203 bp, Artificial sequence
  synthetic
ggcgcgccagtcctcgtcgtcgtaaggccaatactgattgtgaaaagctgagtcaccaaggaaggcagcggcagctccactcagccagtacccagatacgctgggaaccttccccagccatggcttccctggggcagatcctcttctggagcataattagcatcatcattattctggctggagcaattcgactcggaccgatg

SEQ ID NO: 13629 - DNA, 203 bp, Artificial sequence
  synthetic
ggcgcgccagtcctagtatctgtaagggggcggggcagtctctacacagctcagcatcctgacgcctcctccccttgcaggggcgtgaagctacttcagactctgctgtgacgacttggccgccaggcaccgatcctccccggtgagaaggtccacgaatcttactgcagacagatttgctcagcgcgcgactcggaccgatg

SEQ ID NO: 13630 - DNA, 203 bp, Artificial sequence
  synthetic
ggcgcgccagtcctactatgactaaggtgatccacccgtcggtcccccgggagccctggaggcgcagccccaccccggccggcgcggctcgctcccacgcccccgccgcggcctcgctggagcggacggactgagtcagagggggcgccagcgctgcaggagctgacatggacccaaatcctcgggcccgactcggaccgatg

SEQ ID NO: 13631 - DNA, 203 bp, Artificial sequence
  synthetic
ggcgcgccagtcctatccgcgttaatagctttcaacagagcggggaaagtgcgcatgcgctgactgagtcctcccatggcttcacagaagcagatggaggtagtgaccaaaggaactgggttccggcgccgccccaagaccatcacttacaccccggggacctgcgagctgctcagaggaggagatgccgactcggaccgatg

SEQ ID NO: 13632 - DNA, 203 bp, Artificial sequence
  synthetic
ggcgcgccagtcctcatcccactaatcctgttgcgtttgtgcctactcaacagctttgaaagagcacttcccaacgctgctagtagtctttgttttcttcagtgctgtactgtgagattgcccggtacagcagcagttgtattctttattagcttggtagatcattttctctcgctcttttttttaatcgactcggaccgatg

SEQ ID NO: 13633 - DNA, 203 bp, Artificial sequence
  synthetic
ggcgcgccagtcctgggtttgctaatttttgggtactctgcgtcctcgcctcaccagatggagaggagaaaacctatggtggctgtgaaggacctgatgccatgtatgtcaaattgatatcatctgatggccatgaatttattgtaaaaagagaacatgcattaacatcaggcacgataaaagccatgcgactcggaccgatg

SEQ ID NO: 13634 - DNA, 203 bp, Artificial sequence
  synthetic
ggcgcgccagtcctatatcctttacacacctgtgatagctatccaagcgttttcttgacaggataagcgatactagtggttttgctgtttatgttaagtccaaagtcggtaattaccgactgccatcaacccaaaagggttctggcatggacaccgcattgttgagaaataatatctaaattttaaggcgactcggaccgatg

SEQ ID NO: 13635 - DNA, 203 bp, Artificial sequence
  synthetic
ggcgcgccagtcctcgtgacgatacacacctgtgcacatataagcgtggttttcttgacaggataagcgatactagtggttttgctgtttatgttaagtccaaatagacagtacgggaactgccatcaacccaaaagggttctggcatggacaccgcattgttgagaaataatatctaaattttaaggcgactcggaccgatg

SEQ ID NO: 13636 - DNA, 203 bp, Artificial sequence
  synthetic
ggcgcgccagtcctctgtttgatacacacctgtgcacatataagcgtggttttcttgacaggataagcgatactagtggttttgctgtttggtggtcactagctgtcggtaattaccgactgccatcaacccaaaagggttctggcatggacaccgcattgttgagaaataatatctaaattttaaggcgactcggaccgatg

SEQ ID NO: 13637 - DNA, 203 bp, Artificial sequence
  synthetic
ggcgcgccagtcctatgttgtttacagcacagatcaggtgaggagcacaccaaggagtgattacctggggcgctgttgttttctctttcccaacaagattatcatttcctttaaaaaaaatagttatcctggggcatacagccataccattctgaaggtgtcttatctcctctgatctagagagcacccgactcggaccgatg

SEQ ID NO: 13638 - DNA, 203 bp, Artificial sequence
  synthetic
ggcgcgccagtcctgccgtccttacagcacagatcaggtgaggagcacaccaaggagtgatttttaaaacttactctgttttctctttccatttctccagggggtttcctttaaaaaaaatagttatcctggggcatacagccataccattctgaaggtgtcttatctcctctgatctagagagcacccgactcggaccgatg

SEQ ID NO: 13639 - DNA, 203 bp, Artificial sequence
  synthetic
ggcgcgccagtcctcaagcgattacagcacagatcaggtgaggagcacaccaaggagtgatttttaaaacttactctgttttctctttcccaacaagattatcaggctaaaagtctttaatagttatcctggggcatacagccataccattctgaaggtgtcttatctcctctgatctagagagcacccgactcggaccgatg

SEQ ID NO: 13640 - DNA, 203 bp, Artificial sequence
  synthetic
ggcgcgccagtccttccacgtgtacagcacagatcaggtgaggagcacaccaaggagtgatttttaaaacttactctgttttctctttcccaacaagattatcatttcctttaaaaaaaatagttatcctggggcatacagccataccattctgaaggtgtcttatctcctctgtgtgtccccagtgtcgactcggaccgatg

SEQ ID NO: 13641 - DNA, 203 bp, Artificial sequence
  synthetic
ggcgcgccagtcctcccttcgttacagcacagatcaggtgaggagcactaagtaagaatccatttaaaacttactctgttttctctttcccaacaagattatcatttcctttaaaaaaaatagttatcctggggcatacagccataccattctgaaggtgtcttatctcctctgatctagagagcacccgactcggaccgatg

SEQ ID NO: 13642 - DNA, 203 bp, Artificial sequence
  synthetic
ggcgcgccagtcctgcctaagctacagccaacatgaaggggggaggtgctagcagggccagccttgaactcgctggacagagctacagacctatggggcctggaagtgcccgctgagaaagggagaagacagcagaggggttgccgaggtgaggggttgcctccgaggcaacctccaagtcccagatccgactcggaccgatg

SEQ ID NO: 13643 - DNA, 203 bp, Artificial sequence
  synthetic
ggcgcgccagtccttgaatacgtaccaattgctattgtaaaaagtgttaaaacatcgcaaccgtttgtttcataacaaaagccttaggcatctcctatggcaggaagaagcggagacagcgacgaagagctcatcagaacagtcagactcatcaagcttctctatcaaagcagtaagtagtacatgtacgactcggaccgatg

SEQ ID NO: 13644 - DNA, 203 bp, Artificial sequence
  synthetic
ggcgcgccagtcctaaccgtaataccaattgctattgtaaaaagtgttgctttcattgccaagtttgtttcataacaaaagccttaggcatctcctatggcaggaagaagcggagacagcgacgaagagctcatcagaacagtcagactcatcaagcttctctatcaaagcagtggtcgtggggcccccgactcggaccgatg

SEQ ID NO: 13645 - DNA, 203 bp, Artificial sequence
  synthetic
ggcgcgccagtcctgtcgatcctacctttaaagcggggcccggagccttccctccactgccctcgaacgcctcacttcctaagtctctgcatttctcagtcagtggacagcttttgggactcttgtgtgaggactttgggggaccaggccaggctgggcctctgctgattgagatcttgggatccagacgactcggaccgatg

SEQ ID NO: 13646 - DNA, 203 bp, Artificial sequence
  synthetic
ggcgcgccagtcctggcccgcttacgcattaggtcccttcggtgagcatccctcggccttgttctgaatgcacacatgtctaggggctaaggatgtcctacaggtacccgcacgtaaccttcagagagtgcggatctgagtaggagaccgtggtgcactgctttacagatgcagcccggtttaaaaagcgactcggaccgatg

SEQ ID NO: 13647 - DNA, 203 bp, Artificial sequence
  synthetic
ggcgcgccagtcctccagtatgtacgcattaggtggtaagccgagctctccctcggccttgttctgaatgcacacaaactgttctaaatgggatgtcctacaggtacccgcacgtaaccttcagagagtgcggatctgagtaggagaccgtggtgcactgctttacagatgcagcccggtttaaaaagcgactcggaccgatg

SEQ ID NO: 13648 - DNA, 203 bp, Artificial sequence
  synthetic
ggcgcgccagtcctgagtaccttacgcattaggtggtaagccgagctctccctcggccttgttctgaatgcacacatgtctaggggctaactcccaagccggcctacccgcacgtaaccttcagagagtgcggatctgagtaggagaccgtggtgcactgctttacagatgcagcccggtttaaaaagcgactcggaccgatg

SEQ ID NO: 13649 - DNA, 203 bp, Artificial sequence
  synthetic
ggcgcgccagtccttccaaggctacgcattaggtggtaagccgagctctccctcggccttgttctgaatgcacacatgtctaggggctaaggatgtcctacaggtacccgcacgtaaccttcagagagtgcgatcggcgaccttgcaccgtggtgcactgctttacagatgcagcccggtttaaaaagcgactcggaccgatg

SEQ ID NO: 13650 - DNA, 203 bp, Artificial sequence
  synthetic
ggcgcgccagtcctttcgcttttacgcattaggtggtaagccgagctctccctcggccttgttctgaatgcacacatgtctaggggctaaggatgtcctacaggtacccgcacgtaaccttcagagagtgcggatctgagtaggagaccgtggtgcactgctttacagatgcagcccggtttaaaaagcgactcggaccgatg

SEQ ID NO: 13651 - DNA, 203 bp, Artificial sequence
  synthetic
ggcgcgccagtcctccaggctatacgcattaggtggtaagccgagctctccctcggccttgttctgaatgcacacatgtctaggggctaaggatgtcctacaggtacccgcacgtaaccttcagagagtgcggatctgagtaggagttgccctcatgaaactttacagatgcagcccggtttaaaaagcgactcggaccgatg

SEQ ID NO: 13652 - DNA, 203 bp, Artificial sequence
  synthetic
ggcgcgccagtcctagcttccctactgatccaaaatggaagactttgtgcgacagtgcttcaatccaatgattgtcgagcttgcggaaaagacaatgaaggaatatggggaagacccgaaaattgaaacaaataagttcgctgcaatatgcacacacttagaagtctgcttcatgtattcagacttcccgactcggaccgatg

SEQ ID NO: 13653 - DNA, 203 bp, Artificial sequence
  synthetic
ggcgcgccagtcctgtagcaaatactttccggtagcggtgccagggcagtggcctaatacggaactccatttcccgcatgcagggcgattggccgctgaactcagaagcgggaggccggttccggttgcatcagcgagggattcacggcgaaatgagactgttcgtgagtgatggcgtcccgggttgccgactcggaccgatg

SEQ ID NO: 13654 - DNA, 203 bp, Artificial sequence
  synthetic
ggcgcgccagtcctccgcgagctactttccggtagcggtgccagggcagtggcctaatacggggggtgcaacgattgcgtgcctcgcggaggccgctgaactcagaagcgggaggccggttccggttgcatcagcgagggattcacggcgaaatgagactgttcgtgagtgatggcgtcccgggttgccgactcggaccgatg

SEQ ID NO: 13655 - DNA, 203 bp, Artificial sequence
  synthetic
ggcgcgccagtccttagtgaattactttccggtagcggtgccagggcataatttagcactaaaactccatttcccggcgtgcctcgcggaggccgctgaactcagaagcgggaggccggttccggttgcatcagcgagggattcacggcgaaatgagactgttcgtgagtgatggcgtcccgggttgccgactcggaccgatg

SEQ ID NO: 13656 - DNA, 203 bp, Artificial sequence
  synthetic
ggcgcgccagtcctgtagaggctagaaaccagccaggccaatgtgggaaaaaggatagcccaaaggacaagaaaacacttctcactatgaattggtttggaagtaacttcttcaggtgtcctgaggatctttccttactcaacataggggagactctgttgtcacacatgtcatctgaagatgaacatcgactcggaccgatg

SEQ ID NO: 13657 - DNA, 203 bp, Artificial sequence
  synthetic
ggcgcgccagtcctcgcaagtttagaaaccagcttattgccaaagggaaaaaggatagcccaaaggacaagaaaacacttctcactatgaattggtttggaagtaacttcttcaggtgcggaagcttatgcgccttactcaacatatactcacctctgttgtcacacatgtcatctgaagatgaacatcgactcggaccgatg

SEQ ID NO: 13658 - DNA, 203 bp, Artificial sequence
  synthetic
ggcgcgccagtcctagtgcaaatagaaaccagcttattgccaaagggagtctccgagctatcaaggacaagaaaacacttctcactatgaattggtttggaagtaacttcttcaggtgtcctgaggatctttccttactcaacatatactcacctctgttgtcacacatgtcatctgaagatgaacatcgactcggaccgatg

SEQ ID NO: 13659 - DNA, 203 bp, Artificial sequence
  synthetic
ggcgcgccagtccttaacacgttagaacatacgggagacgaagactgagctgttttggctgcatttctggcctcgagccgcagtcagcttctccccgtagaacccggcagtaggagacttagaatcgaatctcttctccctcccgcctcctgtttttggctttttgagaaaccttatcatccaacacacgactcggaccgatg

SEQ ID NO: 13660 - DNA, 203 bp, Artificial sequence
  synthetic
ggcgcgccagtcctccgcaggttagactctggtaacaactcttgaaacacagatttcccacaagtctcctcttcgtcatcaagcaaccaccgcatccagcatcaagcccacctgaaattgtctccggcttccctctggccgaacgatatcggtagttaattaaaacttagggtgcaagatcatccacacgactcggaccgatg

SEQ ID NO: 13661 - DNA, 203 bp, Artificial sequence
  synthetic
ggcgcgccagtcctggaacgcctagagctgtaatgccagctggttgtggaccagccgtgacctggggcaacccagccaacctcaccgtccaatgggctgcagccacctctctccagtgaggtctgagacccagccttaacgaggctacccccttccaggtccggccgtagcacctccgcgccgtcgcccgactcggaccgatg

SEQ ID NO: 13662 - DNA, 203 bp, Artificial sequence
  synthetic
ggcgcgccagtccttagatttctagattaaacataatcatgcaaaatcactattttgtactactaactcattaagaaaaacttaggatccaagagatttactctaggatctcctattacagagtatgagacatagttgagagttcaacttgcaaaactctaaccttcactctaataacaattcatccacgactcggaccgatg

SEQ ID NO: 13663 - DNA, 203 bp, Artificial sequence
  synthetic
ggcgcgccagtcctatagcgtatagattaaacataatcatgcaaaatcactattttgtactactaactcattaagaaaaacttaggatccaagagatttactcttcacggaatacgatagcttagcagtcattagttgagagttcaacttgcaaaactctaaccttcactctaataacaattcatccacgactcggaccgatg

SEQ ID NO: 13664 - DNA, 203 bp, Artificial sequence
  synthetic
ggcgcgccagtcctgtcgcagctagattaaacataatcatgcaaaatcgggcaagacctaagctaactcattaagaaaaacttaggatccaagagatttactctaggatctcctattaagcttagcagtcattagttgagagttcaacttgcaaaactctaaccttcactctaataacaattcatccacgactcggaccgatg

SEQ ID NO: 13665 - DNA, 203 bp, Artificial sequence
  synthetic
ggcgcgccagtcctctacgatttagattcgcgaatcgggccgtggctcgtcggggtctgtgtcttttggctccgagggcagtcgctgggcttccgagaggggttcgggctgcgtaggggcgctttgttttgttcggttttgtttttttgagagtgcgagagaggcggtcgtgcagacccgggagaaagcgactcggaccgatg

SEQ ID NO: 13666 - DNA, 203 bp, Artificial sequence
  synthetic
ggcgcgccagtcctgggtccgatagattctatcttccacatcgctgtccccacccagccagggcagcgccagcactagctcagacgcaaggacggaaccgctggactccaggttccttgcctgggagtaggagaaatccacctgctgggggctgagtgtggcctgagggacaggccctgggtcccgggcgactcggaccgatg

SEQ ID NO: 13667 - DNA, 203 bp, Artificial sequence
  synthetic
ggcgcgccagtcctgcttaacatagccacgaggacgagaagaagggagccggaggagctggtcgctgtcggctaagcaagattggagctactcgtcgtccacctccagctcgcgtaagggtggctgtgcgactgcggccatttgtgtcacagcgtatcctagcaagtgatcccccctgtgtgcggggccgactcggaccgatg

SEQ ID NO: 13668 - DNA, 203 bp, Artificial sequence
  synthetic
ggcgcgccagtcctctcgtgactagccacgaggacgagaagaagggagccggaggagctggtcgctgtcggctaagcaagattggagctatcttggtcggtatcccagctcgcgtaagggtggctgtgcgactgcggccatttgtggatggaacagcgggagcaagtgatcccccctgtgtgcggggccgactcggaccgatg

SEQ ID NO: 13669 - DNA, 203 bp, Artificial sequence
  synthetic
ggcgcgccagtcctgtaactgctagccacgaggacgagaagaagggaggttccccttgcaaccgctgtcggctaagcaagattggagctactcgtcgtccacctccagctcgcgtaagggtggctgtgcgactgcggccatttgtggatggaacagcgggagcaagtgatcccccctgtgtgcggggccgactcggaccgatg

SEQ ID NO: 13670 - DNA, 203 bp, Artificial sequence
  synthetic
ggcgcgccagtccttatataggtagccacgaggagcgatcaggccttaccggaggagctggtcgctgtcggctaagcaagattggagctactcgtcgtccacctccagctcgcgtaagggtggctgtgcgactgcggccatttgtggatggaacagcgggagcaagtgatcccccctgtgtgcggggccgactcggaccgatg

SEQ ID NO: 13671 - DNA, 203 bp, Artificial sequence
  synthetic
ggcgcgccagtcctccgtaagatagcctccccctggcgtgcccccgcaagactgctagccgagtagtgttgggtcgcgaaaggccttgtggtactgcctgatagggtgcttgcgagtgccccgggaggtctcgtagaccgtgcaccatgagcacgaatcctaaacctcaaagaaaaaccaaacgtaaccgactcggaccgatg

SEQ ID NO: 13672 - DNA, 203 bp, Artificial sequence
  synthetic
ggcgcgccagtcctggttgacctagcgcaggagaaggctatctcggtccccagagaagcctgcgataggtgagtttctagatccagagaacctgacgacccggcgacggcgacgtctcttttgactaaaagacagtgtccagtgctccagcctaggagtctacggggaccgcctcccgcgccgccacccgactcggaccgatg

SEQ ID NO: 13673 - DNA, 203 bp, Artificial sequence
  synthetic
ggcgcgccagtcctcaactgactagcgcaggagaaggctatctcggtccccagagaagcctggacccacacgcgggctagatccagagaacctgacgacccggcgacggcgacgtctcttttgactaaaagacagtgtccagtgctccagcctaggagtctacggggaccgcctcccgcgccgccacccgactcggaccgatg

SEQ ID NO: 13674 - DNA, 203 bp, Artificial sequence
  synthetic
ggcgcgccagtcctggaaagtgtagcgcaggagaaggctatctcggtccccagagaagcctggacccacacgcgggctagatccagagaacctgacgacccggcgacggcgacgtctcttttgactaaaagacagtgtccagtgctccagcctaggagtctacggggaccgcctgattgatgttttgacgactcggaccgatg

SEQ ID NO: 13675 - DNA, 203 bp, Artificial sequence
  synthetic
ggcgcgccagtcctccacaccatagcgcaggagaaggctatctcggtcgatgtttggattccgacccacacgcgggctagatccagagaacctgacgacccggcgacggcgacgtctcttttgactaaaagacagtgtccagtgctccagcctaggagtctacggggaccgcctcccgcgccgccacccgactcggaccgatg

SEQ ID NO: 13676 - DNA, 203 bp, Artificial sequence
  synthetic
ggcgcgccagtcctactcgctctagcgcaggagattatgtgggtccgacccagagaagcctggacccacacgcgggctagatccagagaacctgacgacccggcgacggcgacgtctcttttgactaaaagacagtgtccagtgctccagcctaggagtctacggggaccgcctcccgcgccgccacccgactcggaccgatg

SEQ ID NO: 13677 - DNA, 203 bp, Artificial sequence
  synthetic
ggcgcgccagtcctgggcgatataggatctgtgggactgcgccacagcctctcgggagacgtgggccctcggaacctttttagtgccggactccgggccgcaggcagtcccgcggcagcaggatcacaggtggcagggactcagctcggaattctgtatagaaaaagcacctggatcccagtctttcacgactcggaccgatg

SEQ ID NO: 13678 - DNA, 203 bp, Artificial sequence
  synthetic
ggcgcgccagtcctggtatagctaggccacgtaggcccgtaagatattataactattttattatattttattcaccccccacattaatcccagttaaagctttataactataagtaagccgtgccgaaacgttaatcggtcgctagacctaatcgccgccttagtttaattttccaaaatttatttttcgactcggaccgatg

SEQ ID NO: 13679 - DNA, 203 bp, Artificial sequence
  synthetic
ggcgcgccagtcctctcaattataggctacgggtaggggacgcgcatataatacttctatgaagagatgccttggatagggtaacagcggcggatattggtgagttgttaagacaaaaaccattcaacgccggaggactgactctcatccagtggatgcattgagtggattgactgtcagggctgtctcgactcggaccgatg

SEQ ID NO: 13680 - DNA, 203 bp, Artificial sequence
  synthetic
ggcgcgccagtccttacgcccttaggttataatgttaggactataaaaattagcttaatgcatttagtaatttaaggcttagttatttaactttacttatcaagatggccgttggcagccccacgaaatctagattagtccgaatgtcctattttgattacccttcggcggcactcagaaactcacctcgactcggaccgatg

SEQ ID NO: 13681 - DNA, 203 bp, Artificial sequence
  synthetic
ggcgcgccagtcctgtggcttatagtgtgtattacaataattaaactaattaagctttgtttcacttgccatatgttttgtaatagaacaccactcattgaacgtaaaaatgtgtaccacatttaccaatcatatatgcacatagaccctttccctaaacgagttattgatttctaaactaaacgacacgactcggaccgatg

SEQ ID NO: 13682 - DNA, 203 bp, Artificial sequence
  synthetic
ggcgcgccagtcctcaattgtgtagttgaacgaatgggctccctatccggacaggtggctcttgccctttagactacagttcccagcatgcccaggcgattgcgtcccagaaccgacgtcccaccgccttcccacatcggatcgcagggctcccaaaatggcctataacattcacgtgaatggagtcccgactcggaccgatg

SEQ ID NO: 13683 - DNA, 203 bp, Artificial sequence
  synthetic
ggcgcgccagtccttcgtgcggtataagatacacctgcaaaggcggcacaaccccagtgccacgttgtgagttggatagttgtggaaagaccgccgatcggacgctcaagcgtattcaacaaggggctgaaggatgcccagaaggtaccccattgtatgggatctgatctggggcctcggtgcacatgcgactcggaccgatg

SEQ ID NO: 13684 - DNA, 203 bp, Artificial sequence
  synthetic
ggcgcgccagtccttgcgttagtataagatacacctgcaaaggcggcacaaccccagtgccacgttgtgagttggatagttgtggaaagagtcaaatggctctcctcaagcgtattcaacaaggggctgaagcgcctggtcccaaaaccccattgtatgggatctgatctggggcctcggtgcacatgcgactcggaccgatg

SEQ ID NO: 13685 - DNA, 203 bp, Artificial sequence
  synthetic
ggcgcgccagtcctcgaggtattataagatacacctgcaaaggcggcacaaccccagtgccacgttgtgagttggatagttgtggaaagagtcaaatggctctcctcaagcgtattcaacaaggggctgaaggatgcccagaaggtaccccattgtatggctatattcgccatccctcggtgcacatgcgactcggaccgatg

SEQ ID NO: 13686 - DNA, 203 bp, Artificial sequence
  synthetic
ggcgcgccagtccttccttcagtataagatacacctgcaaaggcggcacaaccccagtgccacgttgtgagttggatagttgtggaaagagtcaaatggctctcctcaagcgtattcaacaaggggctgaaggatgcccagaaggttaaaaccgcagcaagatctgatctggggcctcggtgcacatgcgactcggaccgatg

SEQ ID NO: 13687 - DNA, 203 bp, Artificial sequence
  synthetic
ggcgcgccagtcctcctcaaactataagatacacctgcaaaggcggcacaaccccagtgccagacatcacaggttttagttgtggaaagagtcaaatggctctcctcaagcgtattcaacaaggggctgaaggatgcccagaaggtaccccattgtatgggatctgatctggggcctcggtgcacatgcgactcggaccgatg

SEQ ID NO: 13688 - DNA, 203 bp, Artificial sequence
  synthetic
ggcgcgccagtccttccaattttataagatacactccatgctcgctttcaaccccagtgccacgttgtgagttggatagttgtggaaagagtcaaatggctctcctcaagcgtattcaacaaggggctgaaggatgcccagaaggtaccccattgtatgggatctgatctggggcctcggtgcacatgcgactcggaccgatg

SEQ ID NO: 13689 - DNA, 203 bp, Artificial sequence
  synthetic
ggcgcgccagtccttctcctgatatacaattttgagaggttaataagaaggaagtagtgctatcttaataattaggttaactatttagttttactgttcaggatgcctattggcagccagccgtcgctatatacaccctctctgcttcttatatgattaggttgtcatttagaataagaaaataacctcgactcggaccgatg

SEQ ID NO: 13690 - DNA, 203 bp, Artificial sequence
  synthetic
ggcgcgccagtcctacattatttatactggctgcttatggtgacaattgagagattgttaccatatagctattggattggccatccggtgaccaatagagctattatatatctctttgttgggtttataccacttagcttgaaagaggttaaaacattactcaagtccccactattgaatacagcaaacgactcggaccgatg

SEQ ID NO: 13691 - DNA, 203 bp, Artificial sequence
  synthetic
ggcgcgccagtcctagaagccgtatactggctgcttatggtgacaattgagagattgttaccatatagctattggattggccatccggtgctggcatctcggcctatatatctctttgttgggtttataccacttagcttgaaagaggttaaaacattacaattcattgttaagttgaatacagcaaacgactcggaccgatg

SEQ ID NO: 13692 - DNA, 203 bp, Artificial sequence
  synthetic
ggcgcgccagtcctgtactttgtatactggctgcttatggtgacaattgagagattgttacccctcgaactcctctttggccatccggtgaccaatagagctattatatatctctttgttgggtttataccacttagcttgaaagaggttaaaacattacaattcattgttaagttgaatacagcaaacgactcggaccgatg

SEQ ID NO: 13693 - DNA, 203 bp, Artificial sequence
  synthetic
ggcgcgccagtcctgaacctggtatagttaaggttgcgcttgcctattgttatgcgacatcgaggatggcgcgttgcagtccaacaagatccagggactgtacagaattttcctatacctcgagtcgggtttggaatctaaggttgactcgctgtaaataatgtaaatatgaaacaaatgaatgtaaacgactcggaccgatg

SEQ ID NO: 13694 - DNA, 203 bp, Artificial sequence
  synthetic
ggcgcgccagtcctgcagcctgtatagttaaggttgcgcttgcctatttaggcatacttctcaggatggcgcgttgcagtccaacaagatccagggactgtacagaattttcctatacctcgagtcgggtttccgtatatgctcaaactcgctgtaaataatgtaaatatgaaacaaatgaatgtaaacgactcggaccgatg

SEQ ID NO: 13695 - DNA, 203 bp, Artificial sequence
  synthetic
ggcgcgccagtcctgtgatctctatagttaaggttgcgcttgcctatttaggcatacttctcaggatggcgcgttgcagtccaacaagatccagggactgtacagaattttcctatacctcgagtcgggtttggaatctaaggttgactcgctgtaaataatgtaaatatgaaatgctaattctacggcgactcggaccgatg

SEQ ID NO: 13696 - DNA, 203 bp, Artificial sequence
  synthetic
ggcgcgccagtcctaaacatactatcagcggatgttgtcctgcgagttcctcttgagactggccgaaaggcagccacggggccaccaaggcggcgcagcgctgcatgcggcaaggggaaaaatccttcgggtgacccctggtggcaatcccttcccttaggagcatgagtgtggtcgacacattcacccgactcggaccgatg

SEQ ID NO: 13697 - DNA, 203 bp, Artificial sequence
  synthetic
ggcgcgccagtcctgcgtgtaatatcgaaggctccggcagcggtgtccgccccacggccggcgttgccggggtaacggcgagcgcgtggggccaagaaagaatacctcctctgaaaaatggcagaagcagttttccatgccccaaagaggaaaagaagagtgtatgagacttacgagtctccattgcccgactcggaccgatg

SEQ ID NO: 13698 - DNA, 203 bp, Artificial sequence
  synthetic
ggcgcgccagtccttttatcattatctggtcggtcatctctgtaacctaagcgtgtgatgtcaattggtctttaaaactcctcaatgcaccgggcgcggtggctcacgcctgtaatcccagcactttgggaggccgaggcgggcagatcacgaggtcaggaaatcgagaccatcttggctaacaagaacgactcggaccgatg

SEQ ID NO: 13699 - DNA, 203 bp, Artificial sequence
  synthetic
ggcgcgccagtccttcagaagatatctggtcggtcatctctgtaacctccctaccaaggactaattggtctttaaaactcctcaatgcaccgggcgcggtggctcacgcctgtaatcccagcactttgggaggccgaggcgggcagatcacgaggtcaggttcagcgccatcggttggctaacaagaacgactcggaccgatg

SEQ ID NO: 13700 - DNA, 203 bp, Artificial sequence
  synthetic
ggcgcgccagtcctctgtgggctatctggtcggtcatctctgtaacctccctaccaaggactaattggtctttaaaactcctcaatgcaccgggcgcggtggctcacgcctgtaatcccagcactttgggagtgttcatgaattccatcacgaggtcaggaaatcgagaccatcttggctaacaagaacgactcggaccgatg

SEQ ID NO: 13701 - DNA, 203 bp, Artificial sequence
  synthetic
ggcgcgccagtcctgcagattctatctggtcggtcatctctgtaacctccctaccaaggactttacatataagttgactcctcaatgcaccgggcgcggtggctcacgcctgtaatcccagcactttgggaggccgaggcgggcagatcacgaggtcaggaaatcgagaccatcttggctaacaagaacgactcggaccgatg

SEQ ID NO: 13702 - DNA, 203 bp, Artificial sequence
  synthetic
ggcgcgccagtcctatggacgctatctggtcggtgtggataccttgacccctaccaaggactaattggtctttaaaactcctcaatgcaccgggcgcggtggctcacgcctgtaatcccagcactttgggaggccgaggcgggcagatcacgaggtcaggaaatcgagaccatcttggctaacaagaacgactcggaccgatg

SEQ ID NO: 13703 - DNA, 203 bp, Artificial sequence
  synthetic
ggcgcgccagtcctgtttccaatatgctaaggggactcgtctccacctcgtaaaggaaactccccaagggaatccctgtcccctattttcaatgtaccagcaaattccaagacagtcctagcctatagaactcctacctcccatcccctgaggtggtccccattcctccctcccttcctccccccgcccgactcggaccgatg

SEQ ID NO: 13704 - DNA, 203 bp, Artificial sequence
  synthetic
ggcgcgccagtccttgcgtatctatgctaaggggactcgtctccacctcgtaaaggaaactccccaagggaatccctgtcccctattttcctatccttctacccgaagttagtttgattagcctatagaactcctacctcccatcccctgaggtggtccccattcctccctcccttcctccccccgcccgactcggaccgatg

SEQ ID NO: 13705 - DNA, 203 bp, Artificial sequence
  synthetic
ggcgcgccagtcctttgctttatatgctaaggggactcgtctccacctcgtaaaggaaactccccaagggaatccctgtcccctattttcctatccttctacccttccaagacagtccatataacgccttagcctacctcccatcccctgaggtggtccccattcctccctcccttcctccccccgcccgactcggaccgatg

SEQ ID NO: 13706 - DNA, 203 bp, Artificial sequence
  synthetic
ggcgcgccagtccttactaccatatgctaaggggactcgtctccacctcgtaaaggaaactccccaagggaatccctgtcccctattttcctatccttctacccttccaagacagtcctagcctatagaactcctacctcccatcccctgaggtggtcccaggcttgattgtgattcctccccccgcccgactcggaccgatg

SEQ ID NO: 13707 - DNA, 203 bp, Artificial sequence
  synthetic
ggcgcgccagtcctgattagattatgctaaggggactcgtctccacctcgtaaaggaaactccccaagggaatccctgtcccctattttcctatccttctacccttccaagacagtcctagcctatagaactcctacctcccatcccctgaggtggtccccattcctccctcccagatgggtagtcatcgactcggaccgatg

SEQ ID NO: 13708 - DNA, 203 bp, Artificial sequence
  synthetic
ggcgcgccagtccttcttactttatgctaaggggactcgtctccaccttaatgcattgttatcccaagggaatccctgtcccctattttcctatccttctacccttccaagacagtcctagcctatagaactcctacctcccatcccctgaggtggtccccattcctccctcccttcctccccccgcccgactcggaccgatg

SEQ ID NO: 13709 - DNA, 203 bp, Artificial sequence
  synthetic
ggcgcgccagtcctgacatatttatgtatgtatgacgcaggtcccggcatacacatatacacatattggtttttttaatcatttgagagttagttgaagataaaaacccatcacccctaaatgtattccaaagaataagaacattgttttatacatagcacacttaacaaaatcaagaaatttaacatcgactcggaccgatg

SEQ ID NO: 13710 - DNA, 203 bp, Artificial sequence
  synthetic
ggcgcgccagtcctagtctacatatgtatgtatgtatgtatatgtattatacacatatacacatattggtttttttaatcatttgagagttagttgaagataaaaacccatcaccccttgcatagaatttcggaataagaacattgttttatacatagcacacttaacaaaatcaagaaatttaacatcgactcggaccgatg

SEQ ID NO: 13711 - DNA, 203 bp, Artificial sequence
  synthetic
ggcgcgccagtcctataaagtttatgtatgtatgtatgtatatgtattcacacttagccacgatattggtttttttaatcatttgagagttagttgaagataaaaacccatcacccctaaatgtattccaaagaataagaacattgttttatacatagcacacttaacaaaatcaagaaatttaacatcgactcggaccgatg

SEQ ID NO: 13712 - DNA, 203 bp, Artificial sequence
  synthetic
ggcgcgccagtcctaaggagcgtatgtgaggggactgtttcctcttctttagcttcttccaccagaagggcctccaggattttgacactctgctcctgagtggtgatggaaatactctctacgtgggggctcgagaagccattctggccttggatatccaggatccaggggtccccaggctaaagaaccgactcggaccgatg

SEQ ID NO: 13713 - DNA, 203 bp, Artificial sequence
  synthetic
ggcgcgccagtcctggacccattatgtgaggggatgaacgtagggcaccctttcaaggtaggcagaagggcctccaggattttgacactctgctcctgagtggtgatggaaatactctctacgtgggggctcgagaagccattctggccttggatatccaggatccaggggtccccaggctaaagaaccgactcggaccgatg

SEQ ID NO: 13714 - DNA, 203 bp, Artificial sequence
  synthetic
ggcgcgccagtcctgaccactctatgtgaggggatgaacgtagggcacttagcttcttccaccagaagggcctccaggattttgacactctgctcctgagtggtagcaacgcctggtcctacgtgggggctcgagaagccattctggccttggatatccaggatccaggggtccccaggctaaagaaccgactcggaccgatg

SEQ ID NO: 13715 - DNA, 203 bp, Artificial sequence
  synthetic
ggcgcgccagtcctgtcattcttatgtgaggggatgaacgtagggcacttagcttcttccaccagaagggcctccaggattttgacactctgctcctgagtggtgatggaaatactctctacgtgggggctcactcgaatgcggcagccttggatatccaggatccaggggtccccaggctaaagaaccgactcggaccgatg

SEQ ID NO: 13716 - DNA, 203 bp, Artificial sequence
  synthetic
ggcgcgccagtccttgcaggactatgtgaggggatgaacgtagggcacttagcttcttccacgcttctaaagatgtggattttgacactctgctcctgagtggtgatggaaatactctctacgtgggggctcgagaagccattctggccttggatatccaggatccaggggtccccaggctaaagaaccgactcggaccgatg

SEQ ID NO: 13717 - DNA, 203 bp, Artificial sequence
  synthetic
ggcgcgccagtcctatccactatatgttgaatgaggtgtatcaaactaaggagaccttctaacagccaggtcataggaatataaataaaaataagaataaaattgattccatcggaagattcatttcaagaagtgatcaaatcaaagcggttggcagacctaccaatcatataccacaagactcgacacgactcggaccgatg

SEQ ID NO: 13718 - DNA, 203 bp, Artificial sequence
  synthetic
ggcgcgccagtcctggaatcaatatgttgaatgaggtgtatcaaactatttgagaaggagcccagccaggtcataggaatataaataaaaataagaataaaattgattccatcggaagattcatttcaagaagtgatcaaatcaaagcggttggcagacctaccaatcatataccacaagactcgacacgactcggaccgatg

SEQ ID NO: 13719 - DNA, 203 bp, Artificial sequence
  synthetic
ggcgcgccagtcctaacgcggctattcatttgatgggtaaatattttagggccgattctttggttttatagccaagataccctgttgataaagtcttgtgggaggggcggattttaaagcttattttgaagctttttaaaaaagacatccttacctgttttaactgtagattatattaacttaaatagcgactcggaccgatg

SEQ ID NO: 13720 - DNA, 203 bp, Artificial sequence
  synthetic
ggcgcgccagtccttctatgcttattcgatttggcagcgagcctctggagtccctgtggcagaactcaaatggaaggaggagcagctgcacccaggggagcagggtgtcacctccgttggatagagccggccaggttgcagcgcggacacactcgcaggtcgctgtggccccagcctcgcctgacagacgactcggaccgatg

SEQ ID NO: 13721 - DNA, 203 bp, Artificial sequence
  synthetic
ggcgcgccagtccttggagtagtattggctgcttatggtgacaatcaaaaagttgttaccatatagctattggattggccatccggtgtgcaacagggcaattgtttacctatttattggttttgtaccattatcactgaagtctgtgatcactctcaaattcattttgaccctcaacacaatcaaaccgactcggaccgatg

SEQ ID NO: 13722 - DNA, 203 bp, Artificial sequence
  synthetic
ggcgcgccagtccttttacgactattggctgcttatggtgacaatcaaaaagttgttaccatatagctattggattggccatccggtgtgcaacagggcaattgtttacctatttattggttttgtaccattgaagggtctaggattgatcactctcaaattcattttgaccctcaacacaatcaaaccgactcggaccgatg

SEQ ID NO: 13723 - DNA, 203 bp, Artificial sequence
  synthetic
ggcgcgccagtcctgtcgtcaatattggctgcttatggtgacaatcaaaaagttgttaccatcctagagacatgggggccatccggtgtgcaacagggcaattgtttacctatttattggttttgtaccattatcactgaagtctgtgatcactctcaaattcattttgaccctcaacacaatcaaaccgactcggaccgatg

SEQ ID NO: 13724 - DNA, 203 bp, Artificial sequence
  synthetic
ggcgcgccagtccttttgtccctattggctgcttatggtgacaatcaattctagcggcaacaatagctattggattggccatccggtgtgcaacagggcaattgtttacctatttattggttttgtaccattatcactgaagtctgtgatcactctcaaattcattttgaccctcaacacaatcaaaccgactcggaccgatg

SEQ ID NO: 13725 - DNA, 203 bp, Artificial sequence
  synthetic
ggcgcgccagtcctatacgtcttatttctcaactaacgacttgtacgttgctcttagaggactagcaaccgttatactcagcctttctagaaaggttgagttatataacggtgaatgtgtatacttgttttgtgaacacccagctgttggaatagtcaacacagatttcaaattagaaatccactaagcgactcggaccgatg

SEQ ID NO: 13726 - DNA, 203 bp, Artificial sequence
  synthetic
ggcgcgccagtccttaaggaactcaacaacatcaataaaacagacatcaatccattgaatcaactgccagaccgaacaaacaaatgtccgtcagcggaaccaccaaccaatcaatcaaccaactgatccatcagcaacctgacgaaattaacaatatagtccatgttgtcctgaaagatggggcaaatcgactcggaccgatg

SEQ ID NO: 13727 - DNA, 203 bp, Artificial sequence
  synthetic
ggcgcgccagtccttggcattctcaagccctccggtagagaagccaagaatgtcctgaaggtaccccgcgcgcgggatctgatcaggagaccaattggcagtgctttacgctgccactttggtttaaaaactagtgacttcctaggaaaccaagtggtcttggttttccaattttgttgactgacaatcgactcggaccgatg

SEQ ID NO: 13728 - DNA, 203 bp, Artificial sequence
  synthetic
ggcgcgccagtcctactctgtttcaagccctccggtagagaagccaagaatgtcctgaaggtaccccgcgcgcgggatctgatcaggagaccaattggcagtgctttacgctgccactttggtttaaaaactgtcacagcttctccaaaccaagtggtcttggttttccaatttgaggcggaacagcgcgactcggaccgatg

SEQ ID NO: 13729 - DNA, 203 bp, Artificial sequence
  synthetic
ggcgcgccagtcctcccaccgatcaagccctccggtagagaagccaagaatgtcctgaaggtaccccgcgcgcgggatctgatcaggagaccaattggcagtgctttacgctgccactttggtttaaaaactgtcacagcttctccaaaccaagtggtcttggttttccaattttgttgactgacaatcgactcggaccgatg

SEQ ID NO: 13730 - DNA, 203 bp, Artificial sequence
  synthetic
ggcgcgccagtcctctcttctatcaagccctccggtagagaagccaagaatgtcctgaaggtaccccgcgcgcgggatctgatcaggagaccaattggcagtgctttacgctgccactttggtttaaaaactgtcacagcttctccttcagcgagatggctggttttccaattttgttgactgacaatcgactcggaccgatg

SEQ ID NO: 13731 - DNA, 203 bp, Artificial sequence
  synthetic
ggcgcgccagtcctagacaatatcaagccctccggtagagaagccaagaatgtcctgaaggtaccccgcgcgcggggctccgcagtattcccaattggcagtgctttacgctgccactttggtttaaaaactgtcacagcttctccaaaccaagtggtcttggttttccaattttgttgactgacaatcgactcggaccgatg

SEQ ID NO: 13732 - DNA, 203 bp, Artificial sequence
  synthetic
ggcgcgccagtcctgagcattgtcaatgacctgttttcttctgtaaccacaggttcggtggtgagaggaagcctcgcagaatccagcagaatcctcacagaatccagcagcagctctgctggggacatggtccatggtgcaacccacagcaaagccctgacctgacctcctgatgctcaggagaagcccgactcggaccgatg

SEQ ID NO: 13733 - DNA, 203 bp, Artificial sequence
  synthetic
ggcgcgccagtcctggcacggatcaatgacctgttttcttctgtaaccacaggttcggtggtgagaggaagcctcgcagaatccagcagaatcctcacagaatccagcagcagctctgctggggacatggtccatggtgcaacccatctggtgcataccgcctgacctcctgatgctcaggagaagcccgactcggaccgatg

SEQ ID NO: 13734 - DNA, 203 bp, Artificial sequence
  synthetic
ggcgcgccagtcctactggttttcaatgacctgttttcttctgtaaccacaggttcggtggtgagaggaagcctcgcagaatccagcagaatcctcacagaatccagcagcagctctgctggggacatggtctcgtacaaggaagtcagcaaagccctgacctgacctcctgatgctcaggagaagcccgactcggaccgatg

SEQ ID NO: 13735 - DNA, 203 bp, Artificial sequence
  synthetic
ggcgcgccagtccttgtaagagtcaatgacctgttttcttctgtaaccacaggttcggtggtgagaggaagcctcgcagaatccagcagacgttgtcgttcgaacagcagcagctctgctggggacatggtccatggtgcaacccacagcaaagccctgacctgacctcctgatgctcaggagaagcccgactcggaccgatg

SEQ ID NO: 13736 - DNA, 203 bp, Artificial sequence
  synthetic
ggcgcgccagtccttaaacgcgtcacatcaccagtgtatcctcagctcctaacactgtgtctggtacacattgtttgatggttttgatgtttcagattcgttatatttcacaaacacaaggcttgccagctgaatatcttctcagtgccggaacaaaaaccttggtagcccgatacagagatcctaatcgactcggaccgatg

SEQ ID NO: 13737 - DNA, 203 bp, Artificial sequence
  synthetic
ggcgcgccagtcctgtcctggctcacatcaccagtgtatcctcagctctcctacgccaacacggtacacattgtttgatggttttgatgtttcagattcgttatatttcacaaacacaaggcttgccagctgaatatcttctcagtgccggaacaaaaacaaccaggtttttcaacagagatcctaatcgactcggaccgatg

SEQ ID NO: 13738 - DNA, 203 bp, Artificial sequence
  synthetic
ggcgcgccagtcctgccaagattcaccagagcggaacaagaaagagaacggccaccggggtcggctgggacagactgcgggcacgtccccttccagaggctttaactgaaaaatagaacccaggaaggtgtggacactgccagcggctgcagccgacttggaatgacctgggagacaaatacaacagccgactcggaccgatg

SEQ ID NO: 13739 - DNA, 203 bp, Artificial sequence
  synthetic
ggcgcgccagtccttccaaacgtcactcccagactccttgcggagctcaaaatacctacgacggctggtcactactccgagcctgtgacgtttgcggcagccaggccgtcgacgatgcccagtgaaactctctgggaaattgcaaaagctgaagtggaaaaaaggggaattaatggaagtgaaggtgacgactcggaccgatg

SEQ ID NO: 13740 - DNA, 203 bp, Artificial sequence
  synthetic
ggcgcgccagtcctagtagttctcactcccagactccttgcggagctcgccgcctgattctaggctggtcactactagatattcaccgactttgcggcagccaggccgtcgacgatgcccagtgaaactctctgggaaattgcaaaagctgaagtggaaaaaaggggaattaatggaagtgaaggtgacgactcggaccgatg

SEQ ID NO: 13741 - DNA, 203 bp, Artificial sequence
  synthetic
ggcgcgccagtcctgttacaattcactcccagactccttgcggagctcgccgcctgattctaggctggtcactactccgagcctgtgacggccaataaccagccgccgtcgacgatgcccagtgaaactctctgggaaattgcaaaagctgaagtggaaaaaaggggaattaatggaagtgaaggtgacgactcggaccgatg

SEQ ID NO: 13742 - DNA, 203 bp, Artificial sequence
  synthetic
ggcgcgccagtcctggccacggtcactcccagactccttgcggagctcgccgcctgattctaggctggtcactactccgagcctgtgacgtttgcggcagccaggccgtcgacgatgcccagtgaaactctctgggaaattgcaaaagctgaagtggaaaaaaggggaattaatggaagtgaaggtgacgactcggaccgatg

SEQ ID NO: 13743 - DNA, 203 bp, Artificial sequence
  synthetic
ggcgcgccagtcctgggcatcatcactcccagactccttgcggagctcgccgcctgattctaggctggtcactactccgagcctgtgacgtttgcggcagccaggccgtcgacgatgcccagtgaaactctctgggaaattgcaaatcacagccatatctaaaggggaattaatggaagtgaaggtgacgactcggaccgatg

SEQ ID NO: 13744 - DNA, 203 bp, Artificial sequence
  synthetic
ggcgcgccagtccttaagtctatcactctcataatcctcttacagctttactcctgccagcttgggaaaaggccggagaaggtgaaattctgtgtgctccctccggcgagagactttgtcagctcccgcacagtaacgtggaagtccaagaatccgagtggaggctcaccgaggcgaaggggccaacccgactcggaccgatg

SEQ ID NO: 13745 - DNA, 203 bp, Artificial sequence
  synthetic
ggcgcgccagtcctcacggatgtcactgctatagagaaatttgcttaagacctacatgcttcctgctgtggctgtctcggaacccgtggtcctccgcttcatgattttctgccgtctcttggcaaaaatggcaaataatgatgctgttctgaagagactggagcagaagggtgcagaggcagatcaaacgactcggaccgatg

SEQ ID NO: 13746 - DNA, 203 bp, Artificial sequence
  synthetic
ggcgcgccagtccttaaagtaatcactgctatagtacgcgggtggctgactggcagataagactgctgtggctgtctcggaacccgtggtcctccgcttcatgattttctgccgtctcttggcaaaaatggcaaataatgatgctgttctgaagagactggagcagaagggtgcagaggcagatcaaacgactcggaccgatg

SEQ ID NO: 13747 - DNA, 203 bp, Artificial sequence
  synthetic
ggcgcgccagtccttgcaccggtcactgctatagtacgcgggtggctggacctacatgcttcctgctgtggctgtctcggaacccgtggtcctccgcttcatgacagcggcgtcaaatttggcaaaaatggcaaataatgatgctgttctgaagagactggagcagaagggtgcagaggcagatcaaacgactcggaccgatg

SEQ ID NO: 13748 - DNA, 203 bp, Artificial sequence
  synthetic
ggcgcgccagtcctacttgggttcactgctatagtacgcgggtggctggacctacatgcttcctgctgtggctgtctcggaacccgtggtcctccgcttcatgattttctgccgtctccatcagttgccactaaataatgatgctgttctgaagagactggagcagaagggtgcagaggcagatcaaacgactcggaccgatg

SEQ ID NO: 13749 - DNA, 203 bp, Artificial sequence
  synthetic
ggcgcgccagtccttcaccgcttcactgctatagtacgcgggtggctggacctacatgcttcctgctgtggctgtctcggaacccgtggtcctccgcttcatgattttctgccgtctcttggcaaaaatggctcggcgatgacgccttctgaagagactggagcagaagggtgcagaggcagatcaaacgactcggaccgatg

SEQ ID NO: 13750 - DNA, 203 bp, Artificial sequence
  synthetic
ggcgcgccagtcctcaaagcactcactgctatagtacgcgggtggctggacctacatgcttctcatgcaacacccatcggaacccgtggtcctccgcttcatgattttctgccgtctcttggcaaaaatggcaaataatgatgctgttctgaagagactggagcagaagggtgcagaggcagatcaaacgactcggaccgatg

SEQ ID NO: 13751 - DNA, 203 bp, Artificial sequence
  synthetic
ggcgcgccagtcctacttatactcacttctaactgcgataaatgctgacgtgaaaacgttgcgtattgctacaacacttggttagctatttagctttactaatcaagacgccgtcgtgcagcccacaaaagtctagatacgtcacaggagagcatacgctaggtcgcgttgactatccttatatatgacgactcggaccgatg

SEQ ID NO: 13752 - DNA, 203 bp, Artificial sequence
  synthetic
ggcgcgccagtcctggattatctcagccgcccgagggcgctgcgctgagccttacactctatgattgctcctaccgactcccatgaggaagtgcgatcgggaacctcctatatacttccgtttgcctcgcggtttctttctttccgcgccgatagcgctcacgcaagcatggttggatcgatagtcttcgactcggaccgatg

SEQ ID NO: 13753 - DNA, 203 bp, Artificial sequence
  synthetic
ggcgcgccagtcctatcatccgtcagccgcccgagggcgctgcgctgagccttacactctatgattgctcctaccgactcccatgaggaagtgcgatcgggaacctcctatatacttccgtttgcctcgcggtttctttctttccgtttatcggcattgaacgcaagcatggttaacgtccctaaaaccgactcggaccgatg

SEQ ID NO: 13754 - DNA, 203 bp, Artificial sequence
  synthetic
ggcgcgccagtccttcaggacgtcagccgcccgagggcgctgcgctgagccttacactctatgattgctcctaccgactcccatgaggaagtgcgatcgggaacctcctatatacttcttccgtggcgcatttttctttctttccgcgccgatagcgctcacgcaagcatggttaacgtccctaaaaccgactcggaccgatg

SEQ ID NO: 13755 - DNA, 203 bp, Artificial sequence
  synthetic
ggcgcgccagtcctgataatcatcagccgcccgagggcgctgcgctgagccttacactctattgcattctactttcactcccatgaggaagtgcgatcgggaacctcctatatacttccgtttgcctcgcggtttctttctttccgcgccgatagcgctcacgcaagcatggttaacgtccctaaaaccgactcggaccgatg

SEQ ID NO: 13756 - DNA, 203 bp, Artificial sequence
  synthetic
ggcgcgccagtccttcccataatcagccggcgccgcgaatgttcaagttactttgccccgccggcggggcggtcagcctcctgtcaccgcctgttccggctatggtcccgtccggtgttctgtaagttggcaacctaggctcctgacgcgaccctggtcctgatggcggcggcgacggccgcggcagccgactcggaccgatg

SEQ ID NO: 13757 - DNA, 203 bp, Artificial sequence
  synthetic
ggcgcgccagtccttagagcgctcagccggcgccgcgccgccgggtgttactttgccccgccggcggggcggtcagcctcctgtcaccgcctgttccggctatggtcccgtccggtgttctgtaagttggcaacctaggctcctgacgcgaccctggtcctgatggcggcggcgacggccgcggcagccgactcggaccgatg

SEQ ID NO: 13758 - DNA, 203 bp, Artificial sequence
  synthetic
ggcgcgccagtcctcagtattttcagccggcgccgcgccgccgggtgttactttgccccgcctctaacctaacacccctcctgtcaccgcctgttccggctatggtcccgtccggtgttctgtaagttggcaacctaggctcctgacgcgaccctggtcctgatggcggcggcgacggccgcggcagccgactcggaccgatg

SEQ ID NO: 13759 - DNA, 203 bp, Artificial sequence
  synthetic
ggcgcgccagtccttatactgttcagcgagcgcagcctgcacgcccgcctcgcgtcccgggggggtcccgcctcccaccccgcctctggacttgtctctttccccgcgcgcgcggacagagccggcgtttaggcccgagcgagcccaatttttctacctggggaagacaacgcgggcaccgattcgcccgactcggaccgatg

SEQ ID NO: 13760 - DNA, 203 bp, Artificial sequence
  synthetic
ggcgcgccagtcctaagagacatcagcgagcgcagcctgcacgcccgcctcgcgtcccgggggggtcccgcctcccaccccgcctctggacttgtctctttccccgcgcgcgcggacagagccggcgtttaggcccgagcgagcccgggggccgccggccgggaagacaacgcgtagtttagagacgtcgactcggaccgatg

SEQ ID NO: 13761 - DNA, 203 bp, Artificial sequence
  synthetic
ggcgcgccagtcctgtacggcctcagcgagcgcagcctgcacgcccgcctcgcgtcccgggggggtcccgcctcccaccccgcctctggacttgtctctttccccgcgcgcgcggacagagccggcgtttagtaggcctgctctatgggggccgccggccgggaagacaacgcgggcaccgattcgcccgactcggaccgatg

SEQ ID NO: 13762 - DNA, 203 bp, Artificial sequence
  synthetic
ggcgcgccagtcctaattcgtttcagcgagcgcagcctgcacgcccgcctcgcgtcccgggggggtcccgcctcccttagatttgactcgcttgtctctttccccgcgcgcgcggacagagccggcgtttaggcccgagcgagcccgggggccgccggccgggaagacaacgcgggcaccgattcgcccgactcggaccgatg

SEQ ID NO: 13763 - DNA, 203 bp, Artificial sequence
  synthetic
ggcgcgccagtcctagggcttttcaggccccctccgcctccacccctgccctcctcaggccccctccgcctccacccctgccctcctcaggccccctgcgtcccaaggcttcggagtccaggccccctccgcctccggctccgtcctcctctggccccctccgcccccggccccggccccacggcgggcgactcggaccgatg

SEQ ID NO: 13764 - DNA, 203 bp, Artificial sequence
  synthetic
ggcgcgccagtcctagtattaatcaggccccctccgcctccacccctgccctcctcaggccccctccgcctccacccctgccctcctcaggccccctgcgtccccgcctcgtcctcctcaggccccctccgcctccggctccgtccgggcggtattgggcccgcccccggccccggccccacggcgggcgactcggaccgatg

SEQ ID NO: 13765 - DNA, 203 bp, Artificial sequence
  synthetic
ggcgcgccagtcctaaagcacttcaggccccctccgcctccacccctgccctcctcaggccccctccgcctccacccctgccctcctcaggccccctgcgtccccgcctcgtcctcctcaggccccctccgcctccggctccgtcctcctctggccccctccgcccccggccccggccccacggcgggcgactcggaccgatg

SEQ ID NO: 13766 - DNA, 203 bp, Artificial sequence
  synthetic
ggcgcgccagtcctctatagcctcaggccccctccgcctccacccctgccctcctcaggccccctccgcctccacccctgccctcctcaggccccctgcgtccccgcctcgtcctcctcaggccccctccgcctccggctccgtcctcctctggccccctccgcccccggccccttgttggtaagaatcgactcggaccgatg

SEQ ID NO: 13767 - DNA, 203 bp, Artificial sequence
  synthetic
ggcgcgccagtcctaggaacggtcaggccccctccgcctccacccctgccctcctcaggcccgagtttgaatactgcctgccctcctcaggccccctgcgtccccgcctcgtcctcctcaggccccctccgcctccggctccgtcctcctctggccccctccgcccccggccccggccccacggcgggcgactcggaccgatg

SEQ ID NO: 13768 - DNA, 203 bp, Artificial sequence
  synthetic
ggcgcgccagtcctgggagccatcaggccccctccgcctccacccctggatcgtgtgactatcctccgcctccacccctgccctcctcaggccccctgcgtccccgcctcgtcctcctcaggccccctccgcctccggctccgtcctcctctggccccctccgcccccggccccggccccacggcgggcgactcggaccgatg

SEQ ID NO: 13769 - DNA, 203 bp, Artificial sequence
  synthetic
ggcgcgccagtcctagtttggctcaggccccctctttacggtaaaaccccctcctcaggccccctccgcctccacccctgccctcctcaggccccctgcgtccccgcctcgtcctcctcaggccccctccgcctccggctccgtcctcctctggccccctccgcccccggccccggccccacggcgggcgactcggaccgatg

SEQ ID NO: 13770 - DNA, 203 bp, Artificial sequence
  synthetic
ggcgcgccagtcctaccggtgctcaggcggaaggagcagtcctctgaagcttgaggagcctctagaactatgagcccgaggccttcccctctcccagagcgcagaggctttgaaggctacctctgggaagccaaaacgaccgcttggctgcgggagctgaaactgcgccatcgtcactgtcggcggcccgactcggaccgatg

SEQ ID NO: 13771 - DNA, 203 bp, Artificial sequence
  synthetic
ggcgcgccagtcctttagccgatcaggcggaaggagcagtcctctgaagcttgaggagcctctagaactatgagcccgaggccttcccctctcccagagcgcagaggctttgaaggctacctctgggaagccgctcaccgtcggaagctgcgggagctgaaactgcgccatcgtactccagcatttggcgactcggaccgatg

SEQ ID NO: 13772 - DNA, 203 bp, Artificial sequence
  synthetic
ggcgcgccagtcctcctgggtctcaggcggaaggagcagtcctctgaagcttgaggagcctctagaactatgagcccgaggccttcccctctcccagagcgcagaggctttgaaggctacctctgggaagccgctcaccgtcggaattcaaccattgctcaactgcgccatcgtcactgtcggcggcccgactcggaccgatg

SEQ ID NO: 13773 - DNA, 203 bp, Artificial sequence
  synthetic
ggcgcgccagtcctgggctccctcaggcggaaggagcagtcctctgaagcttgaggagcctctagaactatgagcccgaggccttcccctctcccagagcgcaggtcgagacggattgacctctgggaagccgctcaccgtcggaagctgcgggagctgaaactgcgccatcgtcactgtcggcggcccgactcggaccgatg

SEQ ID NO: 13774 - DNA, 203 bp, Artificial sequence
  synthetic
ggcgcgccagtcctgtgtttagtcatcgtgcgtcagagtgagcccggatggggcggcgggctaataatcgagggttgctgatccgagccgagcgggccgtatctccttgtcggcgccgctgattcccggctctgcggaggcctctaggcagccgcgcagcttccgtgtttgctgcgcccgcactgcgacgactcggaccgatg

SEQ ID NO: 13775 - DNA, 203 bp, Artificial sequence
  synthetic
ggcgcgccagtcctctcggccatcatcgtgcgtcagagtgagcccggatggggcggcgggcttcgggagcgcccgggctgatccgagccgagcgggccgtatctccttgtcggcgccgctgattcccggctcgtgtcgtatactgtggcagccgcgcagcttccgtgtttgctgcgcccgcactgcgacgactcggaccgatg

SEQ ID NO: 13776 - DNA, 203 bp, Artificial sequence
  synthetic
ggcgcgccagtcctgggtaaggtcatcgtgcgtcagagtgagcccggatggggcggcgggcttcgggagcgcccgggctgatccgagccgagcgggccgtatctccttgtcggcgccgctgattcccggctctgcggaggcctctactactgtaacatagttccgtgtttgctgcgcccgcactgcgacgactcggaccgatg

SEQ ID NO: 13777 - DNA, 203 bp, Artificial sequence
  synthetic
ggcgcgccagtcctatgagccctcatcgtgcgtcagagtgagcccggatggggcggcgggcttcgggagcgcccgggctgatccgagccgagcgggccgtatctccttgtcggcgccgctgattcccggctctgcggaggcctctaggcagccgcgcagccaggtctgcaataacgcccgcactgcgacgactcggaccgatg

SEQ ID NO: 13778 - DNA, 203 bp, Artificial sequence
  synthetic
ggcgcgccagtcctcgtgtcattcatcgtgcgtcagagtgagcccggatggggcggcgggcttcgggagcgcccgggctgatccgagccgagcgggccgtatctccttgtcggcgccgctgattcccggctctgcggaggcctctaggcagccgcgcagcttccgtgtttgctgcgcccgcactgcgacgactcggaccgatg

SEQ ID NO: 13779 - DNA, 203 bp, Artificial sequence
  synthetic
ggcgcgccagtccttccaccattcatcgtgcgtcagagtgagcccggatggggcggcgggcttcgggagcgcccgggctgatccgagccggcttatgtcctaagccttgtcggcgccgctgattcccggctctgcggaggcctctaggcagccgcgcagcttccgtgtttgctgcgcccgcactgcgacgactcggaccgatg

SEQ ID NO: 13780 - DNA, 203 bp, Artificial sequence
  synthetic
ggcgcgccagtccttgaccgaatcatgggttcggtggtggtggcgcttatcaatcgaaggcggcccaccacctcccagatagagcggcggcactgtagggaagaccggggaccggtcactaccaaggacgcagacctctttttgagtatcacgcctccggaagtagttgggcaagcccacctatatgtcgactcggaccgatg

SEQ ID NO: 13781 - DNA, 203 bp, Artificial sequence
  synthetic
ggcgcgccagtcctggaggcagtcatgggttcggtggtggtggcgctttaggcagcctccacgcccaccacctcccagatagagcggcggcactgtagggaagaccggggaccggtcactaccaaggacgcagacctctttttgagacgtggaggcgtacaagtagttgggcaagcccacctatatgtcgactcggaccgatg

SEQ ID NO: 13782 - DNA, 203 bp, Artificial sequence
  synthetic
ggcgcgccagtcctgcgtaatttcatgggttcggtggtggtggcgctttaggcagcctccacgcccaccacctcccagatagagcggcggcactgtagggaagattctactaaccgtgctaccaaggacgcagacctctttttgagtatcacgcctccggaagtagttgggcaagcccacctatatgtcgactcggaccgatg

SEQ ID NO: 13783 - DNA, 203 bp, Artificial sequence
  synthetic
ggcgcgccagtcctccgggccctcattcattcaacaaatacgaatgtgcagcggtgctggggtcatgatggctcggtgggcagcgaggggaaactttaatcaagggagcacagtgcggattctattctgaaagtcaagaagacatcatccggaatattgccaggcacctcgcccaggtcggggacagccgactcggaccgatg

SEQ ID NO: 13784 - DNA, 203 bp, Artificial sequence
  synthetic
ggcgcgccagtcctttcgtctgtcattcattcaacaaatacgaatgtgcagcggtgctggggtcatgatggctcggtgggcagcgaggggccgggccggctggaggagcacagtgcggattctattctgaaagtcaagaagacatcatccggaatattgccaggcacctcgccccatcttaacctcttcgactcggaccgatg

SEQ ID NO: 13785 - DNA, 203 bp, Artificial sequence
  synthetic
ggcgcgccagtccttatcatagtcattcattcaagcctactaggctaccagcggtgctggggtcatgatggctcggtgggcagcgaggggccgggccggctggaggagcacagtgcggattctattctgaaagtcaagaagacatcatccggaatattgccaggcacctcgcccaggtcggggacagccgactcggaccgatg

SEQ ID NO: 13786 - DNA, 203 bp, Artificial sequence
  synthetic
ggcgcgccagtcctgtgtgctatccacaggcctatgctgtgatatctggggctcctgctgctatagctggatttgcagctttactgcaaactgtgactggtgtgagcgctgttgctcaagtggggtatagatcaaccttatcggatgatcacaaagtttctactgttggtttatatcaacaaccaggacgactcggaccgatg

SEQ ID NO: 13787 - DNA, 203 bp, Artificial sequence
  synthetic
ggcgcgccagtcctacttaatgtccacaggcctatgctgtgatatctggggctcctgctgctatagctggatttgcagctttactgcaaactgtgactggtgtgagcgctgttgctcaagtggggtatagattttttagtgactgggatcacaaagtttctactgttggtttatcatccgtgtatccgcgactcggaccgatg

SEQ ID NO: 13788 - DNA, 203 bp, Artificial sequence
  synthetic
ggcgcgccagtcctgcatgtcgtccacaggcctatgctgtgatatctggggctcctgctgctccctaatccgactgagctttactgcaaactgtgactggtgtgagcgctgttgctcaagtggggtatagattttttagtgactgggatcacaaagtttctactgttggtttatatcaacaaccaggacgactcggaccgatg

SEQ ID NO: 13789 - DNA, 203 bp, Artificial sequence
  synthetic
ggcgcgccagtcctatctaacatccagacccacccctgggcggaactcctcggccaggtcctggagtcccgtaacacccttcccctggagccatgctgggccctagcccgggtccctcgccgggctccgcccacagcatgatggggcccagcccagggccgccctcagcaggacaccccatccccacccgactcggaccgatg

SEQ ID NO: 13790 - DNA, 203 bp, Artificial sequence
  synthetic
ggcgcgccagtcctttcgcgcgtccagacccacccctgggcggaactcctcggccaggtccttccccgggccctggcccttcccctggagccatgctgggccctagcccgggtccctcgccgggctccgcccacagcatgatggggaaggttatgtttttgccctcagcaggacaccccatccccacccgactcggaccgatg

SEQ ID NO: 13791 - DNA, 203 bp, Artificial sequence
  synthetic
ggcgcgccagtcctaactcctatccagacccacccctgggcggaactcctcggccaggtccttccccgggccctggcccttcccctggagccatgctgggccctagcccgggtccctcgccgggctccgcccacagcatgatggggcccagcccagggcctagacagcagtcgaaccccatccccacccgactcggaccgatg

SEQ ID NO: 13792 - DNA, 203 bp, Artificial sequence
  synthetic
ggcgcgccagtccttattaagttccagacccacccctgggcggaactcctcggccaggtccttccccgggccctggcccttcccctggagccatgctgggccctagcccgggtccctcttgtcaggggcgttacagcatgatggggcccagcccagggccgccctcagcaggacaccccatccccacccgactcggaccgatg

SEQ ID NO: 13793 - DNA, 203 bp, Artificial sequence
  synthetic
ggcgcgccagtcctcgataacgtccagacccacccctgggcggaactcctcggccaggtccttccccgggccctgggagacaagagacgtccatgctgggccctagcccgggtccctcgccgggctccgcccacagcatgatggggcccagcccagggccgccctcagcaggacaccccatccccacccgactcggaccgatg

SEQ ID NO: 13794 - DNA, 203 bp, Artificial sequence
  synthetic
ggcgcgccagtcctattggacctccatgatttttcatcatagtggaaagctgttctctgtgttaaaccaatcagttgcgaccttctcttaacagtgtgaagtgagggggtctctctccctccttctccttcctctgtgattcaccttcctttttaccctgccctgcggcggctccgccccttaccttccgactcggaccgatg

SEQ ID NO: 13795 - DNA, 203 bp, Artificial sequence
  synthetic
ggcgcgccagtcctaacattggtccatgattttttgaatctagactgggctgttctctgtgtagccgtcccatccggcgaccttctcttaacagtgtgaagtgagggggtctctctccctccttctccttcctctgtgattcaccttcctttttaccctgccctgcggcggctccgccccttaccttccgactcggaccgatg

SEQ ID NO: 13796 - DNA, 203 bp, Artificial sequence
  synthetic
ggcgcgccagtccttgttgtaatccatgattttttgaatctagactgggctgttctctgtgttaaaccaatcagttaattgtcaagtgacacagtgtgaagtgagggggtctctctccctccttctccttcctctgtgattcaccttcctttttaccctgccctgcggcggctccgccccttaccttccgactcggaccgatg

SEQ ID NO: 13797 - DNA, 203 bp, Artificial sequence
  synthetic
ggcgcgccagtcctggtttcggtccatgattttttgaatctagactgggctgttctctgtgttaaaccaatcagttgcgaccttctcttaacagtgtgaagtgaaatccggaaggaaactccttctccttcctctgtgattcaccttcctttttaccctgccctgcggcggctccgccccttaccttccgactcggaccgatg

SEQ ID NO: 13798 - DNA, 203 bp, Artificial sequence
  synthetic
ggcgcgccagtcctttattcggtccatgattttttgaatctagactgggctgttctctgtgttaaaccaatcagttgcgaccttctcttaacagtgtgaagtgagggggtctctctccctccttctccttccgagagaggcggaggtcctttttaccctgccctgcggcggctccgccccttaccttccgactcggaccgatg

SEQ ID NO: 13799 - DNA, 203 bp, Artificial sequence
  synthetic
ggcgcgccagtccttgttcgcatccatgattttttgaatctagactgggctgttctctgtgttaaaccaatcagttgcgaccttctcttaacagtgtgaagtgagggggtctctctccctccttctccttcctctgtgattcaccttcctttttaccctgccctgcggcggctccgccccttaccttccgactcggaccgatg

SEQ ID NO: 13800 - DNA, 203 bp, Artificial sequence
  synthetic
ggcgcgccagtccttcgagagatccatgattttttgaatctagactgggctgttctctgtgttaaaccaatcagttgcgaccttctcttaacagtgtgaagtgagggggtctctctccctccttctccttcctctgtgattcaccttcctttttaccctgccctgcggcggctctaatagcgcgggggcgactcggaccgatg

SEQ ID NO: 13801 - DNA, 203 bp, Artificial sequence
  synthetic
ggcgcgccagtcctgctacggttccatgattttttgaatctagactgggctgttctctgtgttaaaccaatcagttgcgaccttctcttaacagtgtgaagtgagggggtctctctccctccttctccttcctctgtgattcaccttcctttttaccctggggcaacttcataacgccccttaccttccgactcggaccgatg

SEQ ID NO: 13802 - DNA, 203 bp, Artificial sequence
  synthetic
ggcgcgccagtccttcattccttcccaactgctagtggctgagtccctggcggggcgcggcggtggaaggtgtcgcgtacgggcttcccgagctgacgtggcttcgcgacttgcttctgcagctggagcctcaggcggcagcgcttctagaaatgctgagccgattatcaggattagcaaatgttgttcgactcggaccgatg

SEQ ID NO: 13803 - DNA, 203 bp, Artificial sequence
  synthetic
ggcgcgccagtcctgtaaaccgtcccaactgctagtggctgagtccctggcggggcgcggcggtggaaggtgtcgcgtacgggcttcccgagctgacgtggcttgaattgggaggggggcagctggagcctcaggcggcagcgcttaggatccattgcttccgattatcaggattagcaaatgttgttcgactcggaccgatg

SEQ ID NO: 13804 - DNA, 203 bp, Artificial sequence
  synthetic
ggcgcgccagtcctcgttgctgtcccaactgctagtggctgagtccctggcggggcgcggcggtggaaggtgtcgcgtacgggcttcccgagctgacgtggcttgaattgggaggggggcagctggagcctcgctttcagcgtggcctagaaatgctgagccgattatcaggattagcaaatgttgttcgactcggaccgatg

SEQ ID NO: 13805 - DNA, 203 bp, Artificial sequence
  synthetic
ggcgcgccagtcctgagcggcatcccgtcggagtccggtctctagtagtgcagcttcggctggtgtcatcggtgtccttcctccgctgccgcccccgcaaggcttcgccgtcatcgaggccatttccagcgacttgtcgcacgcttttctatatacttcgttccccgccaaccgcaaccattgacgcccgactcggaccgatg

SEQ ID NO: 13806 - DNA, 203 bp, Artificial sequence
  synthetic
ggcgcgccagtcctggcatgtctccctagagcagacagtcaattgtagagcctgcactctcagaaatcagacttgagtggccggaacccttgagaccagaggcttaccatgctgctccctaggagggccaggaactgctgacgtgaccactggacagttattcgtgtctcttacaattaccaaacagacgactcggaccgatg

SEQ ID NO: 13807 - DNA, 203 bp, Artificial sequence
  synthetic
ggcgcgccagtccttgcgagtatccctagagcaggggtgtttgccagcagcctgcactctcagaaatcagacttgagtggccggaacccttgagaccagaggctacattgaaatacagctaggagggccaggaactgctgacgtgaccactggacagttattcgtgtctcttacaattaccaaacagacgactcggaccgatg

SEQ ID NO: 13808 - DNA, 203 bp, Artificial sequence
  synthetic
ggcgcgccagtcctagtcatcttccctagcttgactctcaacaaaaagccaccgacattaagagagagagtattgctgcttagttaactgcaggccctatttagggttaccgcccaggatctgcaacagcattcctgtatcatccagggcaccggtggacttggtgaggattgagttgacctcatcatcgactcggaccgatg

SEQ ID NO: 13809 - DNA, 203 bp, Artificial sequence
  synthetic
ggcgcgccagtcctaaccagattccctctccttacctgcgtcctcgggggcgtgcgcaccaccccccctcccgcctaggaggggggagggccccctcttggccaatcgtcggctacgatttaaactcccctggagactgcggctactgccaccgccttgcctccactgcctcttcgcgcagcacacagcgactcggaccgatg

SEQ ID NO: 13810 - DNA, 203 bp, Artificial sequence
  synthetic
ggcgcgccagtcctattccttctccctctccttacctgcgtcctcgggggcgtgcgcaccaccccccctcccgcctaggaggggggagggccccctcttggccaccgccttcgcggcctttaaactcccctgctatactgttactatgccaccgccttgcctccactgcctcttcgcgcagcacacagcgactcggaccgatg

SEQ ID NO: 13811 - DNA, 203 bp, Artificial sequence
  synthetic
ggcgcgccagtcctgttgcctctccctctccttacctgcgtcctcgggggcgtgcgcaccaccccccctcccgcctaggaggggggagggccccctcttggccaccgccttcgcggcctttaaactcccctggagactgcggcagtaagtaccgccttgcctccactgcctcttcgcgcagcacacagcgactcggaccgatg

SEQ ID NO: 13812 - DNA, 203 bp, Artificial sequence
  synthetic
ggcgcgccagtcctatgcattttccctctccttacctgcgtcctcgggggcgtgcgcaccaccccccctcccgcctaggaggggggagggccccctcttggccaccgccttcgcggcctttatgaggggctggagactgcggcagtaagtaccgccttgcctccactgcctcttcgcgcagcacacagcgactcggaccgatg

SEQ ID NO: 13813 - DNA, 203 bp, Artificial sequence
  synthetic
ggcgcgccagtcctttcggcactccctctccttacctgcgtcctcgggggcgtgcgcaccaccccccctcccgcctaggaggggggagggccccctcttggccaccgccttcgcggcctttatgaggggctggagactgcggctactgccaccgccttgcctccactgcctcttcgcgcagcacacagcgactcggaccgatg

SEQ ID NO: 13814 - DNA, 203 bp, Artificial sequence
  synthetic
ggcgcgccagtcctcattctcatccctctccttacctgcgtcctcgggggcgtgcgcaccaccccccctcccgcctaggaggggggagggtaaagaaccatgacccgccttcgcggcctttaaactcccctggagactgcggctactgccaccgccttgcctccactgcctcttcgcgcagcacacagcgactcggaccgatg

SEQ ID NO: 13815 - DNA, 203 bp, Artificial sequence
  synthetic
ggcgcgccagtccttgtaattatccctctccttacctgcgtcctcgggggcgtgcgcaccaccccccctcccgccttcatctatactttcccccctcttggccaccgccttcgcggcctttaaactcccctggagactgcggctactgccaccgccttgcctccactgcctcttcgcgcagcacacagcgactcggaccgatg

SEQ ID NO: 13816 - DNA, 203 bp, Artificial sequence
  synthetic
ggcgcgccagtcctcacagttctccctctccttacctgcgtcctcgggggcgtgcgcaccacgattggagaataaaaggaggggggagggccccctcttggccaccgccttcgcggcctttaaactcccctggagactgcggctactgccaccgccttgcctccactgcctcttcgcgcagcacacagcgactcggaccgatg

SEQ ID NO: 13817 - DNA, 203 bp, Artificial sequence
  synthetic
ggcgcgccagtcctacatctgctccctctccttagggagacaagatcaggcgtgcgcaccaccccccctcccgcctaggaggggggagggccccctcttggccaccgccttcgcggcctttaaactcccctggagactgcggctactgccaccgccttgcctccactgcctcttcgcgcagcacacagcgactcggaccgatg

SEQ ID NO: 13818 - DNA, 203 bp, Artificial sequence
  synthetic
ggcgcgccagtcctatgcttggtcccttacacatatgattatgtagcgtgcttattagtagtagatacatctaaatgtacaggacttaggataagttttgattatataagataggatgtgaaggctccgatttgtgaataggtttttatattcgaagtaggtagtattgcgcatactattaattccaccgactcggaccgatg

SEQ ID NO: 13819 - DNA, 203 bp, Artificial sequence
  synthetic
ggcgcgccagtcctgggcgcgttcccttacacatatgattatgtagcgtgcttattagtagtagatacatctaaattctacaacgacctaataagttttgattatataagataggatgtgaaggctccgatttgtgaataggttttggccaatcctcggcgtagtattgcgcatactattaattccaccgactcggaccgatg

SEQ ID NO: 13820 - DNA, 203 bp, Artificial sequence
  synthetic
ggcgcgccagtcctcgtacgattccgacctgggaccgacaatagacttgagcaatgtttgctgtcttccattggagtgactgaatttctacatgacggctttttgacaagacttaaaacctgtcttggatagagaatatttagccatttacctaaaaatggtattttttacatgcaatgcatgtggtgcgactcggaccgatg

SEQ ID NO: 13821 - DNA, 203 bp, Artificial sequence
  synthetic
ggcgcgccagtcctgcagtgagtccgacctgggaggctggggctcagagagcaatgtttgctgtcttccattggagatgaatctaccgcgcatgacggctttttgacaagacttaaaacctgtcttggatagagaatatttagccatttacctaaaaatggtattttttacatgcaatgcatgtggtgcgactcggaccgatg

SEQ ID NO: 13822 - DNA, 203 bp, Artificial sequence
  synthetic
ggcgcgccagtcctaacctccttccgatggcaatccaagcccttcacaagtctatacaacatccgagtacctatcacaacctccatctccatccaacacaacaaaccagtagtcattaaaaagcgtattatttaccctgcgtccctccaaatcaaccagaatcaaaatcaactctggggcaaataacacgactcggaccgatg

SEQ ID NO: 13823 - DNA, 203 bp, Artificial sequence
  synthetic
ggcgcgccagtcctattaggggtccggactcttcccgcaacccctccgagaggtccggtattcgcctcgaggcggcggcggccaccgagacagcagcgcaccttcccccatcccttccccttatcccccagcccaaaagggcccggtctgcgccccacccccgcccgtccgcccgctacgccgccgcccgactcggaccgatg

SEQ ID NO: 13824 - DNA, 203 bp, Artificial sequence
  synthetic
ggcgcgccagtcctagatatcatccggactcttcccgcaacccctccggctccctttccgcacgcctcgaggcggcggcggccaccgagacagcagcgcaccttcccccatcccttccccttatcccccagcccaaaagggcccggtctgcgccccacccccgcccgtccgcccgctacgccgccgcccgactcggaccgatg

SEQ ID NO: 13825 - DNA, 203 bp, Artificial sequence
  synthetic
ggcgcgccagtcctgctgagactccggactcttcccgcaacccctccggctccctttccgcacgcctcgaggcggcggcggccaccgagacagcagcgcaccttcccccatcccttccccttatcccccagcccaaaagggcccggtctgcgccccacccccgcccgtccgccctgcgtcggtaacggcgactcggaccgatg

SEQ ID NO: 13826 - DNA, 203 bp, Artificial sequence
  synthetic
ggcgcgccagtcctttcagccttccggactcttcccgcaacccctccggctccctttccgcacgcctcgaggcggcggcggccaccgagacagcagcgcaccttcccccatcccttccccttatcccccagcccaaaagggcccggtctgcgccccacccgaagtacaggataagctacgccgccgcccgactcggaccgatg

SEQ ID NO: 13827 - DNA, 203 bp, Artificial sequence
  synthetic
ggcgcgccagtcctcgcctacttccggactcttcccgcaacccctccggctccctttccgcacgcctcgaggcggcggcggccaccgagacagcagcgcaccttcccccatcccttccccttatcccccagctgttgccccataattctgcgccccacccccgcccgtccgcccgctacgccgccgcccgactcggaccgatg

SEQ ID NO: 13828 - DNA, 203 bp, Artificial sequence
  synthetic
ggcgcgccagtcctttcaaagttccggactcttcccgcaacccctccggctccctttccgcacgcctcgaggcggcggcggccaccgagagtttctacggttaacccccatcccttccccttatcccccagcccaaaagggcccggtctgcgccccacccccgcccgtccgcccgctacgccgccgcccgactcggaccgatg

SEQ ID NO: 13829 - DNA, 203 bp, Artificial sequence
  synthetic
ggcgcgccagtcctttggttgctccggactcttcccgcaacccctccggctccctttccgcatcaaggtctcgaaaggcggccaccgagacagcagcgcaccttcccccatcccttccccttatcccccagcccaaaagggcccggtctgcgccccacccccgcccgtccgcccgctacgccgccgcccgactcggaccgatg

SEQ ID NO: 13830 - DNA, 203 bp, Artificial sequence
  synthetic
ggcgcgccagtcctgcaccagttccgttgattagcctaattcccggtggaaaactcctgttgccgtttccctccaccggcctggagtctcccagtcttgtcccggcagtgccgccctccccactaagacctaggcgcaaaggcttggctcatggttgacagctcagagagagaaagatctgagggaagcgactcggaccgatg

SEQ ID NO: 13831 - DNA, 203 bp, Artificial sequence
  synthetic
ggcgcgccagtcctgacatcgatcctaagtggtcgactcaaccgttaccagtgtctctgagcttctggcaagtatgaggcaaggatttcacagaagaacttggagcaaaaattcccactgtcatagctataggctgtccagtcttgagggagctgcaggaacaggaaaaagagaccttcagagaagaccgactcggaccgatg

SEQ ID NO: 13832 - DNA, 203 bp, Artificial sequence
  synthetic
ggcgcgccagtcctctgaggcttcctaagtggtctggaacctaacctgcagtgtctctgagcttctggcaagtatgaggcaaggatttcacagaagaacttggagcaaaaattcccactgtcatagctataggctgtccagtcttgcttccaaccgcattacaggaaaaagagaccttcagagaagaccgactcggaccgatg

SEQ ID NO: 13833 - DNA, 203 bp, Artificial sequence
  synthetic
ggcgcgccagtcctccctcaagtcctcaaggtttagagacacacggtcactgcagctgaagccgctgcccctgctacagatgaagaaaaggaggctgggagagccaaggatcacgcagcaaggaagaaacagacccaggtgcagactcaggcaccaccaggaccagctgatcattccagcccacagcacgactcggaccgatg

SEQ ID NO: 13834 - DNA, 203 bp, Artificial sequence
  synthetic
ggcgcgccagtccttcccgaggtcctcagacccggcccggtcttcgcgcccggactcctggcatgccgtggttcaccactcaccgctctgacgggtgcagacgcgggagttgtcccagactgtggagtggcgggcacggccccagccccccttcccttccctgaccccttcttgccatcgccccagaccgactcggaccgatg

SEQ ID NO: 13835 - DNA, 203 bp, Artificial sequence
  synthetic
ggcgcgccagtccttctgcatttcctcagacccggcccggtcttcgcgcccggactcctggcgccagcgctaggcgcactcaccgctctgacgggtgcagacgcgggagttgtcccagactgtggagtggcgaagtgccagttttacccccttcccttccctgaccccttcttgccatcgccccagaccgactcggaccgatg

SEQ ID NO: 13836 - DNA, 203 bp, Artificial sequence
  synthetic
ggcgcgccagtccttggcgccgtcctcagacccggcccggtcttcgcgcccggactcctggcgccagcgctaggcgcactcaccgctctgacgggtgcagacgcgggagttgtcccagactgtggagtggcgggcacggccccagccccccttcccttccctgaccccttcttgccatcgccccagaccgactcggaccgatg

SEQ ID NO: 13837 - DNA, 203 bp, Artificial sequence
  synthetic
ggcgcgccagtcctaatccgagtcctcagacccggcccggtcttcgcgcccggactcctggcgccagcgctaggcgcactcaccgctctgacgggtgcagacgcgggagttgtcccagactgtggagtggcgggcacggccccagccccccttcccttccgaattgggaagagaccatcgccccagaccgactcggaccgatg

SEQ ID NO: 13838 - DNA, 203 bp, Artificial sequence
  synthetic
ggcgcgccagtcctcggcagcgtcctcagacccggcccggtcttcgcgcccggactcctggcgccagcgctaggcgcactcaccgctctgacgggtgcagacgcgggagttgtcccagactgtggagtggcgggcacggccccagcgtagagggtaacagctgaccccttcttgccatcgccccagaccgactcggaccgatg

SEQ ID NO: 13839 - DNA, 203 bp, Artificial sequence
  synthetic
ggcgcgccagtcctgtacgtaatcctcagacccggcccggtcttcgcgcccggactcctggcgccagcgctaggcgcactcaccgctctgacgggtgcagacgcgggagttgtcccagggatcatccccaatggcacggccccagccccccttcccttccctgaccccttcttgccatcgccccagaccgactcggaccgatg

SEQ ID NO: 13840 - DNA, 203 bp, Artificial sequence
  synthetic
ggcgcgccagtcctgttcatactcctcagacccggcccggtcttcgcgcccggactcctggcgccagcgctaggcgcactcaccgctctgcacttgaattttatgggagttgtcccagactgtggagtggcgggcacggccccagccccccttcccttccctgaccccttcttgccatcgccccagaccgactcggaccgatg

SEQ ID NO: 13841 - DNA, 203 bp, Artificial sequence
  synthetic
ggcgcgccagtcctcaaccacctcctcagacccggcccggtcttcgcggggtccactgcatggccagcgctaggcgcactcaccgctctgacgggtgcagacgcgggagttgtcccagactgtggagtggcgggcacggccccagccccccttcccttccctgaccccttcttgccatcgccccagaccgactcggaccgatg

SEQ ID NO: 13842 - DNA, 203 bp, Artificial sequence
  synthetic
ggcgcgccagtcctccttagagtcctggctgcggggcgagccgggcgtctgctgcagcggccgcggtggctgaggaggcccgagaggagtcggtggcagcggcggcggcgggaccggcagcagcagcagcagcagcagcagcagcaaccactagcctcctgccccgcggcgctgccgcacgagccccacgactcggaccgatg

SEQ ID NO: 13843 - DNA, 203 bp, Artificial sequence
  synthetic
ggcgcgccagtcctcactttcctcctggctgcggggcgagccgggcgtctgctgcagcggccgcggtggctgaggaggcccgagaggagtcggtggcagcggcggcggcgggaccggcccttaatatttttccagcagcagcagcaaccactagcctcctgccccgcggcgctgccgcacgagccccacgactcggaccgatg

SEQ ID NO: 13844 - DNA, 203 bp, Artificial sequence
  synthetic
ggcgcgccagtcctctggaaggtccttgaacttttggccgccatgtgcttcccgaaggtcctactgctcacgcaacagaagctgaaggcccgaatgcaccaggccatagaaagattttatgataaaatgcaaaatgcagaatcaggacgtggacaggacgacttcaaagagggctacctggagacagtcgactcggaccgatg

SEQ ID NO: 13845 - DNA, 203 bp, Artificial sequence
  synthetic
ggcgcgccagtcctgaagaaggtccttgaacttttggccgccatgtgcttcccgaaggtcctctctgatgacatgaagaagctgaaggcccgaatgcaccaggccatagaaagattttatgataaaatgcaaaatgcagaatcaggacgtggacaggacgacttcaaagagggctacctggagacagtcgactcggaccgatg

SEQ ID NO: 13846 - DNA, 203 bp, Artificial sequence
  synthetic
ggcgcgccagtccttggacccttcgcaagctcttaaatttgacaatggatgaaaaagtctttgttttgaaagattttatcagaagacaagtgcctgacatacctgaactgtcttatcagaaggaggcattactttctcaagtcgaagtaccaatggtcttaacagagggcttcaagctcctatcatgccgactcggaccgatg

SEQ ID NO: 13847 - DNA, 203 bp, Artificial sequence
  synthetic
ggcgcgccagtcctgtcgggagtcgcactttcaaaaggaacaagatatgtgctgaagtccagataacagccaagcaacctgaccaagaactaccaactctattctatagactaaaaagtcgccattttagttatataaaaatcaagttagaataagaattaaatcaatcaagaacgggacaaataaaacgactcggaccgatg

SEQ ID NO: 13848 - DNA, 203 bp, Artificial sequence
  synthetic
ggcgcgccagtcctcgaaaggatcgccgccacctccgcctcttcagtctcctggtcttcgtcctgctcgcgctgaccacctctcagggaaagggggggacataggggcgtcgcggggccccggcgaatgcgccccccgccgcctctcgggctgcgccgcctcgcggggatgaagcaccggccgtgaagcgactcggaccgatg

SEQ ID NO: 13849 - DNA, 203 bp, Artificial sequence
  synthetic
ggcgcgccagtccttgtccggttcgccgccacctccgcctcttcagtctcctggtcttcgtcgccgctctctctctcacctctcagggaaagggggggacatagacagtcaagtacctcccggcgaatgcgccccccgccgcctctcgggctgcgccgcctcgcggggatgaagcaccggccgtgaagcgactcggaccgatg

SEQ ID NO: 13850 - DNA, 203 bp, Artificial sequence
  synthetic
ggcgcgccagtcctggcgcatttcgccgccacctccgcctcttcagtctcctggtcttcgtcgccgctctctctctcacctctcagggaaagggggggacataggggcgtcgcggggccccggcgaatgcgccccccgccgcctctaaaatacacgtatttcgcggggatgaagcaccggccgtgaagcgactcggaccgatg

SEQ ID NO: 13851 - DNA, 203 bp, Artificial sequence
  synthetic
ggcgcgccagtcctccctgccgtcgccgccacctccgcctcttcagtctcctggtcttcgtcgccgctctctctctgcaacactcttatgagggggggacataggggcgtcgcggggccccggcgaatgcgccccccgccgcctctcgggctgcgccgcctcgcggggatgaagcaccggccgtgaagcgactcggaccgatg

SEQ ID NO: 13852 - DNA, 203 bp, Artificial sequence
  synthetic
ggcgcgccagtcctcttagttttcgcgcttcccctccctccggggctgggcctgccccggccgtcgcggagcctcccctcccaccgtccgtgagtgtacgcgcccggccgccgcctccaggcagcccggagcaacccggcgcccggccccgctgggcgcagcactccgtcggcgttattacacctaatcgactcggaccgatg

SEQ ID NO: 13853 - DNA, 203 bp, Artificial sequence
  synthetic
ggcgcgccagtcctgggttgcgtcgcgcttcccctccctccggggctgggcctgccccggccgtcgcggagcctcccctcccaccgtccgtgagtgtacgcgcccggccgccgcctccaggcagcccggagccgtatccgtatgatccccgctgggcgcagcactccgtcggcggcggcggcggcgcgcgactcggaccgatg

SEQ ID NO: 13854 - DNA, 203 bp, Artificial sequence
  synthetic
ggcgcgccagtcctgctagtattcggattaatactggaaacttctcctcccattcctgtgagggctacctgtgctactcaggctactcccgtggtggctcctcgtaccccagcaacctggtctacagcactgaacctttgatctcccagcacctgccagctgggttcctctctctgcaagggctttcacgactcggaccgatg

SEQ ID NO: 13855 - DNA, 203 bp, Artificial sequence
  synthetic
ggcgcgccagtcctgagacgaatcgtcacatcgtggtaaacaggctctgtatccgtggcagcggccgtggcaggctggctgggtaccggctgtcgctgacccaggagaagctgcctgtctacatcagcctgggctgcagcgcgctgccgccgcggggccggcagccatggccaaggacatcctgggtgcgactcggaccgatg

SEQ ID NO: 13856 - DNA, 203 bp, Artificial sequence
  synthetic
ggcgcgccagtcctggacttgatcgtccgcctaaacggttcgagagttaccgcgtctcttcctttctgggctcggacctaggtcgcggcgacatggccaaacgtaccaagaaagtcgggatcgtcggtaaatacgggacccgctatggggcctccctccggaaaatggtgaagaaaattgaaatcagccgactcggaccgatg

SEQ ID NO: 13857 - DNA, 203 bp, Artificial sequence
  synthetic
ggcgcgccagtcctaagcctcgtcgtccgcctaataccgcgcctgcgcaccgcgtctcttccggctgttcaagattcctaggtcgcggcgacatggccaaacgtaccaagaaagtcgggatcgtcggtaaatacgggacccgctatggggcctccctccggaaaatggtgaagaaaattgaaatcagccgactcggaccgatg

SEQ ID NO: 13858 - DNA, 203 bp, Artificial sequence
  synthetic
ggcgcgccagtcctcgtagggctcgtccgcctaataccgcgcctgcgcaccgcgtctcttcctttctgggctcggacctaggtcgcggcgacatggccaaacgtaccaagaaagtcgggatcgtcggtaaatacgggacccgctatggggcctccctccgaccgggatattgtgaaattgaaatcagccgactcggaccgatg

SEQ ID NO: 13859 - DNA, 203 bp, Artificial sequence
  synthetic
ggcgcgccagtcctgttggcattcgtccgcctaataccgcgcctgcgcaccgcgtctcttcctttctgggctcggacctaggtcgcggcgacatggccaaacgtaccaagaaagtcgggatcgtcggtaaatacgggacccgctatggggcctccctccggaaaatggtgaagagtgaaatgtggcttcgactcggaccgatg

SEQ ID NO: 13860 - DNA, 203 bp, Artificial sequence
  synthetic
ggcgcgccagtcctagtgaatttcgtccgcctaataccgcgcctgcgcaccgcgtctcttcctttctgggctcggacctaggtcgcggcgacatggccaaacgtaccaagaaagtcgggatcgtcggtaaatcgtcacgagcgagcggggcctccctccggaaaatggtgaagaaaattgaaatcagccgactcggaccgatg

SEQ ID NO: 13861 - DNA, 203 bp, Artificial sequence
  synthetic
ggcgcgccagtccttccgcgaatcgtccgcctaataccgcgcctgcgcaccgcgtctcttcctttctgggctcggagtccaacgagacttacatggccaaacgtaccaagaaagtcgggatcgtcggtaaatacgggacccgctatggggcctccctccggaaaatggtgaagaaaattgaaatcagccgactcggaccgatg

SEQ ID NO: 13862 - DNA, 203 bp, Artificial sequence
  synthetic
ggcgcgccagtcctacagccaatcgtccgcctaataccgcgcctgcgccataacctcgcctatttctgggctcggacctaggtcgcggcgacatggccaaacgtaccaagaaagtcgggatcgtcggtaaatacgggacccgctatggggcctccctccggaaaatggtgaagaaaattgaaatcagccgactcggaccgatg

SEQ ID NO: 13863 - DNA, 203 bp, Artificial sequence
  synthetic
ggcgcgccagtccttgagtgattcgttagtcagagtgggcggagccgcccgcgggcacctgctatagctcttccatccgcgtcgctgaggggtagcgatgcgggctccggggatgaggtcgcggccggcgggtcccgcgctgttgctgctgctgctcttcctcggagcggccgagtcggtgcgtcgggcgactcggaccgatg

SEQ ID NO: 13864 - DNA, 203 bp, Artificial sequence
  synthetic
ggcgcgccagtccttaaacaattcgttgaactacatgttgtaaggctttagagaaataagggagtgtcctatttaggatgaggtgctccggtggcagccccaccaaaacctctagcgactaggaacagctatatcgggttgctatagcagtcaggatgtcgcgtaaatcggtgtaaatacccaaacctcgactcggaccgatg

SEQ ID NO: 13865 - DNA, 203 bp, Artificial sequence
  synthetic
ggcgcgccagtcctaagaaatttcgttgaactacatgttgtaaggctttagagaaataagggagtgtcctatttaggatgaggtgctccggtggcagccccaccaaaacctctagcgactaggaacagctatgagcctggctgcgtgcagtcaggatgtcattctggcgttccgaaatacccaaacctcgactcggaccgatg

SEQ ID NO: 13866 - DNA, 203 bp, Artificial sequence
  synthetic
ggcgcgccagtcctggagtagttcgttgaactactatcgaacgcctgctagagaaataagggagtgtcctatttaggatgaggtgctccggtggcagccccaccaaaacctctagcgactaggaacagctatatcgggttgctatagcagtcaggatgtcattctggcgttccgaaatacccaaacctcgactcggaccgatg

SEQ ID NO: 13867 - DNA, 203 bp, Artificial sequence
  synthetic
ggcgcgccagtcctctgtgaagtctaatgcttagcgccgttcgcgctctgaccagcccgcagagccagcccccgaccccgggccacctgggcccccgggttccgccggcactctcgccaccaccgcgtgggtctgacaagatgtaccaggtcccactaccactggatcgggatgggaccctggtacggcgactcggaccgatg

SEQ ID NO: 13868 - DNA, 203 bp, Artificial sequence
  synthetic
ggcgcgccagtcctaggtattgtctcacaaggactgggtgaagagttctgcagccttacagagactggaaaagaagcccaaaccaaggcccccagagaggtcccccaggcccctttggaaagggaccgtgaggctggagatccggcgcaggagaccaacgcctgccatgctgttccggctctcagagccgactcggaccgatg

SEQ ID NO: 13869 - DNA, 203 bp, Artificial sequence
  synthetic
ggcgcgccagtcctttgcgctctctcacaaggactgggtgaagagttctgcagccttacagagactggaaaagaagcccaaaccaaggcccccagagaggtcccccaggcccctttgggtccctgagcctcagctggagatccggcattactctggcgaccctgccatgctgttccggctctcagagccgactcggaccgatg

SEQ ID NO: 13870 - DNA, 203 bp, Artificial sequence
  synthetic
ggcgcgccagtcctaagtgctctctcacaaggactgggtgaagagttctgcagccttacagagactggaaaagaagtattttgtctacggcccagagaggtcccccaggcccctttgggtccctgagcctcagctggagatccggcgcaggagaccaacgcctgccatgctgttccggctctcagagccgactcggaccgatg

SEQ ID NO: 13871 - DNA, 203 bp, Artificial sequence
  synthetic
ggcgcgccagtcctagatcacctctgacatggtgctgttcatggcggtagctagctggtagtcctccggcccctgaatgcggctaatcctaactgcggagcacatgctcacaaaccagtgggtggtgtgtcgtaacgggcaactctgcagcggaaccgactactttgggtgtccgtgtttccttttatcgactcggaccgatg

SEQ ID NO: 13872 - DNA, 203 bp, Artificial sequence
  synthetic
ggcgcgccagtccttcccaccttctgacatggtgtgaagagcctattgagctagctggtagtcctccggcccctgaatgcggctaatcctaactgcggagcacatgctcacaaaccagtgggtggtgtgtcgacgatccaggaaaagcagcggaaccgactactttgggtgtccgtgtttccttttatcgactcggaccgatg

SEQ ID NO: 13873 - DNA, 203 bp, Artificial sequence
  synthetic
ggcgcgccagtcctcggcgtgatctgacatggtgtgaagagcctattgagctagctggtagtcctccggcccctgaatgcggctaatcctgttaaaacttttgttgctcacaaaccagtgggtggtgtgtcgtaacgggcaactctgcagcggaaccgactactttgggtgtccgtgtttccttttatcgactcggaccgatg

SEQ ID NO: 13874 - DNA, 203 bp, Artificial sequence
  synthetic
ggcgcgccagtcctaacagagctctgctgccgccaccgcccactcttacccccgccgcttctcgactctgttgttagccgaagactcgcctctcagccgcccgccgcacagacgcacgagtaaaaagtgcagctccatcggctgatagaatagtcaacttgactctgggcggcaccgggcgtcccacgcgactcggaccgatg

SEQ ID NO: 13875 - DNA, 203 bp, Artificial sequence
  synthetic
ggcgcgccagtcctttgtatcgtctgctgccgccaccgcccactcttacccccgccgcttctcgactctgttgttagccgaagactcgcctctcagccgcccgccgcacagacgcacgagtaaaaagtgcagctccatcggctgatcctcgctaagctccgactctgggcggcaccgggcgtcccacgcgactcggaccgatg

SEQ ID NO: 13876 - DNA, 203 bp, Artificial sequence
  synthetic
ggcgcgccagtcctactatgactctgctgccgccaccgcccactcttacccccgccgcttctcgactctgttgttagccgaagactcgcctctcagccgcccgccgcacagacgcacgagtaaaaagtgcagctccatcggctgatcctcgctaagctcctgagggttctaagtccgggcgtcccacgcgactcggaccgatg

SEQ ID NO: 13877 - DNA, 203 bp, Artificial sequence
  synthetic
ggcgcgccagtcctcttgcgtttctgctgccgccaccgcccactcttacccccgccgcttctcgactctgttgttagccgaagactcgcctctcagccgcccgcgctggttggtataaagtaaaaagtgcagctccatcggctgatcctcgctaagctccgactctgggcggcaccgggcgtcccacgcgactcggaccgatg

SEQ ID NO: 13878 - DNA, 203 bp, Artificial sequence
  synthetic
ggcgcgccagtcctttagttcatctgctgccgccaccgcccactcttacccccgccgcttctgctaatcaaaacatgccgaagactcgcctctcagccgcccgccgcacagacgcacgagtaaaaagtgcagctccatcggctgatcctcgctaagctccgactctgggcggcaccgggcgtcccacgcgactcggaccgatg

SEQ ID NO: 13879 - DNA, 203 bp, Artificial sequence
  synthetic
ggcgcgccagtcctaatgagaatctgctgccgcctggataacacagatcccccgccgcttctcgactctgttgttagccgaagactcgcctctcagccgcccgccgcacagacgcacgagtaaaaagtgcagctccatcggctgatcctcgctaagctccgactctgggcggcaccgggcgtcccacgcgactcggaccgatg

SEQ ID NO: 13880 - DNA, 203 bp, Artificial sequence
  synthetic
ggcgcgccagtcctagttaagatcttgctttcgtaataaaattctgtacataaaagtcgaaagtattgctatagttttcagcaaaaacaactatttaggcatacttctcaggatggcgcgttgcagtccaacaagatccagggactgtacagaattttcctatacctcgagtcgggtttggaatctaacgactcggaccgatg

SEQ ID NO: 13881 - DNA, 203 bp, Artificial sequence
  synthetic
ggcgcgccagtcctgggtttgctctttcagatttggaactgtatctgtatggaaacaacagagttttcttgaagtacaactaaggacaggtcaccactaggcactaacatcgctgactcagcacccgccactgatggtctatctgatgctgaaaatgtctctagttttttgacaacggctaaataacccgactcggaccgatg

SEQ ID NO: 13882 - DNA, 203 bp, Artificial sequence
  synthetic
ggcgcgccagtcctttgcgtgttctttcagatttggaactgtatctgtatggaaacaacagagttttcttgaagtacaactaaggacaggtcaccactaggcactaacatcgctgacttgcatgattatggagatggtctatctgatgctgaaaatgtctggcccaccccaggtacggctaaataacccgactcggaccgatg

SEQ ID NO: 13883 - DNA, 203 bp, Artificial sequence
  synthetic
ggcgcgccagtccttcggcgtctctttcagatttggaactgtatctgtatggaaacaacagatcacaggattcagccaactaaggacaggtcaccactaggcactaacatcgctgacttgcatgattatggagatggtctatctgatgctgaaaatgtctctagttttttgacaacggctaaataacccgactcggaccgatg

SEQ ID NO: 13884 - DNA, 203 bp, Artificial sequence
  synthetic
ggcgcgccagtcctggatgctttctttcagatttggaactgtatctgttcatgcgaggttatgttttcttgaagtacaactaaggacaggtcaccactaggcactaacatcgctgacttgcatgattatggagatggtctatctgatgctgaaaatgtctctagttttttgacaacggctaaataacccgactcggaccgatg

SEQ ID NO: 13885 - DNA, 203 bp, Artificial sequence
  synthetic
ggcgcgccagtcctccttcctatgaaaatgccgtcggtttcgaaagcgaaatataacaatacgagcgggtcccccccgcagactgagaagccgacccactacaggtacctgaaggagttcaggacggagcagtgccccctgttttcacagcacaagtgcgcgcagcaccggccgttcacctgcttccacgactcggaccgatg

SEQ ID NO: 13886 - DNA, 203 bp, Artificial sequence
  synthetic
ggcgcgccagtcctgcgaaccctgaaaatgccgtcggtttcgaaagcggcggcagcggcgctgagcgggtcccccccgcagactgagaagccgacccactacaggtacctgaaggagttcaggacggagcagtgccccctgttttcacagcacaagtgcgcgcagcaccggccgacatgaccagatttcgactcggaccgatg

SEQ ID NO: 13887 - DNA, 203 bp, Artificial sequence
  synthetic
ggcgcgccagtcctgccgtccttgaaaatgccgtcggtttcgaaagcggcggcagcggcgctgagcgggtcccccccgcagactgagaagccgacccactacagtagaggttttcgcatcaggacggagcagtgccccctgttttcacagcacaagtgcgcgcagcaccggccgttcacctgcttccacgactcggaccgatg

SEQ ID NO: 13888 - DNA, 203 bp, Artificial sequence
  synthetic
ggcgcgccagtcctcaagcgattgaaaatgccgtcggtttcgaaagcggcggcagcggcgctgagcgggtcccccccgcagactgagaagggcgttgcaatgccgtacctgaaggagttcaggacggagcagtgccccctgttttcacagcacaagtgcgcgcagcaccggccgttcacctgcttccacgactcggaccgatg

SEQ ID NO: 13889 - DNA, 203 bp, Artificial sequence
  synthetic
ggcgcgccagtcctgcttgaggtgaaaatgccgtgttccgtctgccatgcggcagcggcgctgagcgggtcccccccgcagactgagaagccgacccactacaggtacctgaaggagttcaggacggagcagtgccccctgttttcacagcacaagtgcgcgcagcaccggccgttcacctgcttccacgactcggaccgatg

SEQ ID NO: 13890 - DNA, 203 bp, Artificial sequence
  synthetic
ggcgcgccagtcctcacatgtatgaaaccggaaactgcggagtgcgctgcgccgcccagccctgtcgccccccggaggtgatccctccctcctgcctgcccgccagcctgacctgtgcccggctcgcgggccgcagcctcggcccccgcgcgcccccggcagctctcggcgcgatgagcatagagacgcgactcggaccgatg

SEQ ID NO: 13891 - DNA, 203 bp, Artificial sequence
  synthetic
ggcgcgccagtcctcccttcgttgaagtagacttgggccaggccctgcctcgatcctcagctcgtcctccccgccccgcaccggccttcactctggagcggccccggcagccgcagcaggggcggcggcggcggatcgaggagctctccaggtcgtcccgggagaggctgctgcagtcccgggacaggcgactcggaccgatg

SEQ ID NO: 13892 - DNA, 203 bp, Artificial sequence
  synthetic
ggcgcgccagtcctgcctaagctgaattcattttaagtctaacgagacattctcaggaactccagaccttcctatttatgttgttttttgtattctatggaggaatcgtgtttggaaaccttcttattgtcataacagtggtatctgactcccaccttcactctcccatgtacttcctgctagccaaccgactcggaccgatg

SEQ ID NO: 13893 - DNA, 203 bp, Artificial sequence
  synthetic
ggcgcgccagtccttgctcaaatgaattcatttttctgggtctctctgattctcaggaactccagaccttcctattccgaagtagaaacctattctatggaggaatcgtgtttggaaaccttcttattgtcataacagtggtatctgactcccaccttcactctcccatgtacttcctgctagccaaccgactcggaccgatg

SEQ ID NO: 13894 - DNA, 203 bp, Artificial sequence
  synthetic
ggcgcgccagtccttgaatacgtgaattcatttttctgggtctctctgattctcaggaactccagaccttcctatttatgttgttttttggcccgacgcatcttatcgtgtttggaaaccttcttattgtcataacagtggtatctgactcccaccttcactctcccatgtacttcctgctagccaaccgactcggaccgatg

SEQ ID NO: 13895 - DNA, 203 bp, Artificial sequence
  synthetic
ggcgcgccagtccttcaactggtgaattcatttttctgggtctctctgattctcaggaactccagaccttcctatttatgttgttttttgtattctatggaggaatcgtgtttggaaaccttcttattgtcacggatagtcatagcgactcccaccttcactctcccatgtacttcctgctagccaaccgactcggaccgatg

SEQ ID NO: 13896 - DNA, 203 bp, Artificial sequence
  synthetic
ggcgcgccagtcctcaagtccctgaattcatttttctgggtctctctgattctcaggaactccagaccttcctatttatgttgttttttgtattctatggaggaatcgtgtttggaaaccttcttattgtcataacagtggtatctacgaaaaaccttcactctcccatgacagatttgctagccaaccgactcggaccgatg

SEQ ID NO: 13897 - DNA, 203 bp, Artificial sequence
  synthetic
ggcgcgccagtcctataaatcctgaattcatttttctgggtctctctgattctcaggaactccagaccttcctatttatgttgttttttgtattctatggaggaatcgtgtttggaaaccttcttattgtcataacagtggtatctttggtttctaactcctctcccatgtacttcctgctagccaaccgactcggaccgatg

SEQ ID NO: 13898 - DNA, 203 bp, Artificial sequence
  synthetic
ggcgcgccagtcctgcgttctgtgaattcatttttctgggtctctctgattctcaggaactcgcttttagagccggtatgttgttttttgtattctatggaggaatcgtgtttggaaaccttcttattgtcataacagtggtatctgactcccaccttcactctcccatgtacttcctgctagccaaccgactcggaccgatg

SEQ ID NO: 13899 - DNA, 203 bp, Artificial sequence
  synthetic
ggcgcgccagtcctgtcgatcctgaattcatttttctgggtctctctgattctcagggactccagaccttcctatttatgttgttttttgatcagagccattttatcgtgtttggaaaccttcttattgtcataacagtggtatctgactcccaccttcactctcccatgtacttcctgctagccaaccgactcggaccgatg

SEQ ID NO: 13900 - DNA, 203 bp, Artificial sequence
  synthetic
ggcgcgccagtcctgtctactttgaattcatttttctgggtctctctgattctcagggactccagaccttcctatttatgttgttttttgtattctatggaggaatcgtgtttggaaaaacgagcggatcagtaacagtggtatctgactcccaccttcactctcccatgtacttcctgctagccaaccgactcggaccgatg

SEQ ID NO: 13901 - DNA, 203 bp, Artificial sequence
  synthetic
ggcgcgccagtcctccaggctatgaattcatttttctgggtctctctgtgcgcacacggactcagaccttcctatttatgttgttttttgtattctatggaggaatcgtgtttggaaaccttcttattgtcataacagtggtatctgactcccaccttcactctcccatgtacttcctgctagccaaccgactcggaccgatg

SEQ ID NO: 13902 - DNA, 203 bp, Artificial sequence
  synthetic
ggcgcgccagtcctacgtcaggtgacatcgctaggaagcgcagcgagagaacgcgccaccgcggggcccgggtgcagctagcgaccctctcgccacctgcgcgcagcccgaggtgagcagtgagcggcgagcgggagggcagcgaggcgttcgcgggccccctcctgctgcccgggcccggcccgctccgactcggaccgatg

SEQ ID NO: 13903 - DNA, 203 bp, Artificial sequence
  synthetic
ggcgcgccagtcctcgtggaagtgacgcccaggtctcgggttagatcgtcaggtgagggaggaagggatagccagcgcgaaggaagtgctggagtcgtgtgttttggctgcgcgtgatcctgcgtgggtcgggaggtgtttctgtgaaaagcctaaagattagactgtaagaaaagaaaatagaagcccgactcggaccgatg

SEQ ID NO: 13904 - DNA, 203 bp, Artificial sequence
  synthetic
ggcgcgccagtcctggcggctctgacggaggcgccgctgccagggggcgtgcggcagcgcgggaataagccttaaagcggcggcggcggaggcggcggcggcggcggcggcggcggcggctgggcctcgagcgcccgcagcccacctctcgggggcgggctcccggcgctagcagggctgaagagaagcgactcggaccgatg

SEQ ID NO: 13905 - DNA, 203 bp, Artificial sequence
  synthetic
ggcgcgccagtcctattcgtagtgacttctcagggatgtaaccggacctggttcagtatccgggttgtcctgtattgttacggtgtatccgtcttggcacactgaaagggtatttttgggtaatcctttcctactgcctgatagggtggcgtgcccggccacgagagattaagggtagcaatttaaaccgactcggaccgatg

SEQ ID NO: 13906 - DNA, 203 bp, Artificial sequence
  synthetic
ggcgcgccagtcctgtaccgtttgaggaacactaatggtggcgacgcccgaggcaagctctggaaagcaacgccgagtctctgagaagagggagcataggctgtgctgatttaaaaacagaaaatgcaaagttggactgaaaatatcccacgtcttctaagcaatctgcttaaggcttccaaacttaccgactcggaccgatg

SEQ ID NO: 13907 - DNA, 203 bp, Artificial sequence
  synthetic
ggcgcgccagtcctcaacctaatgaggaacactaggctgttgtctagacgaggcaagctctggaaagcaacgccgagtctctgagaagagcagttcagtaactagctgatttaaaaacagaaaatgcaaagttggactgaaaatatcccacgtcttctaagcaatctgcttaaggcttccaaacttaccgactcggaccgatg

SEQ ID NO: 13908 - DNA, 203 bp, Artificial sequence
  synthetic
ggcgcgccagtccttcgtagcctgaggaacactaggctgttgtctagacgaggcaagctctggaaagcaacgccgagtctctgagaagagggagcataggctgtgctgatttaaaaacagaaaatgcaaagttggactgaaaatatatgcatgtcagccggcaatctgcttaaggcttccaaacttaccgactcggaccgatg

SEQ ID NO: 13909 - DNA, 203 bp, Artificial sequence
  synthetic
ggcgcgccagtcctctgccgggtgaggctcagctaattgacctcaagaaagcaatcatccgcagtgcaatttgatcaagaaacacccaattacactacactggtatgacactgtactaaccctgagggttttagaaaaaacgattaacgataaataagccgtggggtcttgtgttacctgaggcagcccgactcggaccgatg

SEQ ID NO: 13910 - DNA, 203 bp, Artificial sequence
  synthetic
ggcgcgccagtccttatccatgtgaggctcagctaattgacctcaagaaagcaatcatccgcagtgcaatttgatcgtcttggttgtccgtacactacactggtatgacactgtactaaccctgagggttttagaaaaaacgattaacgataaataagcccgaacactacacactacctgaggcagcccgactcggaccgatg

SEQ ID NO: 13911 - DNA, 203 bp, Artificial sequence
  synthetic
ggcgcgccagtccttaacacgttgaggtcctctccagcaagctacacaaagtatagatatttgtgcctaatgcaaaaagctatatttacacatttcaagagagggtgcacttgctggggggaggacatgggccgggaaggattggaagaccaaggacctccccctcctccccctccaggtctagtctacgactcggaccgatg

SEQ ID NO: 13912 - DNA, 203 bp, Artificial sequence
  synthetic
ggcgcgccagtcctagcgtgtttgagtaggttggattcgttaaactcacggacagaagcgctggtcggcgtctggcggttattgttcaaaactacaactccattttgacactttctcacttgtaccgatcttcagacgccctccttcttcatgagaatgatgccatccataagatctgtgcaaaactgcgactcggaccgatg

SEQ ID NO: 13913 - DNA, 203 bp, Artificial sequence
  synthetic
ggcgcgccagtccttacaggcatgagtaggttggtccgaagtttgaaccggacagaagcgctggtcggcgtctggcggttattgttcaaaactacaactccattttgacactttctcacttgtaccgatcttagtttctatgttgccttcatgagaatgatgccatccataagatctgtgcaaaactgcgactcggaccgatg

SEQ ID NO: 13914 - DNA, 203 bp, Artificial sequence
  synthetic
ggcgcgccagtcctcacgcctctgagtaggttggtccgaagtttgaaccggacagaagcgctggtcggcgtctggcggttattgttcaaaactacaactccattttgacactttctcacttgtaccgatcttcagacgccctccttcttcatgagaatgatgccatccataagaatccaaggccgggccgactcggaccgatg

SEQ ID NO: 13915 - DNA, 203 bp, Artificial sequence
  synthetic
ggcgcgccagtcctcataacgctgagtaggttggtccgaagtttgaaccggacagaagcgctggtcggcgtctggctaccgggtcaacccactacaactccattttgacactttctcacttgtaccgatcttcagacgccctccttcttcatgagaatgatgccatccataagatctgtgcaaaactgcgactcggaccgatg

SEQ ID NO: 13916 - DNA, 203 bp, Artificial sequence
  synthetic
ggcgcgccagtcctaccttacgtgagtaggttggtccgaagtttgaacgcacggctccttggggtcggcgtctggcggttattgttcaaaactacaactccattttgacactttctcacttgtaccgatcttcagacgccctccttcttcatgagaatgatgccatccataagatctgtgcaaaactgcgactcggaccgatg

SEQ ID NO: 13917 - DNA, 203 bp, Artificial sequence
  synthetic
ggcgcgccagtcctgcacaggatgatcccccagccaggggtccgcaacaacgtggtacgtgtcgaaactttgcccatagcagcgggcgggcactttgcactggaacttacaacacccgagcaaggacgcgactctcccgacgcggggaggctattctgcccatttggggacacttccccgccgctgcccgactcggaccgatg

SEQ ID NO: 13918 - DNA, 203 bp, Artificial sequence
  synthetic
ggcgcgccagtcctggcgggcatgatcccccagccaggggtccgcaacccttgccgcatccacgaaactttgcccatagcagcgggcgggcactttgcactggaacttacaacacccgagcaaggacgcgactctcccgacgcggggaggctattctgcccatttggggacactcgatgtggaacaaacgactcggaccgatg

SEQ ID NO: 13919 - DNA, 203 bp, Artificial sequence
  synthetic
ggcgcgccagtcctgttgggtatgatcccccagccaggggtccgcaacccttgccgcatccacgaaactttgcccatagcagcgggcgggcactttgcactggataggcactggggtcagcaaggacgcgactctcccgacgcggggaggctattctgcccatttggggacacttccccgccgctgcccgactcggaccgatg

SEQ ID NO: 13920 - DNA, 203 bp, Artificial sequence
  synthetic
ggcgcgccagtcctgcttaacatgatcccccagcggttatcgttggcgccttgccgcatccacgaaactttgcccatagcagcgggcgggcactttgcactggaacttacaacacccgagcaaggacgcgactctcccgacgcggggaggctattctgcccatttggggacacttccccgccgctgcccgactcggaccgatg

SEQ ID NO: 13921 - DNA, 203 bp, Artificial sequence
  synthetic
ggcgcgccagtcctctcgtgactgatcgttgagctaggggagagagcagttaaggcacacagagcaccagctccctcctgcctgaagatgttccaccaaatttgggcagctctgctctacttctatggtattatccttaactccatctaccagtgccctgagcacagtcaactgacaactctgggcgtcgactcggaccgatg

SEQ ID NO: 13922 - DNA, 203 bp, Artificial sequence
  synthetic
ggcgcgccagtcctcaatcatttgatggcgtcaaaagacgtcgttcctactgctgctagcagtgaaaatgctaacaacaatagtagtattaagtctcgtctattccaattggctttatgttcaggtggggctacgtccccacccaactcgataaagataaccaaccaagatatggctctggggctgatcgactcggaccgatg

SEQ ID NO: 13923 - DNA, 203 bp, Artificial sequence
  synthetic
ggcgcgccagtcctccacaccatgatggcgtcaaaagacgtcgttcctactgctgctagcagtgaaaatgctaacaacaatagtagtattaagtctcgtctattggcgagactcaagggttcaggtggggctacgtccccacccaactcgataaagataaccaaccaagatatggctctggggctgatcgactcggaccgatg

SEQ ID NO: 13924 - DNA, 203 bp, Artificial sequence
  synthetic
ggcgcgccagtcctctttattgtgatggcgtcaaaagacgtcgttcctactgctgctagcagtgaaaatgctaacaacaatagtagtattaagtctcgtctattggcgagactcaagggttcaggtggggctttcagtatgaattgctcgataaagataaccaaccaagatatggctctggggctgatcgactcggaccgatg

SEQ ID NO: 13925 - DNA, 203 bp, Artificial sequence
  synthetic
ggcgcgccagtcctgggaagcttgatggcgtcaaaagacgtcgttcctactgctgctagcagtgaaaatgctaacaacaatagtagtattaagtctcgtctattggcgagactcaaggtgaacatcacattaacgtccccacccaactcgataaagataaccaaccaagatatggctctggggctgatcgactcggaccgatg

SEQ ID NO: 13926 - DNA, 203 bp, Artificial sequence
  synthetic
ggcgcgccagtccttttcgtcctgcaaattagactccttgcggagctcgccgcctgattctaggctggtcacacgataaagcctgtgacgtttgcggcagccaggccgtcgacgatgcccagtgaaactctctgggaaattgcaaaagctgaagtggaaaaaaggggaattaatggaagtgaaggtgacgactcggaccgatg

SEQ ID NO: 13927 - DNA, 203 bp, Artificial sequence
  synthetic
ggcgcgccagtcctacgtaccgtgcaaggagacgccgccgccttcatgctgccggcgggctgacgcataaacacattggccgagctgcagggcgccctggacgcctgcgcacagcgacaattgcaattggagcagagcctgcgcgtttgccgtcggctgctgcatgcctgggaaccaactgggacccgcgactcggaccgatg

SEQ ID NO: 13928 - DNA, 203 bp, Artificial sequence
  synthetic
ggcgcgccagtcctctcaattatgcaaggagacgccgccgccttcatgctgccggcgggctgctcgcgccggctggtggccgagctgcagggcgccctggacgcaacgttgttcgttaaattgcaattggagcagagcctgcgcgtttgccgtcggctgctgcatgcctgggaaccaactgggacccgcgactcggaccgatg

SEQ ID NO: 13929 - DNA, 203 bp, Artificial sequence
  synthetic
ggcgcgccagtcctggccaaattgcaaggagacgccgccgccttcatgctgccggcgggctgctcgcgccggctggtggccgagctgcagggcgccctggacgcctgcgcacagcgacaattgcaattggagcagagcctgcgcgtttgccgtcggctgctgcatgcctgggaaccaactgggacccgcgactcggaccgatg

SEQ ID NO: 13930 - DNA, 203 bp, Artificial sequence
  synthetic
ggcgcgccagtcctttctgttgtgcaaggagacgccgccgccttcatgctgccggcgggctgctcgcgccggctggtggccgagctgcagggcgccctggacgcctgcgcacagcgacttggaatgcaaacccagagcctgcgcgtttgccgtcggctgctgcatgcctgggaaccaactgggacccgcgactcggaccgatg

SEQ ID NO: 13931 - DNA, 203 bp, Artificial sequence
  synthetic
ggcgcgccagtcctgtgtcgtctgcaaggagacgccgccgccttcatgctgtgcatctagtgctcgcgccggctggtggccgagctgcagggcgccctggacgcctgcgcacagcgacaattgcaattggagcagagcctgcgcgtttgccgtcggctgctgcatgcctgggaaccaactgggacccgcgactcggaccgatg

SEQ ID NO: 13932 - DNA, 203 bp, Artificial sequence
  synthetic
ggcgcgccagtcctgagatggctgcaattgaagtaggcacatgtcgaattgctactgttgaaggcctaacaacctctgaggcaattgctgctataggcctcactccacaggcctatgctgtgatatctggggctcctgctgctatagctggatttgcagctttactgcaaactgtgactggtgtgagccgactcggaccgatg

SEQ ID NO: 13933 - DNA, 203 bp, Artificial sequence
  synthetic
ggcgcgccagtcctgaggagtttgcaattgaagtgcaacttgcatctgagtgacgctcgcttggcctaacaacctctgaggcaattgctgctataggcctcactccacaggcctatgctgtgatatctggggctcctgctgctatagctggatttgcagctttactgcaaactgtgactggtgtgagccgactcggaccgatg

SEQ ID NO: 13934 - DNA, 203 bp, Artificial sequence
  synthetic
ggcgcgccagtccttgaagagttgcaattgaagtgcaacttgcatctgttgctactgttgaacagaatcagggaggtgaggcaattgctgctataggcctcactccacaggcctatgctgtgatatctggggctcctgctgctatagctggatttgcagctttactgcaaactgtgactggtgtgagccgactcggaccgatg

SEQ ID NO: 13935 - DNA, 203 bp, Artificial sequence
  synthetic
ggcgcgccagtccttacgcccttgcaattgaagtgcaacttgcatctgttgctactgttgaaggcctaacaacctctgaggcaattgctgctataggcctcactccacaggcctatgctgtgatatctggggctcctgctgctataatatccccgttttgtttactgcaaactgtgactggtgtgagccgactcggaccgatg

SEQ ID NO: 13936 - DNA, 203 bp, Artificial sequence
  synthetic
ggcgcgccagtcctagcacttgtgcaattgaagtgcaacttgcatctgttgctactgttgaaggcctaacaacctctgaggcaattgctgctataggcctcactccacaggcctatgctgtgatatctggggctcctgctgctatagctggatttgcagctttactgcaaactgtgactggtgtgagccgactcggaccgatg

SEQ ID NO: 13937 - DNA, 203 bp, Artificial sequence
  synthetic
ggcgcgccagtcctgcgcaacgtgcaattgaagtgcaacttgcatctgttgctactgttgaaggcctaacaacctctgaggcaattgctgctataggcctcactccacaggcctatgctgtgatatctgggggatggaagcggggggctggatttgcagctttactgcaaactgtgactggtgtgagccgactcggaccgatg

SEQ ID NO: 13938 - DNA, 203 bp, Artificial sequence
  synthetic
ggcgcgccagtcctaaggcatgtgcacactcggactgggtataaagcagctgaaatgtggagtttcctcccaggagctgagagcgtgtccatgggcccagtgcctggcgtgtcctccctgggagcttgctggacgcatgaccaggattctgggagggcagaggacagaccacaggcacccaggataaccgactcggaccgatg

SEQ ID NO: 13939 - DNA, 203 bp, Artificial sequence
  synthetic
ggcgcgccagtcctctaaggtatgcacagctaagacgtcgcgcttgcgcaggcgctcggcgctacccaacctacagagccaagatggcgcataggggttctccaggctgcagttggcgccttatcagtatctaagcggagtgttttggaaggagttaaggggctgtggcaaacgccctctccgccgtccgactcggaccgatg

SEQ ID NO: 13940 - DNA, 203 bp, Artificial sequence
  synthetic
ggcgcgccagtcctaacactactgcacagctaagacgtcgcgcttgcggtattagcaatgtgagaggcctgcgggaagccaagatggcgcataggggttctccaggctgcagttggcgccttatcagtatctaagcggagtgttttggaaggagttaaggggctgtggcaaacgccctctccgccgtccgactcggaccgatg

SEQ ID NO: 13941 - DNA, 203 bp, Artificial sequence
  synthetic
ggcgcgccagtcctccatacggtgcacagctaagtgcctcgaagccgacaggcgctcggcgcagaggcctgcgggaagccaagatggcgcataggggttctccaggctgcagttggcgccttatcagtatctaagcggagtgttttggaaggagttaaggggctgtggcaaacgccctctccgccgtccgactcggaccgatg

SEQ ID NO: 13942 - DNA, 203 bp, Artificial sequence
  synthetic
ggcgcgccagtcctcaattgtgtgcacttcagagcgggatgtaaccgccacgtggcattgccaacaaggagaagaactccttgcccagctgcaccgacccctagagccatgcactaacaaatgctattgtaagcgatgcagtttccattgccagctgtgtttctcgaaaaaggggctcggaatatcatcgactcggaccgatg

SEQ ID NO: 13943 - DNA, 203 bp, Artificial sequence
  synthetic
ggcgcgccagtcctatacatgatgcacttcagagcgggatgtaaccgctcaagaattggctaaacaaggagaagaaactaacagaatatagcaccgacccctagagccatgcactaacaaatgctattgtaagcgatgcagtttccattgccagctgtgtttctcgaaaaaggggctcggaatatcatcgactcggaccgatg

SEQ ID NO: 13944 - DNA, 203 bp, Artificial sequence
  synthetic
ggcgcgccagtcctcgtgcagttgcacttcagagcgggatgtaaccgctcaagaattggctaaacaaggagaagaactccttgcccagctgcaccgacccctagagccatgcactaacaaatgctattgtaagcgatgcagtttccattgccagctgtgtgaacaaccgcgctagctcggaatatcatcgactcggaccgatg

SEQ ID NO: 13945 - DNA, 203 bp, Artificial sequence
  synthetic
ggcgcgccagtccttagggcaatgcacttcagagcgggatgtaaccgctcaagaattggctaaacaaggagaagaactccttgcccagctttcgatcgtaaccaagccatgcactaacaaatgctattgtaagcgatgcagtttccattgccagctgtgtttctcgaaaaaggggctcggaatatcatcgactcggaccgatg

SEQ ID NO: 13946 - DNA, 203 bp, Artificial sequence
  synthetic
ggcgcgccagtcctatcacgcttgcacttcagaggccaggcaggtgaatcaagaattggctaaacaaggagaagaactccttgcccagctgcaccgacccctagagccatgcactaacaaatgctattgtaagcgatgcagtttccattgccagctgtgtttctcgaaaaaggggctcggaatatcatcgactcggaccgatg

SEQ ID NO: 13947 - DNA, 203 bp, Artificial sequence
  synthetic
ggcgcgccagtcctgtagaacttgcagcagcagctcttctggcctctcacgccatccaggggaccttgtcctaccctcttgtgtccgtcgtcagtgaatctctgactcgaaaaggtacagccgaagatagcatacttgctgttgccgttgtcattatcctgtttattatcttgctgggagttatcatgcgactcggaccgatg

SEQ ID NO: 13948 - DNA, 203 bp, Artificial sequence
  synthetic
ggcgcgccagtcctctaatgattgcagcagcagctcttctggcctctcacgccatccaggggaccttgtcctaccctcttgtgtccgtcgtcagtgaatctctgactcgaaaaggtactcagcttctctatcgtgcgatgcaacgtgttgtcattatcctgtttattatcttgctgggagttatcatgcgactcggaccgatg

SEQ ID NO: 13949 - DNA, 203 bp, Artificial sequence
  synthetic
ggcgcgccagtccttatctcgctgcagcagcagctcttctggcctctcacgccatccaggggaccttgtcctaccctcttgtgtccgtcgtcagtgaatctctgactcgaaaaggtactcagcttctctatctacttgctgttgccgttgtcattatcctgtttattatcttgccacactcatggtgacgactcggaccgatg

SEQ ID NO: 13950 - DNA, 203 bp, Artificial sequence
  synthetic
ggcgcgccagtccttttagctatgcagcagcagctcttctggcctctcacgccatccaggggaccttgtcctaccctcttgtgtccgtcgtcagtgaatctctgcagaagttgacacatcagcttctctatctacttgctgttgccgttgtcattatcctgtttattatcttgctgggagttatcatgcgactcggaccgatg

SEQ ID NO: 13951 - DNA, 203 bp, Artificial sequence
  synthetic
ggcgcgccagtccttgcctccatgcagcagcagctcttctggcctctcttttagatacttacaccttgtcctaccctcttgtgtccgtcgtcagtgaatctctgactcgaaaaggtactcagcttctctatctacttgctgttgccgttgtcattatcctgtttattatcttgctgggagttatcatgcgactcggaccgatg

SEQ ID NO: 13952 - DNA, 203 bp, Artificial sequence
  synthetic
ggcgcgccagtcctgaacgagctgcagtcaagttgaccaagaagcgggactcagttcgagagcctctgtcggatgccagcctggacctgcagacggttatccgcacctcacccagctccctcgtagctttcatcaactcgcgatgcacatctccaggaggctcctacggtcatctctccattggcacccgactcggaccgatg

SEQ ID NO: 13953 - DNA, 203 bp, Artificial sequence
  synthetic
ggcgcgccagtcctgaacctggtgcagtcaagttgaccaagaagcgggcactgtccatctcacctctgtcggatgccagcctggacctgcagacggttatccgcacctcacccagctccctcgtagctttcatcaactcgcgatgcacatctccaggaggctcctacggtcatcaggaagacttaggtcgactcggaccgatg

SEQ ID NO: 13954 - DNA, 203 bp, Artificial sequence
  synthetic
ggcgcgccagtccttgaaaccatgcagtcaagttgaccaagaagcgggcactgtccatctcacctctgtcggatgccagcctggacctgcagacggttatccgcacctcacccagctccctcgtagctttcatcaactcgcgatgcgaccgcagtatcccctcctacggtcatctctccattggcacccgactcggaccgatg

SEQ ID NO: 13955 - DNA, 203 bp, Artificial sequence
  synthetic
ggcgcgccagtcctgcagcctgtgcagtcaagttgaccaagaagcgggcactgtccatctcacctctgtcggatgccagcctggacctgcagacggttatccgcacctcacccagctcgtgatgccaccatttcaactcgcgatgcacatctccaggaggctcctacggtcatctctccattggcacccgactcggaccgatg

SEQ ID NO: 13956 - DNA, 203 bp, Artificial sequence
  synthetic
ggcgcgccagtccttgttatggtgcagtcaagttgaccaagaagcgggcactgtccatctcacctctgtcggatgccagcctggacctgcagacggttatccgcgatagcagtttgctcctcgtagctttcatcaactcgcgatgcacatctccaggaggctcctacggtcatctctccattggcacccgactcggaccgatg

SEQ ID NO: 13957 - DNA, 203 bp, Artificial sequence
  synthetic
ggcgcgccagtcctgtgatctctgcagtcaagttgaccaagaagcgggcactgtccatctcacctctgtcggatgccagcctggacctgcgcttctagtaatagacctcacccagctccctcgtagctttcatcaactcgcgatgcacatctccaggaggctcctacggtcatctctccattggcacccgactcggaccgatg

SEQ ID NO: 13958 - DNA, 203 bp, Artificial sequence
  synthetic
ggcgcgccagtcctgcccgtgatgcagtcaagttgaccaagaagcgggcactgtccatctcacctctgtcggatgcgccagcttgaggtaagacggttatccgcacctcacccagctccctcgtagctttcatcaactcgcgatgcacatctccaggaggctcctacggtcatctctccattggcacccgactcggaccgatg

SEQ ID NO: 13959 - DNA, 203 bp, Artificial sequence
  synthetic
ggcgcgccagtccttgccgacctgcagtctcctcaggccttattaggacacatagttagccctaggtgtgaatatcaagcaggacataacaaggtaggatctctacaatacttggcactagcagcattaataacaccaaaaaagataaagccacctttgcctagtgttacgaaactgacagaggatagcgactcggaccgatg

SEQ ID NO: 13960 - DNA, 203 bp, Artificial sequence
  synthetic
ggcgcgccagtccttttagacgtgcagtgcggagccatgtcagcaagaaggccccgcactcgatccacgctggctccctacggaggcccacctactcgaggcccaccgactcctactgcaatcagtactatgcgatcgtcctagagagtccattcagctgcacttccgcctcagtatggcatcacagccgactcggaccgatg

SEQ ID NO: 13961 - DNA, 203 bp, Artificial sequence
  synthetic
ggcgcgccagtcctaaacatactgcagtgcggagggggcgggaagtccaggccccgcactcgatccacgctggctcaacctctgttagtccctactcgaggcccaccgactcctactgcaatcagtactatgcgatcgtcctagagagtccattcagctgcacttccgcctcagtatggcatcacagccgactcggaccgatg

SEQ ID NO: 13962 - DNA, 203 bp, Artificial sequence
  synthetic
ggcgcgccagtcctgctctatatgcatactttttagagaaaccaaataattttttattgcatacccgtttttaataaaatacattgcataccctcttttaataaaaaatattgcatactttgacgaaacaaattttcgttgcatacccaataaaagattattatattgcatacctcgagactggccgccgactcggaccgatg

SEQ ID NO: 13963 - DNA, 203 bp, Artificial sequence
  synthetic
ggcgcgccagtcctccatgttttgccaggtaacgccaagccagccacccagggcgagtcatcgacccaaaaggtcagaccgtctcacacaaacaatcccaagtaaaggctctgacgtctccccctttttttaggaactgaaaccacggccctgacgtccctcccccctaggaacaggaacagctctcccgactcggaccgatg

SEQ ID NO: 13964 - DNA, 203 bp, Artificial sequence
  synthetic
ggcgcgccagtcctctcagagatgcccctgctctgcactctcaggacaaagttgctcttactccaaaaagatggacccaggtccgaaggggcactgccactgtggggggcatggccatcctccaggtcactgcgggccaccccctggccatggcccagggccctgcgggccacccccccaccatggtccgactcggaccgatg

SEQ ID NO: 13965 - DNA, 203 bp, Artificial sequence
  synthetic
ggcgcgccagtcctagtctacatgcccctgctctgcactctcaggtatcgagattctggctcccaaaaagatggacccaggtccgaaggggcactgccactgtggggggcatggccatcctccaggtcactgcgggccaccccctggccatggcccagggccctgcgggccacccccccaccatggtccgactcggaccgatg

SEQ ID NO: 13966 - DNA, 203 bp, Artificial sequence
  synthetic
ggcgcgccagtcctactgcccttgcccctgctctgcactctcaggtattccctgctctcctgaacaaaagatggacccaggtccgaaggggcactgccactgtggggggcatggccatcctccaggtcactgcgggccaccccctggccatggcccagggccctgcgggccacccccccaccatggtccgactcggaccgatg

SEQ ID NO: 13967 - DNA, 203 bp, Artificial sequence
  synthetic
ggcgcgccagtcctagcagctttgcccctgctctgcactctcaggtattccctgctcttactccaaaaagatggacccaggtccgaaggggcactgccactgtgatacctcgcctagacctccaggtcactgcgggccaccccctggccatggcccagggccctgcgggccacccccccaccatggtccgactcggaccgatg

SEQ ID NO: 13968 - DNA, 203 bp, Artificial sequence
  synthetic
ggcgcgccagtcctataaagtttgcccctgctctgcactctcaggtattccctgctcttactccaaaaagatggacccaggtccgaaggggcactgccactgtggggggcatggccatagaagtatctttgccgggccaccccctggccatggcccagggccctgcgggccacccccccaccatggtccgactcggaccgatg

SEQ ID NO: 13969 - DNA, 203 bp, Artificial sequence
  synthetic
ggcgcgccagtcctggacccattgcccctgctctgcactctcaggtattccctgctcttactccaaaaagatggacccaggtccgaaggggcactgccactgtggggggcatggccatcctccaggtcactgcgggccaccccctggccatggcccagggaaagctcctaggtgcccccaccatggtccgactcggaccgatg

SEQ ID NO: 13970 - DNA, 203 bp, Artificial sequence
  synthetic
ggcgcgccagtcctacttcgaatgccgccatgcaagggctgttctcacacggctactcactgcacgccatgaactcactcagcgccatgtacaacctgcaccagcaggcagcccagcaggcccagcatgcccccgactaccggccttcagtgcatgcgcttacattggctgagcgcctggctggctgtcgactcggaccgatg

SEQ ID NO: 13971 - DNA, 203 bp, Artificial sequence
  synthetic
ggcgcgccagtcctcaatgggttgccgccatgcagcactacggggtgaacggcacgattgtgcacgccatgaactcactcagcgccatgtacaacctgcaccagcaggcagcccagcaggcccagcatgcccccgactaccggccttcagtgcatgcgcttacattggctgagcgcctggctggctgtcgactcggaccgatg

SEQ ID NO: 13972 - DNA, 203 bp, Artificial sequence
  synthetic
ggcgcgccagtcctggatgggatgccgccatgcagcactacggggtgaacggctactcactgcacgccatgaactcactcagcgccatgtacaacctgcaccagcaggcagcccagcacttagtttcctaagccgactaccggccttcagtgcatgcgcttacattggctgagcgcctggctgacatccgactcggaccgatg

SEQ ID NO: 13973 - DNA, 203 bp, Artificial sequence
  synthetic
ggcgcgccagtcctacgctttctgccgccatgcagcactacggggtgaacggctactcactgcacgccatgaactcactcagcgccatgtacaacctgcaccagcaggcagcccagcaggcccagcatgcccccgactaccggccttcagtgcatgcgctgggtgcattgcgtagcctggctgacatccgactcggaccgatg

SEQ ID NO: 13974 - DNA, 203 bp, Artificial sequence
  synthetic
ggcgcgccagtcctagccagcatgccgccatgcagcactacggggtgaacggctactcactgcacgccatgaactcactcagcgccatgtacaacctgcaccagcaggcagcccagcaggcccagcatgcccccgactaccggccttcagtgcatgcgcttacattggctgagcagaaattctgggctcgactcggaccgatg

SEQ ID NO: 13975 - DNA, 203 bp, Artificial sequence
  synthetic
ggcgcgccagtcctaggtaacttgccgccatgcagcactacggggtgaacggctactcactgcacgccatgaactcactcagcgccatgtacaacctgcaccagcaggcagcccagcaggcccagcatgcccccgactaccggccttcagtgcatgcgcttacattggctgagcagtcacggtcagaccgactcggaccgatg

SEQ ID NO: 13976 - DNA, 203 bp, Artificial sequence
  synthetic
ggcgcgccagtccttaacgatatgccgccatgcagcactacggggtgaacggctactcactgcacgccatgaactcactcagcgccatgtacaacctgcaccagcaggcagcccagcaggcccagcatgccctatttgcagatttatcagtgcatgcgcttacattggctgagcgcctggctgacatccgactcggaccgatg

SEQ ID NO: 13977 - DNA, 203 bp, Artificial sequence
  synthetic
ggcgcgccagtcctacaagcgctgccgccatgcagcactacggggtgaacggctactcactgcacgccatgaactcactcagcgccatgtacaacctgcaccaggcaaattagtcagtggcccagcatgcccccgactaccggccttcagtgcatgcgcttacattggctgagcgcctggctggctgtcgactcggaccgatg

SEQ ID NO: 13978 - DNA, 203 bp, Artificial sequence
  synthetic
ggcgcgccagtccttctctgagtgccgccatgcagcactacggggtgaacggctactcactgcacgccatgaactccacagagaaggaaaacaacctgcaccagcaggcagcccagcaggcccagcatgcccccgactaccggccttcagtgcatgcgcttacattggctgagcgcctggctgacatccgactcggaccgatg

SEQ ID NO: 13979 - DNA, 203 bp, Artificial sequence
  synthetic
ggcgcgccagtccttagccgcctgccgccatgcagcactacggggtgaacggctactcactgcacgccatgaactcgagaccaaatcctcacaacctgcaccagcaggcagcccagcaggcccagcatgcccccgactaccggccttcagtgcatgcgcttacattggctgagcgcctggctggctgtcgactcggaccgatg

SEQ ID NO: 13980 - DNA, 203 bp, Artificial sequence
  synthetic
ggcgcgccagtcctcttactagtgccgccatgcagcactacggggtgaacggctactcactggtaaaggctccgcaactcagcgccatgtacaacctgcaccagcaggcagcccagcaggcccagcatgcccccgactaccggccttcagtgcatgcgcttacattggctgagcgcctggctggctgtcgactcggaccgatg

SEQ ID NO: 13981 - DNA, 203 bp, Artificial sequence
  synthetic
ggcgcgccagtcctcctggacatgccgccatgcagcactacggggtgatgcaactggtggcacacgccatgaactcactcagcgccatgtacaacctgcaccagcaggcagcccagcaggcccagcatgcccccgactaccggccttcagtgcatgcgcttacattggctgagcgcctggctggctgtcgactcggaccgatg

SEQ ID NO: 13982 - DNA, 203 bp, Artificial sequence
  synthetic
ggcgcgccagtcctagattcgttgccggttttgcgacccagcgagtgagggcgcacagccgggacgccgaggcggcgggcgggagacccgcaccagcgcagccggccctcggcgggacgtgacgcagcgcccggggcgcgggtgtatttgatatagtgtttgcaacaaattcgacccaggtgatcaaacgactcggaccgatg

SEQ ID NO: 13983 - DNA, 203 bp, Artificial sequence
  synthetic
ggcgcgccagtcctcaggtacatgcctgcacaccctatgggtgtgaagccaaacaatggacaaggtgtgaagagccccgtgtgctcgctttgagtcctccggcccctgaatgtggctaaccttaaccctgcagctagagcacgtaaatgtgcagcgcggcagtcgtaatgagcaattgcgggatgggacgactcggaccgatg

SEQ ID NO: 13984 - DNA, 203 bp, Artificial sequence
  synthetic
ggcgcgccagtcctggcacacgtgcctgcacaccctatgggtgtgaagccaaacaatggacaaggtgtgaagagccccgtgtgctcgctttgagtcctccggcccctgaatgtggctaaccttaaccctgcagctagagcacgtaacccaatgtgtatctgccacccgaccatcattgcgggatgggacgactcggaccgatg

SEQ ID NO: 13985 - DNA, 203 bp, Artificial sequence
  synthetic
ggcgcgccagtcctaacgcggctgcctgcacaccctatgggtgtgaagccaaacaatggacaaggtgtgaagagccccgtgtgctcgctttgagtcctccggcccctgaatgtggctagttcacgagtgtgtgctagagcacgtaacccaatgtgtatctagtcgtaatgagcaattgcgggatgggacgactcggaccgatg

SEQ ID NO: 13986 - DNA, 203 bp, Artificial sequence
  synthetic
ggcgcgccagtccttcgatcgttgcctgcacaccctatgggtgtgaagccaaacaatggacaaggtgtgaagagccccgtgtgctcgctttgagtcctccggccgacttggtgactggaccttaaccctgcagctagagcacgtaacccaatgtgtatctagtcgtaatgagcaattgcgggatgggacgactcggaccgatg

SEQ ID NO: 13987 - DNA, 203 bp, Artificial sequence
  synthetic
ggcgcgccagtccttctatgcttgcctgcacaccctatgggtgtgaagccaaacaatggacacaccaaatgtctagccgtgtgctcgctttgagtcctccggcccctgaatgtggctaaccttaaccctgcagctagagcacgtaacccaatgtgtatctagtcgtaatgagcaattgcgggatgggacgactcggaccgatg

SEQ ID NO: 13988 - DNA, 203 bp, Artificial sequence
  synthetic
ggcgcgccagtcctcccatttgtgcctgcacaccgccgtcaatgctgcccaaacaatggacaaggtgtgaagagccccgtgtgctcgctttgagtcctccggcccctgaatgtggctaaccttaaccctgcagctagagcacgtaacccaatgtgtatctagtcgtaatgagcaattgcgggatgggacgactcggaccgatg

SEQ ID NO: 13989 - DNA, 203 bp, Artificial sequence
  synthetic
ggcgcgccagtcctaatctttatgcctgccacttccggctcctgcgtcgctccggaagcctgactagattctctcacttggtaatccagattcggctaggaaaagacaagctttccagagaatgtttcagagaaagttacgtggagcgtgggcgtttcgcagactcctaagagaccttcagagaagaccgactcggaccgatg

SEQ ID NO: 13990 - DNA, 203 bp, Artificial sequence
  synthetic
ggcgcgccagtccttcagtgcctgcctgggcagagggaggtgacgcgcggtgtggggaaagcctttaacttggcctctggcagccgatttaacccgagcgagcaggtctttgctattttcatcatctgtagaaacgggagttgcgaggcggatgagtgactgcaggtcgtccttctgcatctattgagcgactcggaccgatg

SEQ ID NO: 13991 - DNA, 203 bp, Artificial sequence
  synthetic
ggcgcgccagtcctccgccatgtgcctgggcagagggaggtgacgcgcggtgtggggaaagcctttaacttggcctctggcagccgatttaacccgagcgagcaggtctttgctattttcatcatctgtagatggatatcacctccggcggatgagtgactgcaggtcgtccttggtggaaggaaccacgactcggaccgatg

SEQ ID NO: 13992 - DNA, 203 bp, Artificial sequence
  synthetic
ggcgcgccagtcctatacgtcttgcctgggcagagggaggtgacgcgcttcaccacagcctgctttaacttggcctctggcagccgatttaacccgagcgagcaggtctttgctattttcatcatctgtagaaacgggagttgcgaggcggatgagtgactgcaggtcgtccttggtggaaggaaccacgactcggaccgatg

SEQ ID NO: 13993 - DNA, 203 bp, Artificial sequence
  synthetic
ggcgcgccagtcctatggctcctgcctgggcagatatcccactgttttggtgtggggaaagcctttaacttggcctctggcagccgatttaacccgagcgagcaggtctttgctattttcatcatctgtagaaacgggagttgcgaggcggatgagtgactgcaggtcgtccttggtggaaggaaccacgactcggaccgatg

SEQ ID NO: 13994 - DNA, 203 bp, Artificial sequence
  synthetic
ggcgcgccagtccttgggcaactgcgcaccagaaatgcatcctgccttcctcacccaggactggtctgagagggattcatgatggaagcatgttcattctgtgacctggttctcgcctaaatgtggtcaacagtgtcagcagttcagaggacatcaagcccttaccagggcttcccgggattggaaaccgactcggaccgatg

SEQ ID NO: 13995 - DNA, 203 bp, Artificial sequence
  synthetic
ggcgcgccagtcctcaccacaatgcgcaccttccctgtaagagagcttgccagcagagagtgctctgagcactgaaactcagaggagagaatctgtctcccaggtctgctgatagacgtgggtgtgtattgaagaagaacaatctctaaacagagtcaactataactactaactccagagattaccagcgactcggaccgatg

SEQ ID NO: 13996 - DNA, 203 bp, Artificial sequence
  synthetic
ggcgcgccagtccttggcattctgcgcaccttccctgtaagagagcttgccagcagagagtgctctgagcactgaactgattctctagagatctgtctcccaggtctgctgatagacggtaacagaatcaccagaagaacaatctctaaacagagtcaactataactactaactccagagattaccagcgactcggaccgatg

SEQ ID NO: 13997 - DNA, 203 bp, Artificial sequence
  synthetic
ggcgcgccagtcctctcttctatgcgcaccttccgccgtcattcctaagccagcagagagtgctctgagcactgaaactcagaggagagaatctgtctcccaggtctgctgatagacggtaacagaatcaccagaagaacaatctctaaacagagtcaactataactactaactccagagattaccagcgactcggaccgatg

SEQ ID NO: 13998 - DNA, 203 bp, Artificial sequence
  synthetic
ggcgcgccagtcctccacttggtgcgccggagggagggtgggaatgtctgcacgtgggtctgggtgtgagctgtctgagagtctggatgtatggctgtggaagtccaggagcagtggccttgtttgccagcagccggatgcccgggcccactgggcgggcggcccaggaaaaaggggatgagcagactcgactcggaccgatg

SEQ ID NO: 13999 - DNA, 203 bp, Artificial sequence
  synthetic
ggcgcgccagtcctacgtcgcttgcgccggagggttaaaacagtctggtgcacgtgggtctgggtgtgagctgtctgagagtctggatgtatggctgtggaagtccaggagcagtggccttgtttgccagcagccggatgcccgggcccactgggcgggccagtggccgcctgcgggatgagcagactcgactcggaccgatg

SEQ ID NO: 14000 - DNA, 203 bp, Artificial sequence
  synthetic
ggcgcgccagtccttgtaagagtgcgcctgcccccaggctagcgtttggactgttttgttttccagtatgtacgaaggcaggaagattgcacaagtcagggggcgtttccaatcgggtgtcaattttggatctccccccccccacccccctttggatcttgtcgggctttccacgtttcacttaaaaacgactcggaccgatg

SEQ ID NO: 14001 - DNA, 203 bp, Artificial sequence
  synthetic
ggcgcgccagtcctagcgaaactgcgcctgcccccaggctagcgtttggactgttttgtttttggcggaactaccgggcaggaagattgcacaagtcagggggcgtttccaatcgggtgtcaattttggatcgggtaaaatggtggcccctttggatcttgtcgggctttccacgtttcacttaaaaacgactcggaccgatg

SEQ ID NO: 14002 - DNA, 203 bp, Artificial sequence
  synthetic
ggcgcgccagtcctcctagtgatgcgcctgcccccaggctagcgtttggactgttttgtttttggcggaactaccgggcaggaagattgcacaagtcagggggcgtttccaatcgggtgtcaattttggatctccccccccccacccccctttggatcttgtcgggctttccacaggattggagcggccgactcggaccgatg

SEQ ID NO: 14003 - DNA, 203 bp, Artificial sequence
  synthetic
ggcgcgccagtcctccaccctttgcgcctgcccccaggctagcgtttggactgttttgtttttggcggaactaccgggcaggaagattgcacaagtcagggggcgtttccaatcgggtgtcaattttggatctccccccccccacccccctttggatcttgtcgggctttccacgtttcacttaaaaacgactcggaccgatg

SEQ ID NO: 14004 - DNA, 203 bp, Artificial sequence
  synthetic
ggcgcgccagtcctaacaacgttgcgcctgcccccaggctagcgtttggactgttttgtttttggcggaactaccgggcaggaagattgcacaagtcagggggcgtttccaatcgggttaagtgaaatagcttccccccccccacccccctttggatcttgtcgggctttccacgtttcacttaaaaacgactcggaccgatg

SEQ ID NO: 14005 - DNA, 203 bp, Artificial sequence
  synthetic
ggcgcgccagtcctgcatcgattgcggtgcggagactccatgaggcccctcggcgagcttgtctgagtggaggcggcgggcgcaggactcgggtggaagggggccagcttgggggcgaggagtggacccgccacgggagctttgtcaataagcccacgcggggctggctgcatcccaacgacaaagtccgactcggaccgatg

SEQ ID NO: 14006 - DNA, 203 bp, Artificial sequence
  synthetic
ggcgcgccagtccttccactcctgcggtgcggagactccatgaggccctggacatgaacaagctgagtggaggcggcgggcgcaggactcgggtggaagggggccagcttgggggcgaacgtgcttagttatacgggagctttgtcaataagcccacgcggggctggctgcatcccaacgacaaagtccgactcggaccgatg

SEQ ID NO: 14007 - DNA, 203 bp, Artificial sequence
  synthetic
ggcgcgccagtccttaacagcatgcggtgcggagactccatgaggccctggacatgaacaagctgagtggaggcggcgggcgcaggactcgggtggaagggggccagcttgggggcgaggagtggacccgccacgggagctttgtcaataagcccacgcgacttcctgcttcagccaacgacaaagtccgactcggaccgatg

SEQ ID NO: 14008 - DNA, 203 bp, Artificial sequence
  synthetic
ggcgcgccagtcctttccctggtgcggtgcggagactccatgaggccctggacatgaacaagctgagtggaggcggcgggcgcaggactcgggtggaagggggcttatccaatcctagggagtggacccgccacgggagctttgtcaataagcccacgcggggctggctgcatcccaacgacaaagtccgactcggaccgatg

SEQ ID NO: 14009 - DNA, 203 bp, Artificial sequence
  synthetic
ggcgcgccagtcctgtaagcgttgcggtgcggagactccatgaggccctggacatgaacaagggacaatctaagttcgggcgcaggactcgggtggaagggggccagcttgggggcgaggagtggacccgccacgggagctttgtcaataagcccacgcggggctggctgcatcccaacgacaaagtccgactcggaccgatg

SEQ ID NO: 14010 - DNA, 203 bp, Artificial sequence
  synthetic
ggcgcgccagtcctggccacggtgcgtcgccctcggatccgaaacgcaggccaactcgaccacagatgctctgaacgttcttctcatcatcgtggatgacctgcagggtcgagatccttgttatggggataagctggtgaggtccccaaatattgaccaactggcatcccacagcctcctcttccagacgactcggaccgatg

SEQ ID NO: 14011 - DNA, 203 bp, Artificial sequence
  synthetic
ggcgcgccagtcctccggtgtatgcgtcgccctcggatccgaaacgcaggccaactcgaccacagatgctctgaacgttcttctcatcatcgtggatgacctgcgcccctccctgggcgtaacattaatattgctggtgaggtccccaaatattgaccaactggcatcccacagcctcctcttccagacgactcggaccgatg

SEQ ID NO: 14012 - DNA, 203 bp, Artificial sequence
  synthetic
ggcgcgccagtcctgggcatcatgcgtcgccctcggatccgaaacgcaggccaactcgaccacagatgctctgaacgttcttctcatcatcgtggatgacctgcgcccctccctgggctgttatggggataacacacctctcgtatcaaatattgaccaactggcatcccacagcctcctcttccagacgactcggaccgatg

SEQ ID NO: 14013 - DNA, 203 bp, Artificial sequence
  synthetic
ggcgcgccagtccttaccgcagtgcgtcgccctcggatccgaaacgcaggccaactcgaccacagatgctctgaacgttcttctcatcatcgtggatgacctgcgcccctccctgggctgttatggggataagctggtgaggtccccaaatattgaccaaaacctgagtacttacctcctcttccagacgactcggaccgatg

SEQ ID NO: 14014 - DNA, 203 bp, Artificial sequence
  synthetic
ggcgcgccagtcctttgacgcatgcgtcgccctcggatccgaaacgcattgtcgtggtttagcagatgctctgaacgttcttctcatcatcgtggatgacctgcgcccctccctgggctgttatggggataagctggtgaggtccccaaatattgaccaactggcatcccacagcctcctcttccagacgactcggaccgatg

SEQ ID NO: 14015 - DNA, 203 bp, Artificial sequence
  synthetic
ggcgcgccagtccttgcaccggtgctaatatctggagagagagccgccgcgccggagcctccttctttcctgcctctgattccgggctgtcatggcgacccccaacaatctgacccccaccaactgcagctggtggcccatctccgcgctggagagcgatgcggccaagccagcggaggcccccgacgcgactcggaccgatg

SEQ ID NO: 14016 - DNA, 203 bp, Artificial sequence
  synthetic
ggcgcgccagtcctacttgggttgctactcctgtcgcgatgaaccacgagtttcattgtggtataaatggaatagcaggtgttgtcaggtacaaggtttgtagcttgccaatatgttcattaccaacactgcagattcccattgagttggtgggggttttgttacctttgttttttttctcagcaaaacgactcggaccgatg

SEQ ID NO: 14017 - DNA, 203 bp, Artificial sequence
  synthetic
ggcgcgccagtcctcgacacagtgctactcctgtgataggtttatcttagtttcattgtggtataaatggaatagcaggtgttgtcaggtacaaggtttgtagccctgtggataccggattaccaacactgcagattcccattgagttggtgggggttttgttacctttgttttttttctcagcaaaacgactcggaccgatg

SEQ ID NO: 14018 - DNA, 203 bp, Artificial sequence
  synthetic
ggcgcgccagtcctgcgcccagtgctactcctgtgataggtttatcttagtttcattgtggtataaatggaatagcaggtgttgtcaggtacaaggtttgtagcttgccaatatgttcattaccaacactgcagattcccattgagttggtgggggttttgttacctttgttttcacctcagctcgggcgactcggaccgatg

SEQ ID NO: 14019 - DNA, 203 bp, Artificial sequence
  synthetic
ggcgcgccagtcctcgcgtggatgctactcctgtgataggtttatcttcccacggccacataataaatggaatagcaggtgttgtcaggtacaaggtttgtagcttgccaatatgttcattaccaacactgcagattcccattgagttggtgggggttttgttacctttgttttttttctcagcaaaacgactcggaccgatg

SEQ ID NO: 14020 - DNA, 203 bp, Artificial sequence
  synthetic
ggcgcgccagtcctgatgccagtgctactgcccccggtggcgaaaaacgggaacagcggggcaaacagtgagtggggttcagcgtagactctggaccaggagaggcccgcggtgaccgaggcctgggccccggaaaccaatagagccatggcgactccctctgctgccttcgaggcccttatgaatggcgactcggaccgatg

SEQ ID NO: 14021 - DNA, 203 bp, Artificial sequence
  synthetic
ggcgcgccagtcctcaccctcttgctactgccccgaacccgcgctgcaaaagggttaccctaaaacagtgagtggggttcagcgtagactctggaccaggagaggcccgcggtgaccgaggcctgggccccggaaaccaatagagccatggcgactccctctgctgccttcgaggcccttatgaatggcgactcggaccgatg

SEQ ID NO: 14022 - DNA, 203 bp, Artificial sequence
  synthetic
ggcgcgccagtcctcccgagcttgcttcaacacccaggccaggtctctgcctcggaagaagaaggtgtcaaccaattccagaacaagcacctctgccaccggatgtcctctgcgctggaatcagtcactgtcagcgacagacccctcggggtgtccatcacaaaagccgaggtagcccctgaagaagacgactcggaccgatg

SEQ ID NO: 14023 - DNA, 203 bp, Artificial sequence
  synthetic
ggcgcgccagtcctctatgccttgcttcaacacccaggccaggtctctgcctcggaagaagagctgaggtttgccatccagaacaagcacctctgccaccggatgtcctctgcgctggaatcagtcactgtcagcgacagaccccttctaaacgttcattcaaaagccgaggtagcccctgaagaagacgactcggaccgatg

SEQ ID NO: 14024 - DNA, 203 bp, Artificial sequence
  synthetic
ggcgcgccagtcctatgtgagatgcttcaacaccgccaaatacgaatagcctcggaagaagagctgaggtttgccatccagaacaagcacctctgccaccggatgtcctctgcgctggaatcagtcactgtcagcgacagacccctcggggtgtccatcacaaaagccgaggtagcccctgaagaagacgactcggaccgatg

SEQ ID NO: 14025 - DNA, 203 bp, Artificial sequence
  synthetic
ggcgcgccagtcctctttggcgtggagtcaggaactaaagaatagtgctgttagcttgctcaatgccacagccatagcagtagctgagggcgggatcttccacttagaagtagtacaaggagcttgtagagctattcgccacatacctagaagaataagacagggcttggaaaggattttgctataagcgactcggaccgatg

SEQ ID NO: 14026 - DNA, 203 bp, Artificial sequence
  synthetic
ggcgcgccagtcctaattcgtttggagtcaggaagatgcttccctatgtgttagcttgctcaatgccacagccatagcagtagctgaggggacagatagggttatagaagtagtacaaggagcttgtagagctattcgccacatacctagaagaataagacagggcttggaaaggattttgctataagcgactcggaccgatg

SEQ ID NO: 14027 - DNA, 203 bp, Artificial sequence
  synthetic
ggcgcgccagtcctctatagcctggataattttccgtgaaactggatgatctttgaatattaaatgaaaggagactagaataacagtctcttgactattcatgagtactaaagtctgagagcattctttcttggtgtgcaaatcacgcctggcagcccctgcccacagtacccgaagatggcaggcctcgactcggaccgatg

SEQ ID NO: 14028 - DNA, 203 bp, Artificial sequence
  synthetic
ggcgcgccagtcctatagtgcttggatcctaggcgattttggttacgcccggcgccgtgggcttttctgtttggacaacatcaaaaacatccattgcacaatggggcagttcattagcttcatgcaagaaataccaacctttttgcaggaggctctgaacattgctcttgttgcagtcagtctcattgcgactcggaccgatg

SEQ ID NO: 14029 - DNA, 203 bp, Artificial sequence
  synthetic
ggcgcgccagtcctatcgggtctggatcctaggcgattttggttacgctataattgtaactgttttctgtttggacaacatcaaaaacatccattgcacaatggggcagttcattagcccatctaggttgggaccaacctttttgcaggaggctctgaacattgctcttgttgcagtcagtctcattgcgactcggaccgatg

SEQ ID NO: 14030 - DNA, 203 bp, Artificial sequence
  synthetic
ggcgcgccagtcctcctggcgttggatcctaggcgattttggttacgctataattgtaactgttttctgtttggacaacatcaaaaacatccattgcacaatggggcagttcattagcttcatgcaagaaataccaacctttttgctaacccaaagtggtattgctcttgttgcagtcagtctcattgcgactcggaccgatg

SEQ ID NO: 14031 - DNA, 203 bp, Artificial sequence
  synthetic
ggcgcgccagtcctaccggtgctggatcctaggcgtaactagatcaagttttgctgagtaaaattttaaacacattgagtatccgtgcaagacagcgcagagctccccacaatgggcaactgcaataagcctcccaagaggcctcccaacacacaaacatataggtgaagcgagtcagcagagttcagcgactcggaccgatg

SEQ ID NO: 14032 - DNA, 203 bp, Artificial sequence
  synthetic
ggcgcgccagtcctgttgtaactggatcctaggcgtaactagatcaagttttgctgagtaaaattttaaacacattgagtatccgtgcaagacagcgcagagctccccacaatgggcaactgcaataagcctcccaagaggcctcccaacacacaaacatcatccaaccaaccctcagcagagttcagcgactcggaccgatg

SEQ ID NO: 14033 - DNA, 203 bp, Artificial sequence
  synthetic
ggcgcgccagtcctatggtgagtggatcctaggcgtaactagatcaagttttgctgagtaaaattttaaacacattgagtatccgtgcaagacagcgcagagctccccacaatgggcacgcagtcatccgtacccaagaggcctcccaacacacaaacatcatccaaccaaccctcagcagagttcagcgactcggaccgatg

SEQ ID NO: 14034 - DNA, 203 bp, Artificial sequence
  synthetic
ggcgcgccagtcctgggctccctggatcctaggcgtaactagatcaagttttgctgagtaaaattttaaacacattgagtatccgtgcaagacagcgcagagctttgactgtgatcatactgcaataagcctcccaagaggcctcccaacacacaaacatcatccaaccaaccctcagcagagttcagcgactcggaccgatg

SEQ ID NO: 14035 - DNA, 203 bp, Artificial sequence
  synthetic
ggcgcgccagtcctgcccgctttggcacaaagggactgttttcttactcttagtctgagtgactgccaaggaaggcaaaggtagagcaactggatctctggctctccacatagcttctgatctcagaccttactaaaatgctttctgggcccaaggacaaagctcacatgaacatcaacaaagccaaacgactcggaccgatg

SEQ ID NO: 14036 - DNA, 203 bp, Artificial sequence
  synthetic
ggcgcgccagtccttgaccgaatggcacaaagggactgttttcttactcttagtctgagtgactgccaaggaaggcaaaggtagagcaactggatctctggctctccacatagcttctgatctcagaccttactaaaatgctttctgggcccaaggacaacatcgtagacggacaatgattttgagtccgactcggaccgatg

SEQ ID NO: 14037 - DNA, 203 bp, Artificial sequence
  synthetic
ggcgcgccagtcctaggcgtactggcaccctgaccatggaaccctgaagtggcagtgacttctagagctcagtggcagaccccacgaccctcttcgagccttcctccccctcccaccaccagctttcaagctcccagagggaggggtggggaggggatcctgatctcacagggcagggggcttccatccgactcggaccgatg

SEQ ID NO: 14038 - DNA, 203 bp, Artificial sequence
  synthetic
ggcgcgccagtcctgacggcggtggcaccctgaccatggaaccctgaagtggcagtgacttctagagctcagtggcagaccccacgacccttcctcccccttcctccccctcccaccaccagctttcaagctttattttaagcacctggggaggggatcctgatctcacagggcagggggcttccatccgactcggaccgatg

SEQ ID NO: 14039 - DNA, 203 bp, Artificial sequence
  synthetic
ggcgcgccagtccttccgacggtggcaccctgacggctattgagattcgtggcagtgacttctagagctcagtggcagaccccacgacccttcctcccccttcctccccctcccaccaccagctttcaagctcccagagggaggggtggggaggggatcctgatctcacagggcagggggcttccatccgactcggaccgatg

SEQ ID NO: 14040 - DNA, 203 bp, Artificial sequence
  synthetic
ggcgcgccagtcctgcccttagtggcggcgaacgcacttccggcgtgtgtccttacgggtgcgtccgggcggctgcttgcaggtgccacccagcgggttccagcttgtttgctgcataacaacgtttctaactggcgggcaaggggtccggctggagccgggcggctctcctccagctccttctcggccgactcggaccgatg

SEQ ID NO: 14041 - DNA, 203 bp, Artificial sequence
  synthetic
ggcgcgccagtcctaactcctatggcggcgaacgcacttccggcgtgtgtccttacgggtgcgtccgggcggctgcttgcaggtgccacccagcgggttccagcttgtttgctgcatagattacaacggtgatggcgggcaagcgggtttctgcccaaacggcggctctcctccagctccttctcggccgactcggaccgatg

SEQ ID NO: 14042 - DNA, 203 bp, Artificial sequence
  synthetic
ggcgcgccagtcctgccgccactggcggcgaacgcacttccggcgtgtgtccttacgggtgctgggacaatcggctttgcaggtgccacccagcgggttccagcttgtttgctgcatagattacaacggtgatggcgggcaaggggtccggctggagccgggcggctctcctccagctccttctcggccgactcggaccgatg

SEQ ID NO: 14043 - DNA, 203 bp, Artificial sequence
  synthetic
ggcgcgccagtcctccaacggctggctaacgccaatcacgtgggagcctgaacaaggtgtgaagagcctattgagctacataagaatcctccggcccctgaatgcggctaatcccaacctcggagcaggtggtcacaaaccagtgattggcctgtcgtaacgcgcaagtccgtggcggaaccgactaccgactcggaccgatg

SEQ ID NO: 14044 - DNA, 203 bp, Artificial sequence
  synthetic
ggcgcgccagtcctggtttcggtggctaacgccatgggacgctagttgtgaacaaggtgtgaagagcctattgagctacataagaatcctccggcccctgaatgaaaggtgattgtctctcggagcaggtggtcacaaaccagtgattggcctgtcgtaacgcgcaagtccgtggcggaaccgactaccgactcggaccgatg

SEQ ID NO: 14045 - DNA, 203 bp, Artificial sequence
  synthetic
ggcgcgccagtcctttattcggtggctaacgccatgggacgctagttgtgaacaaggtgtgaagagcctattgagctacataagaatcctccggcccctgaatgcggctaatcccaacctcggagcaggtggcatttctttgaaccttggcctgtcgtaacgcgcaagtccgtggcggaaccgactaccgactcggaccgatg

SEQ ID NO: 14046 - DNA, 203 bp, Artificial sequence
  synthetic
ggcgcgccagtccttagtaatgtggctaacgccatgggacgctagttgtgaacaaggtgtgaccccaggtcgactatacataagaatcctccggcccctgaatgcggctaatcccaacctcggagcaggtggtcacaaaccagtgattggcctgtcgtaacgcgcaagtccgtggcggaaccgactaccgactcggaccgatg

SEQ ID NO: 14047 - DNA, 203 bp, Artificial sequence
  synthetic
ggcgcgccagtcctcagcgctatggctgcttatgagttgtccttatagttgttatcataaagcgaattggattggccatccggtgaaagtgagactcattatctatctgtttgctggatccgctccattgagtgtgtttactctaagtacaatttcaacagttatttcaatcagacaattgtatcatacgactcggaccgatg

SEQ ID NO: 14048 - DNA, 203 bp, Artificial sequence
  synthetic
ggcgcgccagtccttctcagtctggctgcttatggtgacaatcaaaaagttgttaccatatagctattggattggccatccggtgtgcaacagggcaattgtttacctatttattggttttgtaccattatcgaaattacggtacctcactctcaaattcattttgaccctcaacacaatcaaacatgcgactcggaccgatg

SEQ ID NO: 14049 - DNA, 203 bp, Artificial sequence
  synthetic
ggcgcgccagtccttctagcactggctgcttatggtgacaatcaaaaagttgttaccatatagctattggattggccatccggtgtgcaagtatcattaacaaaacctatttattggttttgtaccattatcactgaagtctgtgatcactctcaaattcattttgaccctcaacacaatcaaacatgcgactcggaccgatg

SEQ ID NO: 14050 - DNA, 203 bp, Artificial sequence
  synthetic
ggcgcgccagtcctgagcggcatggctgcttatggtgacaatcacagattgttatcataaagcgaattggattggccatccggtgaaagtatattcagacccagatctgtttgctggatccgctccattgagtgtgtttactctaagtacaatttcaacagttatttcaatcagacaattgtatcatacgactcggaccgatg

SEQ ID NO: 14051 - DNA, 203 bp, Artificial sequence
  synthetic
ggcgcgccagtcctggagccgctggctgcttatggtgacaatcacagattgttatcataaagcgaattggattggccatccggtgaaagtgagactcattatctatctgtttgctggatccgctccattgagtgtgtttactctaatactgcggagtttcgttatttcaatcagacaattgtatcatacgactcggaccgatg

SEQ ID NO: 14052 - DNA, 203 bp, Artificial sequence
  synthetic
ggcgcgccagtcctggcccttatggctgcttatgtctgtgcggcgggggttgttaccatatagctattggattggccatccggtgtgcaacagggcaattgtttacctatttattggttttgtaccattatcactgaagtctgtgatcactctcaaattcattttgaccctcaacacaatcaaacatgcgactcggaccgatg

SEQ ID NO: 14053 - DNA, 203 bp, Artificial sequence
  synthetic
ggcgcgccagtcctgctaagtatggctgtggcacacccaccggtggcacacccctccctcgggtccagttcagcccacagactcctgggacagtgaaggcactaccagcctctcctttgaggagtgttgcagcctttctgtgtgccagatgcctagtgaagaaaagctgaaaccctggagctttgtgccgactcggaccgatg

SEQ ID NO: 14054 - DNA, 203 bp, Artificial sequence
  synthetic
ggcgcgccagtccttctctagttggctgtggcacacccaccggtggcacacccctccctcgggtccagttcagccctacagtgggcttttggagagccagggccccagcctctcctttgaggagtgttgcagcctttctgtgtgccagatgcctagtgaagaaaagctgaaaccctggagctttgtgccgactcggaccgatg

SEQ ID NO: 14055 - DNA, 203 bp, Artificial sequence
  synthetic
ggcgcgccagtcctgttctaggtggctgtggcacacccaccggtggcacacccctccctcggtcgagtcatcatatacagactcctgggaggagagccagggccccagcctctcctttgaggagtgttgcagcctttctgtgtgccagatgcctagtgaagaaaagctgaaaccctggagctttgtgccgactcggaccgatg

SEQ ID NO: 14056 - DNA, 203 bp, Artificial sequence
  synthetic
ggcgcgccagtcctatgcattttggctgtggcaccagacagaagcagccacccctccctcgggtccagttcagcccacagactcctgggaggagagccagggccccagcctctcctttgaggagtgttgcagcctttctgtgtgccagatgcctagtgaagaaaagctgaaaccctggagctttgtgccgactcggaccgatg

SEQ ID NO: 14057 - DNA, 203 bp, Artificial sequence
  synthetic
ggcgcgccagtcctcattctcatgggacgccatcaataacaattggctctgtctctctcaccattgcaacagtatgcttcctcatgcagattgccatcctggtaactactgtgacattgcattttaagcaacatgagtgcgactcccccgcgagcaaccaagtaatgccgtgtgaaccaataataatacgactcggaccgatg

SEQ ID NO: 14058 - DNA, 203 bp, Artificial sequence
  synthetic
ggcgcgccagtccttgtaattatgggcgacagggccagcagtctcctcacagtgatcggatataagagtactgaggaccgtcgcctctagtcgaagatgagccggcccgaaggaaggaaaaaccgcggggggagagaagaggttctcgagcagtgggtgagcggaagaaagaagttagaggaactcgacgactcggaccgatg

SEQ ID NO: 14059 - DNA, 203 bp, Artificial sequence
  synthetic
ggcgcgccagtcctcacagttctgggcgacagggccagcagtctcctctttacagaaaagagggcctcagacagataccgtcgcctctagtcgaagatgagccggcccgaaggaaggaaaaaccgcggggggagagaagaggttctcgagcagtgggtgagcggaagaaagaagttagaggaactcgacgactcggaccgatg

SEQ ID NO: 14060 - DNA, 203 bp, Artificial sequence
  synthetic
ggcgcgccagtcctaagaatgctgggcgacagggccagcagtctcctctttacagaaaagagtaagagtactgaggaccgtcgcctctagtcgaagatgagccggcccgaaggaaggaaaaaccgcggggggagagaagaggttctcgagcagtgggtgagcggaagaaagaagttagaggaactcgacgactcggaccgatg

SEQ ID NO: 14061 - DNA, 203 bp, Artificial sequence
  synthetic
ggcgcgccagtcctgctgttaatgggcgacaggggggaggtatgatgttttacagaaaagagtaagagtactgaggaccgtcgcctctagtcgaagatgagccggcccgaaggaaggaaaaaccgcggggggagagaagaggttctcgagcagtgggtgagcggaagaaagaagttagaggaactcgacgactcggaccgatg

SEQ ID NO: 14062 - DNA, 203 bp, Artificial sequence
  synthetic
ggcgcgccagtcctaaatcgactggggagggggactgttttgtaacatccacgcagtacaccccaatctcccagttcatttcctaatccttaaactccggtttcaaactccctcgctttgctcttcagttgcaggttccgatctttgggtactccaggagctgttctatagcccctgcttctggacctcgactcggaccgatg

SEQ ID NO: 14063 - DNA, 203 bp, Artificial sequence
  synthetic
ggcgcgccagtcctgcgggtggtggggagggggagaacaagtattatcccacgcagtacaccccaatctcccagttcatttcctaatccttaaactccggtttcaaactccctcgctttgctcttcagttgcaggttccgatctttgggtactccaggagctgttctatagcccctgcttctggacctcgactcggaccgatg

SEQ ID NO: 14064 - DNA, 203 bp, Artificial sequence
  synthetic
ggcgcgccagtcctgcagtgagtggggagggggagaacaagtattatcccacgcagtacaccccaatctcccagttcatttcctaatccttaaactccggtttcaaactccctcgctttgctcttcagttgcaggttccgatctttgggtactccaggagctgttctatagcccgactgggacagtgacgactcggaccgatg

SEQ ID NO: 14065 - DNA, 203 bp, Artificial sequence
  synthetic
ggcgcgccagtcctcagcgtattggggagggggagaacaagtattatcccacgcagtacaccgagcggcatggaggcatttcctaatccttaaactccggtttcaaactccctcgctttgctcttcagttgcaggttccgatctttgggtactccaggagctgttctatagcccctgcttctggacctcgactcggaccgatg

SEQ ID NO: 14066 - DNA, 203 bp, Artificial sequence
  synthetic
ggcgcgccagtcctcaccaaggtggggcgatcctaccctgttcctccgcttcttcgttgggcgcatctcctggaactgggccgcgtccccgccgcctttccgtcatttcttcagatagctccccagctgtggaaaatgagcatcctcaagagaccccagaatccaacaatagcgtgtatacttccttccgactcggaccgatg

SEQ ID NO: 14067 - DNA, 203 bp, Artificial sequence
  synthetic
ggcgcgccagtcctttgtcacctggggtttcggtggtgaaaaaagtttttccccggggtctgggggtgacattgcaccgcgcccctcgtggggtcgcgttgccaccccacgcggactccccagctcgcgcgcccctcccatttgcctgtcctggtcaggcccccaccccccttcccacctgaccagcccgactcggaccgatg

SEQ ID NO: 14068 - DNA, 203 bp, Artificial sequence
  synthetic
ggcgcgccagtcctaacggccctggggtttcggttcccccccttccccgcttatccacgtacggggtgacattgcaccgcgcccctcgtggggtcgcgttgccaccccacgcggactccccagctcgcgcgcccctcccatttgcctgtcctggtcaggcccccaccccccttcccacctgaccagcccgactcggaccgatg

SEQ ID NO: 14069 - DNA, 203 bp, Artificial sequence
  synthetic
ggcgcgccagtcctgaggtcattggggtttcggttcccccccttccccttccccggggtctgattcgacgtcattgccgcgcccctcgtggggtcgcgttgccaccccacgcggactccccagctcgcgcgcccctcccatttgcctgtcctggtcaggcccccaccccccttcccacctgaccagcccgactcggaccgatg

SEQ ID NO: 14070 - DNA, 203 bp, Artificial sequence
  synthetic
ggcgcgccagtccttcctttgctggggtttcggttcccccccttccccttccccggggtctgggggtgacattgcaccgcgcccctcgtggggtcgcgttgccaccccacgcggactccccagctcgcgcgcccctcccatttgccacaaaactgttataccccaccccccttcccacctgaccagcccgactcggaccgatg

SEQ ID NO: 14071 - DNA, 203 bp, Artificial sequence
  synthetic
ggcgcgccagtcctaattacggtggggtttcggttcccccccttccccttccccggggtctgggggtgacattgcaccgcgcccctcgtggggtcgcgttgccaccccacgcggactccccagctcgcgcgcccctcccatttgcctgtcctggtcaggcccccaccccccttcccacctgaccagcccgactcggaccgatg

SEQ ID NO: 14072 - DNA, 203 bp, Artificial sequence
  synthetic
ggcgcgccagtcctggttcccttggggtttcggttcccccccttccccttccccggggtctgggggtgacattgcaccgcgcccctcgtggggtcgcgttgccattgatacgttctcgcccagctcgcgcgcccctcccatttgcctgtcctggtcaggcccccaccccccttcccacctgaccagcccgactcggaccgatg

SEQ ID NO: 14073 - DNA, 203 bp, Artificial sequence
  synthetic
ggcgcgccagtcctgagagttttggggtttcggttcccccccttccccttccccggggtctgggggtgacattgcagacgtgggggatcagggtcgcgttgccaccccacgcggactccccagctcgcgcgcccctcccatttgcctgtcctggtcaggcccccaccccccttcccacctgaccagcccgactcggaccgatg

SEQ ID NO: 14074 - DNA, 203 bp, Artificial sequence
  synthetic
ggcgcgccagtccttgctatcttgggtctagacaacttgatcattataaggctggtttgcatggatccaagaccataaatctaggatcctttacaatctcagaccctggtgcaaggttatatatagagcccaattctcctaattaaacagtgtctcaggttgacaaatggacaagttggatctagtcacgactcggaccgatg

SEQ ID NO: 14075 - DNA, 203 bp, Artificial sequence
  synthetic
ggcgcgccagtcctttcaaagttggtaacaggttaatactagcatacagagggagctgggtcctgtttactcccagtcctgccgatgaggattctgaccgtagacactgaattgtcccgtacctatccgtgctctttctgtgttctcaccagggctgagctcgaactgccacctctgccagcaggacccgactcggaccgatg

SEQ ID NO: 14076 - DNA, 203 bp, Artificial sequence
  synthetic
ggcgcgccagtcctggtaacactggtaacaggttccagggtaacagagacattcatcatcaactgtttactcccagtcctgccgatgaggattctgaccgtagacactgaattgtcccgtacctatccgtgctctttctgtgttctcaccagggctgagctcgaactgccacctctgccagcaggacccgactcggaccgatg

SEQ ID NO: 14077 - DNA, 203 bp, Artificial sequence
  synthetic
ggcgcgccagtcctcgaacttatggtaacaggttccagggtaacagaggagggagctgggtcctgtttactcccagtcctgccgatgaggattctgaccgtagacactgaattgtcccgtacctatccgtgcagacatccacaatccaccagggctgagctcgaactgccacctctgccagcaggacccgactcggaccgatg

SEQ ID NO: 14078 - DNA, 203 bp, Artificial sequence
  synthetic
ggcgcgccagtcctccggcacttggtaacaggttccagggtaacagaggagggagctgggtcctgtttactcccagtcctgccgatgaggattctgaccgtagacactgaattgtcccgtacctatccgtgctctttctgtgttctcaccagggctgagctcgaactgccacctaacaatctgccgtgcgactcggaccgatg

SEQ ID NO: 14079 - DNA, 203 bp, Artificial sequence
  synthetic
ggcgcgccagtcctggtcggaatggtaacaggttccagggtaacagaggagggagctgggtcctgtttactcccagtcctgccgatgaggattctgaccgtagacactgaattgtcccgtacctatccgtgctctttctgtgttctcaccagggctgagctcgaactgccacctctgccagcaggacccgactcggaccgatg

SEQ ID NO: 14080 - DNA, 203 bp, Artificial sequence
  synthetic
ggcgcgccagtcctgaggctgttggtaacaggttccagggtaacagaggagggagctgggtcctgtttactcccagtcctgccgatgaggattctgaccgtagattggtcgcgtataggtacctatccgtgctctttctgtgttctcaccagggctgagctcgaactgccacctctgccagcaggacccgactcggaccgatg

SEQ ID NO: 14081 - DNA, 203 bp, Artificial sequence
  synthetic
ggcgcgccagtcctgacatcgatggtattttttgggcctcgtgcttcgtggtgggagacccaggtcgaggtccgggtggggccggtgaggccgaataaaagcaaaggtgttggctcgggcctcttcgcgtggccggtgacgccttggctcccccgcaggtccggccgtagcacctccgcgccgtcgcccgactcggaccgatg

SEQ ID NO: 14082 - DNA, 203 bp, Artificial sequence
  synthetic
ggcgcgccagtcctcctctccgtggtattttttgggcctcgtgcttcgtggtgggagacccaggtcgaggtccgggtggggccggtgaggggttgggcgtcgggaggtgttggctcgggcctcttcgcgtggccggtgacgccttggctcccccgcaggttttatacatatcaatccgcgccgtcgcccgactcggaccgatg

SEQ ID NO: 14083 - DNA, 203 bp, Artificial sequence
  synthetic
ggcgcgccagtcctcctacgcatggtattttttgggcctcgtgcttcgtggtgggagacccaggtcgaggtccgggtggggccggtgaggggttgggcgtcgggaggtgttggctcggtaggacgtcttcatccggtgacgccttggctcccccgcaggtccggccgtagcacctccgcgccgtcgcccgactcggaccgatg

SEQ ID NO: 14084 - DNA, 203 bp, Artificial sequence
  synthetic
ggcgcgccagtcctattagaaatggtggggcgtcgttccgcgtgattgaagacaccccctcgtccaagaatgcaaagcacatccaataaaatagctggattataactcctcttctttctctgggggccgtggggtgggagctggggcgagaggtgccgttggcccccgttgcttttcctctgggaaggcgactcggaccgatg

SEQ ID NO: 14085 - DNA, 203 bp, Artificial sequence
  synthetic
ggcgcgccagtcctagaattgctggttcattagcaagcccagtgtttacagcacctctcacatccaggacgaccccatcctggcgctcactcttagtagtatggcttagtacgcattaggtggtaagccgagctctccctcggccttgttctgaatgcacacatgtctaggggctaaggatgtcctaccgactcggaccgatg

SEQ ID NO: 14086 - DNA, 203 bp, Artificial sequence
  synthetic
ggcgcgccagtcctccctcaagtggttttaacaggggtcctttcttggataaacccgctcaatgcccggagatttgggcgtgcccccgcgagactgctagccgagtagtgttgggtcgcgaaaggccttgtggtactgcctgatagggtgcttgcgagtgccccgggaggtctcgtagaccgtgcacccgactcggaccgatg

SEQ ID NO: 14087 - DNA, 203 bp, Artificial sequence
  synthetic
ggcgcgccagtccttacttctttgtaaggcccacctcatggtaaatcgaggtacccgcaggtaacaagagacactgtggatctgatctggggccacctacctctatcctggtgaggtggttaaaaaacgtctagtgggccaaacccaggggggatccctggtttccttattttagtgtaaatgtcattcgactcggaccgatg

SEQ ID NO: 14088 - DNA, 203 bp, Artificial sequence
  synthetic
ggcgcgccagtccttcccgaggtgtaaggcccacgaaggatgcccagaaggtacccgcaggtaacaagagacactgattcgtgaccagctggccacctacctctatcctggtgaggtggttaaaaaacgtctagtgggccaaacccaggggggatccctggtttccttattttagtgtaaatgtcattcgactcggaccgatg

SEQ ID NO: 14089 - DNA, 203 bp, Artificial sequence
  synthetic
ggcgcgccagtccttctgcatttgtaaggcccacgaaggatgcccagaaggtacccgcaggtaacaagagacactgtggatctgatctggggccacctacctctatcctggtgaggtggttaaaaaacgtctagtgggccaaacccaggggggatccctggtttccttattttaccagcgcacgttcccgactcggaccgatg

SEQ ID NO: 14090 - DNA, 203 bp, Artificial sequence
  synthetic
ggcgcgccagtcctgttcatactgtaaggcccacgaaggatgcccagaaggtacccgcaggttgtgtagagtcgattggatctgatctggggccacctacctctatcctggtgaggtggttaaaaaacgtctagtgggccaaacccaggggggatccctggtttccttattttagtgtaaatgtcattcgactcggaccgatg

SEQ ID NO: 14091 - DNA, 203 bp, Artificial sequence
  synthetic
ggcgcgccagtcctggacgttctgtaggcgcttatacagattttattatcttttccatcagattcatcatcaacagcatggaagcgagaaaccaaacagctatttcaaaattccttctcctgggactgatagaggatccggaactgcagcccgtccttttcagcctgttcctgtccatgtacttggtccgactcggaccgatg

SEQ ID NO: 14092 - DNA, 203 bp, Artificial sequence
  synthetic
ggcgcgccagtcctagtggccatgtcagagtgtctgggaagctcaaagccaaagtcctaatgtgcagtcaggtgaatttattgaaaaatttgaggctcctggtggtgcaaatcaaagaactgctcctcagtggatgttgcctttacttctaggcctgtacggaagtgttacttctgctctaaaagcttcgactcggaccgatg

SEQ ID NO: 14093 - DNA, 203 bp, Artificial sequence
  synthetic
ggcgcgccagtccttcgtatgttgtccatcgttaaaacgggatggggagctggaccaggtgacagcggcatggacatatgccccaggctttcctgctggggtccatccatgagcctgcaggtgccctcatggagccccagccctgccctggaagcttggctgagagcttcctggaggaggagcttcggcgactcggaccgatg

SEQ ID NO: 14094 - DNA, 203 bp, Artificial sequence
  synthetic
ggcgcgccagtcctagaaagactgtcccatttatccgtcaggtgacactatcctaaaggcagaagccttcaggtctgacccagccaatcaaagcattataccagaccatggaatgcataccaaacattattgacactaatgacacaagcccccttaaggcagaaaaaccaagagaacaataggccagacgactcggaccgatg

SEQ ID NO: 14095 - DNA, 203 bp, Artificial sequence
  synthetic
ggcgcgccagtcctactaacattgtcccatttatccgtcaggtgacactatcctaaaggcagaagccttcaggtctgacccagccaatcaaagcattataccagaccatggaatgcataccaaacattattgacactaatgacacacaaaattggttttaagaaaaaccaagagtgggtcgtttatctcgactcggaccgatg

SEQ ID NO: 14096 - DNA, 203 bp, Artificial sequence
  synthetic
ggcgcgccagtcctgacccaactgtcccatttatccgtcaggtgacactatcctaaaggcagaagccttcaggtctgacccagccaatcaaagcattataccagaccatggaatgcataccaaacattattgacactaatgacacacaaaattggttttatacgcctgtgcccaaacaataggccagacgactcggaccgatg

SEQ ID NO: 14097 - DNA, 203 bp, Artificial sequence
  synthetic
ggcgcgccagtcctcactttcctgtctgtggtaagtaggcagcctccagacagtttcttccgcttcctgtaccacccggctcaagtagcggaaggcctcagacctcctatcagcccgtcggcctccgggccctgcattctctagccatggaccgggaccttttgcggcagtcgctaaattgccacgggcgactcggaccgatg

SEQ ID NO: 14098 - DNA, 203 bp, Artificial sequence
  synthetic
ggcgcgccagtcctgagtgacgtgtctgtggtaagtaggcagcctccagacagtttcttccgcttcctgtaccacccggctcaagtagcggacacggaacagggaactatcagcccgtcggcctccgggccctgcattctctagccatggaccgggaccttttgcggcagtcgctaaattgccacgggcgactcggaccgatg

SEQ ID NO: 14099 - DNA, 203 bp, Artificial sequence
  synthetic
ggcgcgccagtccttggccctatgtctgtgtactgtgattgattataggacagtttcttccgcttcctgtaccacccggctcaagtagcggacacggaacagggaactatcagcccgtcggcctccgggccctgcattctctagccatggaccgggaccttttgcggcagtcgctaaattgccacgggcgactcggaccgatg

SEQ ID NO: 14100 - DNA, 203 bp, Artificial sequence
  synthetic
ggcgcgccagtccttttgagtgtgtctgtgtacttccggcagcctccagacagtttcttccgcttcctgtaccacccggctcaagtagcggacacggaacagggaactatcagcccgtcggcctccgggccctgcattctctagccatggaccgggaccttttgcggcagtcgcgcccagaatggtcacgactcggaccgatg

SEQ ID NO: 14101 - DNA, 203 bp, Artificial sequence
  synthetic
ggcgcgccagtccttcgggctttgtctgtgtacttccggcagcctccagacagtttcttccgcttcctgtaccacccggctcaagtagcggacacggaacagggaactatcagcccgtcggcctccgggccctgcattctctagccatggaccgggaccttttgcggcagtcgctaaattgccacgggcgactcggaccgatg

SEQ ID NO: 14102 - DNA, 203 bp, Artificial sequence
  synthetic
ggcgcgccagtccttgccacactgtctgtgtacttccggcagcctccagacagtttcttccgcttcctgtaccacccggctcaagtagcggacacggaacagggcctagggcagggtacggcctccgggccctgcattctctagccatggaccgggaccttttgcggcagtcgctaaattgccacgggcgactcggaccgatg

SEQ ID NO: 14103 - DNA, 203 bp, Artificial sequence
  synthetic
ggcgcgccagtcctaggatgcctgtctgtgtacttccggcagcctccagacagtttcttccgcttcctgtaccaccgccgggtttgtattgacacggaacagggaactatcagcccgtcggcctccgggccctgcattctctagccatggaccgggaccttttgcggcagtcgctaaattgccacgggcgactcggaccgatg

SEQ ID NO: 14104 - DNA, 203 bp, Artificial sequence
  synthetic
ggcgcgccagtccttgtattcctgtgagcatgagaccagtcttcaatgttagatcttgtttatttgtagtttccttttcaagtcagtggatctcagcgatgtacgctcaatgattccaatttttctgttcttgccttcaggttgtctattacactttcatgtcctctggacttaactctgtttcccatcgactcggaccgatg

SEQ ID NO: 14105 - DNA, 203 bp, Artificial sequence
  synthetic
ggcgcgccagtcctggagatcgtgtgagcatgaggtaccctgctctacttagatcttgtttatttgtagtttccttggttgtgacaatagtctcagcgatgtacgctcaatgattccaatttttctgttcttgccttcaggttgtctattacactttcatgtcctctggacttaactctgtttcccatcgactcggaccgatg

SEQ ID NO: 14106 - DNA, 203 bp, Artificial sequence
  synthetic
ggcgcgccagtccttgtccggttgtgagcatgaggtaccctgctctacttagatcttgtttatttgtagtttccttttcaagtcagtggatctcagcgatgtacgctcaatgattccaatttttctgttcttgccttcaggttgtcagcacgtagcagcagtcctctggacttaactctgtttcccatcgactcggaccgatg

SEQ ID NO: 14107 - DNA, 203 bp, Artificial sequence
  synthetic
ggcgcgccagtcctagaggtcctgtgagcatgaggtaccctgctctacttagatcttgtttatttgtagtttccttttcaagtcagtggatctcagcgatgtacgctcaatgattccaatttttctgttcttgccttcaggttgtctattacactttcatgtcctctggacttaactctgtttcccatcgactcggaccgatg

SEQ ID NO: 14108 - DNA, 203 bp, Artificial sequence
  synthetic
ggcgcgccagtcctcgttgtgttgtgagcatgaggtaccctgctctacttagatcttgtttatttgtagtttccttttcaagtcagtggatctcagcgatgtacgctcaatgattccacgcccctccacgccgccttcaggttgtctattacactttcatgtcctctggacttaactctgtttcccatcgactcggaccgatg

SEQ ID NO: 14109 - DNA, 203 bp, Artificial sequence
  synthetic
ggcgcgccagtcctccctgccgtgtgatcttattaaaattaggttaaatttcgaggttaaaaatagttttaatattatacgttagaatctggtcttgtatatttatacttaccacacaagatggaccggagcagccctccaatatctagtgtaccctcgtgctcgctcaaacattaagtggtgttgtgcgactcggaccgatg

SEQ ID NO: 14110 - DNA, 203 bp, Artificial sequence
  synthetic
ggcgcgccagtcctcgacggcatgtgatcttattaaaattaggttaaatttcgaggttaaaaatagttttaatattgctatagtcttagaggtcttgtatattttgctaactgcttacagatggaccggagcagccctccaatatctagtgtaccctcgtgctcgctcaaacattaagtggtgttgtgcgactcggaccgatg

SEQ ID NO: 14111 - DNA, 203 bp, Artificial sequence
  synthetic
ggcgcgccagtcctataccggctgtgcagacatcctaatacatagcacttatttctcttgctttacggcaggtgaagtaagaagagccatcagaggggaaaagttattgtcctgctgcaactatccccaagctcataaagcacaggtaccatcacttcaatacctagccctagttcgttattgtttgccgactcggaccgatg

SEQ ID NO: 14112 - DNA, 203 bp, Artificial sequence
  synthetic
ggcgcgccagtcctgagacgaatgtggattccatgcctctgacctgtccaggtgccctgtccagctgactgcaaggacagagaggagtcctgcccagctcttggatcagtctgctggccgaggagcccggtggagccaggggtgaccctggagcccagcctgccccgaggaggccccggctcagagcccgactcggaccgatg

SEQ ID NO: 14113 - DNA, 203 bp, Artificial sequence
  synthetic
ggcgcgccagtcctccaatctctgtgtattgtgtcgcgcgataaaggttagcatcgaatatcgttggagaattccaaattctacctgtgctaaccagattgaccatcacttgagtcatagtgcatgtagcgggagaccctatgggcgtgtctcaatttttatcgattattaagaaaaaacaggccagacgactcggaccgatg

SEQ ID NO: 14114 - DNA, 203 bp, Artificial sequence
  synthetic
ggcgcgccagtcctgttggcattgtgtattgtgtttatattatggaactagcatcgaatatcgttggagaattccaaattctacctgtgcgtggactcaaacgaatcacttgagtcatagtgcatgtagcgggagaccctatgggcgtgtctcaatttttatcgattattaagaaaaaacaggccagacgactcggaccgatg

SEQ ID NO: 14115 - DNA, 203 bp, Artificial sequence
  synthetic
ggcgcgccagtcctgtaagacatgtgtattgtgtttatattatggaactagcatcgaatatcgttggagaattccaaattctacctgtgctaaccagattgaccatcacttgagtcatagtgcatgtagcgggagaccctatgggcgtgtctcaatttttatcgattattaagagtggcagcaaagtccgactcggaccgatg

SEQ ID NO: 14116 - DNA, 203 bp, Artificial sequence
  synthetic
ggcgcgccagtcctcccttgcatgtgtattgtgtttatattatggaactagcatcgaatatcgttggagaattccatggcaccgactacgtaaccagattgaccatcacttgagtcatagtgcatgtagcgggagaccctatgggcgtgtctcaatttttatcgattattaagaaaaaacaggccagacgactcggaccgatg

SEQ ID NO: 14117 - DNA, 203 bp, Artificial sequence
  synthetic
ggcgcgccagtccttagaactatgttatctcggagttcggtgtcttttgacctgctgttgactgctcccagggggccctgacgccctggggcacttttgctctgcacaggaccacgctggggtttgccatggtgacataaaggggtgtagaggaaggaaggagcaagaccagcctgtagactgtgccccgactcggaccgatg

SEQ ID NO: 14118 - DNA, 203 bp, Artificial sequence
  synthetic
ggcgcgccagtcctgaatcctctgtttcatttcaggaagatatatgcgtcaggaaaatttctatcttcttttgtattatcaaggagatatttggagcagagtcatttgctaagaagggataaaataaaaaatggcatattcttggcaaacggatccaaatcctaatgaatcacacgaaaagcagtatgcgactcggaccgatg

SEQ ID NO: 14119 - DNA, 203 bp, Artificial sequence
  synthetic
ggcgcgccagtcctcttatgtgtgtttctggaaacatgatttgtttgatgtgttcaagattcagaccagtgtttcaagaacacggatgcagcagcagctcttctggcctctcacgccatccaggggaccttgtcctaccctcttgtgtccgtcgtcagtgaatctctgactcgaaaaggtactcagctcgactcggaccgatg

SEQ ID NO: 14120 - DNA, 203 bp, Artificial sequence
  synthetic
ggcgcgccagtcctaatcgtgttgtttctggaaattgacaaccgccagaccccgaggtcccgagaccagtgtttcaagaacacggatgcagcagcagctcttctggcctctcacgccatccaggggaccttgtcctaccctcttgtgtccgtcgtcagtgaatctctgactcgaaaaggtactcagctcgactcggaccgatg

SEQ ID NO: 14121 - DNA, 203 bp, Artificial sequence
  synthetic
ggcgcgccagtcctagcccagatgtttctggaaattgacaaccgccagtgtgttcaagattcagaccagtgtttcaagaacacggatgcagcagcagctcttctggcctctcacgccaaggccttatggcaatcctaccctcttgtgtccgtcgtcagtgaatctctgactcgaaaaggtactcagctcgactcggaccgatg

SEQ ID NO: 14122 - DNA, 203 bp, Artificial sequence
  synthetic
ggcgcgccagtcctggagtagttgtttctggaaattgacaaccgccagtgtgttcaagattcagaccagtgtttcaagaacacggatgcagcagcagctcttctggcctctcacgccactgtaaacgttagttcctaccctcttgtgtccgtcgtcagtgaatctctgactcgaaaaggtactcagctcgactcggaccgatg

SEQ ID NO: 14123 - DNA, 203 bp, Artificial sequence
  synthetic
ggcgcgccagtccttatcggattgtttctggaaattgacaaccgccagtgtgttcaagattcagaccagtgtttcaagaacacggatgcagcagcagctcttctggcctctcacgccatccaggggaccttgtcctaccctcttgtccaaacacctgcaaaatctctgactcgaaaaggtactcagctcgactcggaccgatg

SEQ ID NO: 14124 - DNA, 203 bp, Artificial sequence
  synthetic
ggcgcgccagtcctgcagtcgatgtttctggaaattgacaaccgccagtgtgttcaagattcagaccagtgtttcaagaacacggatgcagcagcagctcttctggcctctcacgccatccaggggaccttgtcctaccctcttgtgtccgtcgtcagtgaatctctgactcgaaaaggtactcagctcgactcggaccgatg

SEQ ID NO: 14125 - DNA, 203 bp, Artificial sequence
  synthetic
ggcgcgccagtcctagtgctgctgtttctggaaattgacaaccgccagtgtgttcaagattcagaccagtgtttcaagaacacggatgcagcagcagctcttctggcctctcacgccatccaggggaccttgtcctaccctcttgtgtccgtcgtcagtgaatctctgactcgactttagcgattatacgactcggaccgatg

SEQ ID NO: 14126 - DNA, 203 bp, Artificial sequence
  synthetic
ggcgcgccagtcctaacttgtctgtttctggaaattgacaaccgccagtgtgttcaagattcagaccagtgtttcaagaacacggatgcagcagcagctcttctggcctctcacgccatccaggggaccttgtcctaccctcttgtgtccgtcgtcagtgctatgtgttgaacgaaaggtactcagctcgactcggaccgatg

SEQ ID NO: 14127 - DNA, 203 bp, Artificial sequence
  synthetic
ggcgcgccagtcctcttccacttgtttctggaaattgacaaccgccagtgtgttcaagattcagaccagtgtttcaagaacacggatgcagcagcagctcttctggcctctcacgccatccaggggaccttgtcctaccctcttgttatgtcgcggcaataatctctgactcgaaaaggtactcagctcgactcggaccgatg

SEQ ID NO: 14128 - DNA, 203 bp, Artificial sequence
  synthetic
ggcgcgccagtcctaggtattgtgtttctggaaattgacaaccgccagtgtgttcaagattcagaccagtgtttcaagaacacggatgcagcagcagctcttcttattgtgagacgactccaggggaccttgtcctaccctcttgtgtccgtcgtcagtgaatctctgactcgaaaaggtactcagctcgactcggaccgatg

SEQ ID NO: 14129 - DNA, 203 bp, Artificial sequence
  synthetic
ggcgcgccagtcctgtcctacatgtttctggaaattgacaaccgccagtgtgttcaagattcagaccagtgtttcacttggttccgacaggcagcagctcttctggcctctcacgccatccaggggaccttgtcctaccctcttgtgtccgtcgtcagtgaatctctgactcgaaaaggtactcagctcgactcggaccgatg

SEQ ID NO: 14130 - DNA, 203 bp, Artificial sequence
  synthetic
ggcgcgccagtcctctctctcgtgtttctggaaattgacaaccgccagtgtgttcaagattcgagttgtgaacgagagaacacggatgcagcagcagctcttctggcctctcacgccatccaggggaccttgtcctaccctcttgtgtccgtcgtcagtgaatctctgactcgaaaaggtactcagctcgactcggaccgatg

SEQ ID NO: 14131 - DNA, 203 bp, Artificial sequence
  synthetic
ggcgcgccagtcctggtgctcatgttttggcttgcgagctgattgcccgctacatcaagctccggacagggaagacccgcaccaggaagcaggtctccagccacatccaggtgctggctcgtcgcaaagctcgcgagatccaggccaagctaaaggaccaggcagctaaggacaaggccctgcagagccgactcggaccgatg

SEQ ID NO: 14132 - DNA, 203 bp, Artificial sequence
  synthetic
ggcgcgccagtcctgacgcgtattaacgtggagccaagtaaacctgaattctggatatctcagggagctggcgatcataaattcaagttagcaaaagaaaaaaaaattgaaatgcttctctagataatgcttaaaggaccctgcagcagttcttggtattggacatagcatctcagctgttgcctcctcgactcggaccgatg

SEQ ID NO: 14133 - DNA, 203 bp, Artificial sequence
  synthetic
ggcgcgccagtcctggcttggtttaacgtggagccaagtaaacctgaattctggatatctcattttctaacttcggataaattcaagttagcaaaagaaaaaaaaattgaaatgcttctctagataatgcttgttctctgtaaatacagttcttggtattggacatagcatctcagctgttgcctcctcgactcggaccgatg

SEQ ID NO: 14134 - DNA, 203 bp, Artificial sequence
  synthetic
ggcgcgccagtcctctactagattaagaaaaactagtactaataccatttgattatgccaattttctcgagaaatcattcaattgaccatagactgaaagcgttgttacctagttcttcagaagagatcttattagaattaatttatatgatctaattcccttaaaaactgaataccaaaaaacaaaacgactcggaccgatg

SEQ ID NO: 14135 - DNA, 203 bp, Artificial sequence
  synthetic
ggcgcgccagtcctgactagggttaagaaaaacttaggacccaagtcctttaaacgtgcatgattgagatagtcagtggaacacagccggttgaatactagtgagtaaattaggagtagtagtattgaaccacctcatatcttatttcttctgaactgcattaaaatttgtacccaggatataacaaccgactcggaccgatg

SEQ ID NO: 14136 - DNA, 203 bp, Artificial sequence
  synthetic
ggcgcgccagtcctcttgcgttttaagaaaaacttaggacccaggtccttgattatgccaattttctcgagaaatctcgggtcctcgttaagactgaaagcgttgttacctagttcttcagaagagatcttattagaattaatttatatgatctaattcccttaaaaactgaataccaaaaaacaaaacgactcggaccgatg

SEQ ID NO: 14137 - DNA, 203 bp, Artificial sequence
  synthetic
ggcgcgccagtcctcgggtttgttaaggtgtcgtaacgtctcgtgacaccgggttcagttcagtcgagtggtggcgacccaatttaacacccattcttatataagaacacagtataatttaatcacaaaagacctcaaaaactgacacagcttgatccactcaacatataattgtaagattaataatacgactcggaccgatg

SEQ ID NO: 14138 - DNA, 203 bp, Artificial sequence
  synthetic
ggcgcgccagtcctcatcccacttaaggtgtcgtccttagcgcaacacccgggttcagttcaaatatcgacctctaacccaatttaacacccattcttatataagaacacagtataatttaatcacaaaagacctcaaaaactgacacagcttgatccactcaacatataattgtaagattaataatacgactcggaccgatg

SEQ ID NO: 14139 - DNA, 203 bp, Artificial sequence
  synthetic
ggcgcgccagtcctctcgaattttaatattcatttgtttaaatcttattttatttttaagctcaaactgcttaagacacttaggtggtaataaagtgaaataattttttgcaaaggggtttcctcgatttggagctttttttttcttccaccgtcatttctaactcttaaaaccaactcagttccatccgactcggaccgatg

SEQ ID NO: 14140 - DNA, 203 bp, Artificial sequence
  synthetic
ggcgcgccagtcctggatgcttttacatgctgcgttcccctgcctcagcttcctgagtagctgggattacaggctctgtgtgctccgggatggagcaggtgtgcagagggtgagaacccagctctgggaccaagtcacttgcttccttacttagcaagactatcgacttgagcaaacttggacctgggcgactcggaccgatg

SEQ ID NO: 14141 - DNA, 203 bp, Artificial sequence
  synthetic
ggcgcgccagtcctccttcctattacattgtacggctcaggaccgtggggagttggctgaaggacttggggagcccagaagctgccaccgaaccaagaaccacctctgtgcagaaaagcaaccaccttgttctctattctgctgcccgagacaaccacatcctcctcctcctacacccaaaggctccccgactcggaccgatg

SEQ ID NO: 14142 - DNA, 203 bp, Artificial sequence
  synthetic
ggcgcgccagtcctatatgaacttacgaagaaagtgtcccaaggcttcccagagcgaacctgtgcggctgcaggcaccggcgcgtcgagtttccggcgtccggaaggaccgagctcttctcgcggatccagtgttccgtttccagcccccaatctcagagcggagccgacagagagcagggaaccggccgactcggaccgatg

SEQ ID NO: 14143 - DNA, 203 bp, Artificial sequence
  synthetic
ggcgcgccagtcctgcctaagcttagttcccaggaacagaagtactgcgaatcttgtggcctcattctgaacaaaagggattagagaagaaaaatctcttgatataaggcttgaaagcaagggcaggcaatcttggttgtgaatattttctgatttttccagaaatcaagcagaagattgagctgctgcgactcggaccgatg

SEQ ID NO: 14144 - DNA, 203 bp, Artificial sequence
  synthetic
ggcgcgccagtccttgaatacgttatagcaaagttccatgggtccagccagccgcttccctgtgctgtgagtgtttccaccactccaggagacagcattcagagttgaccttgtgagagctggccataatttaattccatctctaggttttctgtcttattgtttcagaggcacatcgagaaccaacccgactcggaccgatg

SEQ ID NO: 14145 - DNA, 203 bp, Artificial sequence
  synthetic
ggcgcgccagtccttcaactggttatgaatacagggaccgcctaagagggcgtgcgctcccgacatgccccgccgcgcgccattaaccgccagatttgaatcgcgggacccgttggcagaggtggcggcggcggcatgggtgccccgacgttgccccctgcctggcagccctttctcaaggaccaccgcgactcggaccgatg

SEQ ID NO: 14146 - DNA, 203 bp, Artificial sequence
  synthetic
ggcgcgccagtcctataaatccttattgcatacccgtttttaataaaatacattgcataccctcttttaataaaaaatattgcatactttactcgttgcttgcgtcgttgcatacccaataaaagattattatattgcatacccgtttttaataaaatacattgcataccctcttttaataaaaaatacgactcggaccgatg

SEQ ID NO: 14147 - DNA, 203 bp, Artificial sequence
  synthetic
ggcgcgccagtcctacgtcaggttatttctgttgtttttgttgtattgttgagtcttcttgtgttttgttgtctttctacaggttgttgtggttgttgcaattgtttaacttcatcaatgcgaggctgttgtgattgtggttcaactaaacttccttattgtattagcagggtcgtccacgttcaatacgactcggaccgatg

SEQ ID NO: 14148 - DNA, 203 bp, Artificial sequence
  synthetic
ggcgcgccagtcctgctgggcgttatttctgttgtttttgttgtattgttgagtcttcttgtgttttgttgtcttttgtagaaaatggtaggttgttgcaattgtttaacttcatcaatgcgaggctgttgtgattgtggttcaactaaacttccttattacgaatttgaaaaggtccacgttcaatacgactcggaccgatg

SEQ ID NO: 14149 - DNA, 203 bp, Artificial sequence
  synthetic
ggcgcgccagtcctacctatgattcagtacgccaactattgtttgcgggaacacgccttctcagccccgccagcacttctaccctagccgggcccagcccccgagcagtgcagcctcccgagtgcagagtgcagcccctgcccgccctggcccagctgcccatgtctaccctgctggatcccaagtaacgactcggaccgatg

SEQ ID NO: 14150 - DNA, 203 bp, Artificial sequence
  synthetic
ggcgcgccagtcctcacatacgttcagtacgccacaagcgacacaaatgaacacgccttctcagccccgccagcacgagcggggcgttacggcccagcccccgagcagtgcagcctcccgagtgcagagtgcagcccctgcccgccctggcccagctgcccatgtctaccctgctggatcccaagtaacgactcggaccgatg

SEQ ID NO: 14151 - DNA, 203 bp, Artificial sequence
  synthetic
ggcgcgccagtcctagcttcccttcagtacgccacaagcgacacaaatgaacacgccttctcagccccgccagcacttctaccctagccgggcccagcccccgagcagtgcagcctcccgagtgcagagtgcagcccctgcccgccaccttgtttactttcatgtctaccctgctggatcccaagtaacgactcggaccgatg

SEQ ID NO: 14152 - DNA, 203 bp, Artificial sequence
  synthetic
ggcgcgccagtcctcagattagttcagtacgccacaagcgacacaaatgaacacgccttctcagccccgccagcacttctaccctagccgggcccagcccccgagcagtgcagcctcccgagtgcagagtgcagcccctgcccgccctggcccagctgcccatgtctaccctgcccacgtgtgctgcccgactcggaccgatg

SEQ ID NO: 14153 - DNA, 203 bp, Artificial sequence
  synthetic
ggcgcgccagtcctctcagctgttcagtacgccacaagcgacacaaatgaacacgccttctcagccccgccagcacttctaccctagccgggcccagcccccgagcagtgcagcctcccgagtgcagagtgcagcccctgcccgccctggcccagctgcccatgtctaccctgctggatcccaagtaacgactcggaccgatg

SEQ ID NO: 14154 - DNA, 203 bp, Artificial sequence
  synthetic
ggcgcgccagtccttgacttctttcagtacgccacaagcgacacaaatgaacacgccttctcagccccgccagcacttctaccctagccgggcccagcccccgagcagtgcagcctccgagagaaccccgagagcccctgcccgccctggcccagctgcccatgtctaccctgctggatcccaagtaacgactcggaccgatg

SEQ ID NO: 14155 - DNA, 203 bp, Artificial sequence
  synthetic
ggcgcgccagtcctgagaccggttcagtacgccacaagcgacacaaatgaacacgccttctcagccccgccagcacttctaccctagccgggcccagcccccgatgcaatacagtcgtcgagtgcagagtgcagcccctgcccgccctggcccagctgcccatgtctaccctgctggatcccaagtaacgactcggaccgatg

SEQ ID NO: 14156 - DNA, 203 bp, Artificial sequence
  synthetic
ggcgcgccagtcctggcggctcttcagtacgccacaagcgacacaaatgaacacgccttctcctataaattctagattctaccctagccgggcccagcccccgagcagtgcagcctcccgagtgcagagtgcagcccctgcccgccctggcccagctgcccatgtctaccctgctggatcccaagtaacgactcggaccgatg

SEQ ID NO: 14157 - DNA, 203 bp, Artificial sequence
  synthetic
ggcgcgccagtcctttcacatattcagtacgccacaagcgacacaaattcgtcttaaagaggagccccgccagcacttctaccctagccgggcccagcccccgagcagtgcagcctcccgagtgcagagtgcagcccctgcccgccctggcccagctgcccatgtctaccctgctggatcccaagtaacgactcggaccgatg

SEQ ID NO: 14158 - DNA, 203 bp, Artificial sequence
  synthetic
ggcgcgccagtcctattcgtagttcatcattctcaaattcttaggacgcggcctgttctttgggaacgctctcggaattggccgcggaaaccgatctgcccgttgtgtttgtgaaacagagaaagataggcggccatggtccaaccttgaaggcttatcaggagggcagacttcaaaagctactaaaacgactcggaccgatg

SEQ ID NO: 14159 - DNA, 203 bp, Artificial sequence
  synthetic
ggcgcgccagtcctcagctatcttcatcattctcaaattcttaggacggtcgggccctggaaggaacgctctcggaattggccgcggaaaccgatctgcccgttgtgtttgtgaaacagagaaagataggcggccatggtccaaccggatgcatacccttggagggcagacttcaaaagctactaaaacgactcggaccgatg

SEQ ID NO: 14160 - DNA, 203 bp, Artificial sequence
  synthetic
ggcgcgccagtccttatccatgttcattggacactggtgcgagccggtgatgccactcaacaatttctccaacatcttaacatccctgaagatatatatacaatatatatattagtgtcataatgcttggccataacgattctatatcatccaaccataaaactatcttaataaggttatgggacaaacgactcggaccgatg

SEQ ID NO: 14161 - DNA, 203 bp, Artificial sequence
  synthetic
ggcgcgccagtcctagcgtgttttcctcccaaggctaaactttctaataggacagccctacgtcgggggctcccggagcagggcgagagctcgcgtcgccggaaaggaagacgggaagaaagggcaggcggctcggcgggcgtcttctccactcctctgccgcgtccccgtggctgcagggagccggccgactcggaccgatg

SEQ ID NO: 14162 - DNA, 203 bp, Artificial sequence
  synthetic
ggcgcgccagtcctcataacgcttcctcccaaggctaaactttctaattcccttctttgggctcgggggctcccgggatcaccgtctgcgtcgcgtcgccggaaaggaagacgggaagaaagggcaggcggctcggcgggcgtcttctccactcctctgccgcgtccccgtggctgcagggagccggccgactcggaccgatg

SEQ ID NO: 14163 - DNA, 203 bp, Artificial sequence
  synthetic
ggcgcgccagtcctgcacaggattccttagtgactctaaataaagtaacagcagacatcgggctggggagtgactccgtgtgtgcccggccctcgtctcaccgcataaagtcttttgactcccttggatcacagtctttgcacactcggacttcaaaactagatgctcttagcaatcggagtttggaccgactcggaccgatg

SEQ ID NO: 14164 - DNA, 203 bp, Artificial sequence
  synthetic
ggcgcgccagtcctgggtccgattccttagtgactctaaataaagtaacagcagacatcgggctggggagtgactccgtgtgtgcccggccctcgtctcaccgcataaagtcttttgactcccttggatcacagtctttgcacactcggacttcaaaactgttccagggccagttatatctccacatacgactcggaccgatg

SEQ ID NO: 14165 - DNA, 203 bp, Artificial sequence
  synthetic
ggcgcgccagtcctgtccgtcgttccttagtgactctaaataaagtaacagcagacatcgggctggggagtgactccgtgtgtgcccggccctcgtctcaccgcataaagtcttttgactcccttggatcacgagaacgattgtgacggacttcaaaactgttccagggccagtatcggagtttggaccgactcggaccgatg

SEQ ID NO: 14166 - DNA, 203 bp, Artificial sequence
  synthetic
ggcgcgccagtcctgttgggtattccttagtgactctaaataaagtaagttttctggcacaactggggagtgactccgtgtgtgcccggccctcgtctcaccgcataaagtcttttgactcccttggatcacagtctttgcacactcggacttcaaaactgttccagggccagtatcggagtttggaccgactcggaccgatg

SEQ ID NO: 14167 - DNA, 203 bp, Artificial sequence
  synthetic
ggcgcgccagtcctgcctcactttcgacgcaggaggcggggctgctcagtcctccaggcgtcggtactcagcggtgaaatccagcatagccttgcttgcctgtgcgcgcgtgcgcggacatggcctcaaacgattatacccaacaagcaacccaaagctatggggcctaccccacccagcccgggcagcgactcggaccgatg

SEQ ID NO: 14168 - DNA, 203 bp, Artificial sequence
  synthetic
ggcgcgccagtccttgagcgtgttcgacgcaggaggcggggctgctcagtcctccaggcgtcggtactcagcggtgttggaacttcgttgcttgcttgcctgtgcgcgcgtgcgcggacatggcctcaaacgattatacccaacaacttctggtccctattggggcctaccccacccagcccgggcagcgactcggaccgatg

SEQ ID NO: 14169 - DNA, 203 bp, Artificial sequence
  synthetic
ggcgcgccagtcctactcgctcttcgacgcaggaggcggggctgctcagtcctccaggcgtcggtactcagcggtgttggaacttcgttgcttgcttgcctgtgcgcgcgtgcgcggacatggcctcaaacgattatacccaacaagcaacccaaagctatggggcctaccccatttttaaattatgtcgactcggaccgatg

SEQ ID NO: 14170 - DNA, 203 bp, Artificial sequence
  synthetic
ggcgcgccagtcctctttattgttcgacgcaggaggcggggctgctcagtcctccaggcgtcggtactcagcggtgttggaacttcgttgcttgcttgcctgtgtctcttacgctattcatggcctcaaacgattatacccaacaagcaacccaaagctatggggcctaccccacccagcccgggcagcgactcggaccgatg

SEQ ID NO: 14171 - DNA, 203 bp, Artificial sequence
  synthetic
ggcgcgccagtcctgggaagctttcgacgcaggaggcggggctgctcatgaaaggtctgcagggtactcagcggtgttggaacttcgttgcttgcttgcctgtgcgcgcgtgcgcggacatggcctcaaacgattatacccaacaagcaacccaaagctatggggcctaccccacccagcccgggcagcgactcggaccgatg

SEQ ID NO: 14172 - DNA, 203 bp, Artificial sequence
  synthetic
ggcgcgccagtcctgatcttatttcgcagctgttgtggtgtgtcgtaacgggcaactctgcagcggaaccgactactttgggtgtccgtgtttccttttattcctatattggctgcttatggtgacaatcaaaaagttgttaccatatagctattggattggccatccggtgtgcaacagggcaattgcgactcggaccgatg

SEQ ID NO: 14173 - DNA, 203 bp, Artificial sequence
  synthetic
ggcgcgccagtccttttcgtccttcgggctgggagcgtgctttccacgacggtgacacgcttccctggattggcagccagactgccttccgggtcactgccatggaggagccgcagtcagatcctagcgtcgagccccctctgagtatatgccaggacggagacctatggaaactacttcctgaaaaccgactcggaccgatg

SEQ ID NO: 14174 - DNA, 203 bp, Artificial sequence
  synthetic
ggcgcgccagtcctatcctaagttcgggctgggagcgtgctttccacgacggtgacacgcttccctggattggcagccagactgccttccgggtcactgccatggaggagccgcagtcagatcctagcgtcgagccccctctgagtcaggaaacattttcagacctatggaaacactgcttattcccgcgactcggaccgatg

SEQ ID NO: 14175 - DNA, 203 bp, Artificial sequence
  synthetic
ggcgcgccagtcctacgccgacttcgggctgggagcgtgctttccacgacggtgacacgcttccctggattggcagccagactgccttccgggtcactgccatggaggagccgcagtcagatcctagcgtcgagccccctctgagtcaggaaacattttcagacctatggaaactacttcctgaaaaccgactcggaccgatg

SEQ ID NO: 14176 - DNA, 203 bp, Artificial sequence
  synthetic
ggcgcgccagtcctacgtaccgttcgggctgggagcgtgctttccacgacggtgacacgcttccctggattggcagccagactgccttccgggtcactgccatggaggagccgcagtcagatcctagcgtcgagccccctctgagtcaggaaacattttcgcgtggcaccgccatacttcctgaaaaccgactcggaccgatg

SEQ ID NO: 14177 - DNA, 203 bp, Artificial sequence
  synthetic
ggcgcgccagtccttagtttctttcgggctgggagcgtgctttccacgacggtgacacgctttagctcgcgtttctccagactgccttccgggtcactgccatggaggagccgcagtcagatcctagcgtcgagccccctctgagtcaggaaacattttcagacctatggaaactacttcctgaaaaccgactcggaccgatg

SEQ ID NO: 14178 - DNA, 203 bp, Artificial sequence
  synthetic
ggcgcgccagtcctggccaaatttcgggctgggagcgtgctttccacgcgtaaactctatgcccctggattggcagccagactgccttccgggtcactgccatggaggagccgcagtcagatcctagcgtcgagccccctctgagtcaggaaacattttcagacctatggaaactacttcctgaaaaccgactcggaccgatg

SEQ ID NO: 14179 - DNA, 203 bp, Artificial sequence
  synthetic
ggcgcgccagtccttgtgtgggttctacatgtagaattaagttacaaaaaaacatgggacaagtgaaaatgtctcttcaagggattcacctgagtgatctatcatacaagcatgctatattaaaagagtctcagtatacaataaagagagatgtaggcacaacaacagcagtgacaccctcatcattgcgactcggaccgatg

SEQ ID NO: 14180 - DNA, 203 bp, Artificial sequence
  synthetic
ggcgcgccagtcctttctgttgttctcatgctatagtagtcgggcggggttgtgagacgccgcgctcagcttccatcgctgggcggtcaacaagtgcgggcctggctcagcgcgggggggcgcggagaccgcgaggcgaccgggagcggctgggttcccggctgcgcgcccttcggccaggccgggagcgactcggaccgatg

SEQ ID NO: 14181 - DNA, 203 bp, Artificial sequence
  synthetic
ggcgcgccagtcctgtgtcgtcttctctagtgcagtgcctggagatgaccaccaaacggaaaatcatcggccgtctggtgccatgccgataaaatttgatatccgaagaaatcatctcagttttagattactcccactgcagtcttcagcaggtgccaaaggaggtctttaacttcgaacgaacattacgactcggaccgatg

SEQ ID NO: 14182 - DNA, 203 bp, Artificial sequence
  synthetic
ggcgcgccagtcctgacctgaattctctagtgcagtgcctggagatgaccaccaaacggaaaatcccgttgtaactggtgccatgccgatgtttccgaggtgaagaagaaatcatctcagttttagatccacataactgcagtcttcagcaggtgccaaaggaggtctttaacttcgaacgaacattacgactcggaccgatg

SEQ ID NO: 14183 - DNA, 203 bp, Artificial sequence
  synthetic
ggcgcgccagtcctcccggaacttctctagtgcagtgcctggagatgaccaccaaacggaaaatcccgttgtaactggtgccatgccgatgtttccgaggtgaagaagaaatcatctcagttttagattactcccactgcagtcttcagcaggtgccaaaggaggtctttaacttcgaacgaacattacgactcggaccgatg

SEQ ID NO: 14184 - DNA, 203 bp, Artificial sequence
  synthetic
ggcgcgccagtcctgcgcaacgttctctagtgcagtgcctggagatgagttgatggacctggatcatcggccgtctggtgccatgccgatgtttccgaggtgaagaagaaatcatctcagttttagattactcccactgcagtcttcagcaggtgccaaaggaggtctttaacttcgaacgaacattacgactcggaccgatg

SEQ ID NO: 14185 - DNA, 203 bp, Artificial sequence
  synthetic
ggcgcgccagtcctctacgcggttctgctacagaacaactcccttggtacaataaaaaagacgagtatttacttttcattgaaagaatggagcttgcttgatatttcactagataaagaatttaaggcgagtatctatctttgttccttcgttactaacggagtctgcccttggaaacatcaggcacccgactcggaccgatg

SEQ ID NO: 14186 - DNA, 203 bp, Artificial sequence
  synthetic
ggcgcgccagtcctgtggcttattctgctacagaacaactcccttggtacaataaaaaagacgagtatttacttttcattgaaagaatggagcttgcttgatatttcactagataaagaatttaaggcgagtatctatctttgttctccttggcaactgagagtctgcccttggaaacatcaggcacccgactcggaccgatg

SEQ ID NO: 14187 - DNA, 203 bp, Artificial sequence
  synthetic
ggcgcgccagtcctgtgcagagttctgctacagaacaactcccttggtacaataaaaaagacgagtatttacttttcattgaaagaatggagcttgcttgatatttcactagataaaggtgagcttagttacatctatctttgttctccttggcaactgagagtctgcccttggaaacatcaggcacccgactcggaccgatg

SEQ ID NO: 14188 - DNA, 203 bp, Artificial sequence
  synthetic
ggcgcgccagtcctaacactacttctgctacagaactgggtatttggtacaataaaaaagacgagtatttacttttcattgaaagaatggagcttgcttgatatttcactagataaagaatttaaggcgagtatctatctttgttccatagccgcgatgagagtctgcccttggaaacatcaggcacccgactcggaccgatg

SEQ ID NO: 14189 - DNA, 203 bp, Artificial sequence
  synthetic
ggcgcgccagtcctccatacggttctgctacagaactgggtatttggtacaataaaaaagacgagtatttacttttcattgaaagaatggagcttgcttgatatttcactagataaagaatttaaggcgagtatctatctttgttctccttggcaactgagagtctgcccttggaaacatcaggcacccgactcggaccgatg

SEQ ID NO: 14190 - DNA, 203 bp, Artificial sequence
  synthetic
ggcgcgccagtcctcaattgtgttctggcacctacctacctgcttcccctacctttccccttagttggcccagagtcttaagattggggcagggtggagaggtgggctcttcctgcttcccactcatcttatagctttctttccccagatccgaattcgagatccaaaccaaggaggaaaggatatcacgactcggaccgatg

SEQ ID NO: 14191 - DNA, 203 bp, Artificial sequence
  synthetic
ggcgcgccagtccttcgtgcggttctggcacctacctacctgcttcccgctggggggtggggagttggcccagagtcttaagattggggcagggtggagaggtgggctcttcctgcttcccactcatcttatagctttctttccccagatccgaattcgagatccaaaccaaggaggaaaggatatcacgactcggaccgatg

SEQ ID NO: 14192 - DNA, 203 bp, Artificial sequence
  synthetic
ggcgcgccagtccttattgtgcttctggcacctacctacctgcttcccgctggggggtggggagttggcccagagtcttaagattggggcagggtggagaggtgggctcttcctgcttcccactcatcttatcctcggtggattgtagatccgaattcgagatccaaaccaaggaggaaaggatatcacgactcggaccgatg

SEQ ID NO: 14193 - DNA, 203 bp, Artificial sequence
  synthetic
ggcgcgccagtcctcctcaaacttctggcacctacctacctgcttcccgctggggggtggggtccctcaagttgcacttaagattggggcagggtggagaggtgggctcttcctgcttcccactcatcttatagctttctttccccagatccgaattcgagatccaaaccaaggaggaaaggatatcacgactcggaccgatg

SEQ ID NO: 14194 - DNA, 203 bp, Artificial sequence
  synthetic
ggcgcgccagtcctgtagaactttctgtccctccacccgtccccttccccaccctctggcccccaccttcttggaggcgacaacccccggcctagtgctcccaagatttttcccgcaggttgcgaagggaagcaaacttggtggcaacttgcctcccggtgcgggcgtctctcccccaccgtctcaaccgactcggaccgatg

SEQ ID NO: 14195 - DNA, 203 bp, Artificial sequence
  synthetic
ggcgcgccagtccttctcctgattctgtccctccacccgtccccttccccaccctctggcccccaccttcttggaggcgacaacccccgggaggcattagaagggatttttcccgcagacattcgcaaacgacaaacttggtggcaacttgcctcccggtgcgggcgtctctcccccaccgtctcaaccgactcggaccgatg

SEQ ID NO: 14196 - DNA, 203 bp, Artificial sequence
  synthetic
ggcgcgccagtcctagcgacctttctgtccctccacccgtccccttccccaccctctggcccccaccttcttggaggcgacaacccccgggaggcattagaagggatttttcccgcaggttgcgaagggaagcaaacttggtggcaacttgcctcccggtatctcgtatcgcaacccaccgtctcaaccgactcggaccgatg

SEQ ID NO: 14197 - DNA, 203 bp, Artificial sequence
  synthetic
ggcgcgccagtccttgaggcctttctgtccctccacccgtccccttccccaccctctggcccccaccttcttggaggcgacaacccccgggaggcattagaagggatttttcccgcaggttgcgaagggaagcaaacttggtggcaacttgcctcccggtgcgggcgtctctccaaactatagcatgacgactcggaccgatg

SEQ ID NO: 14198 - DNA, 203 bp, Artificial sequence
  synthetic
ggcgcgccagtccttgcctccattctgtccctcccgatcaggtacaagccaccctctggcccccaccttcttggaggcgacaacccccgggaggcattagaagggatttttcccgcaggttgcgaagggaagcaaacttggtggcaacttgcctcccggtgcgggcgtctctcccccaccgtctcaaccgactcggaccgatg

SEQ ID NO: 14199 - DNA, 203 bp, Artificial sequence
  synthetic
ggcgcgccagtcctcgcattacttcttcttccagaacacctctgaaagcttggtcaagggtacattttttttcattttcactgccaggtaactgactgaaggcagtcaacaacggcttgatatttttgttattcaaggcttctctgacgacgagaacgggtcgcgtccgcgcctccggcaaactgaaacgactcggaccgatg

SEQ ID NO: 14200 - DNA, 203 bp, Artificial sequence
  synthetic
ggcgcgccagtcctgagctagtttcttcttccagaacacctctgaaagcttggtcaagggtacattttttttcattttcactgccaggtatacccgacctccaggtcaacaacggcttgatatttttgttattcaaggcttctctggtagatttcgtaaatcgcgtccgcgcctccggcaaactgaaacgactcggaccgatg

SEQ ID NO: 14201 - DNA, 203 bp, Artificial sequence
  synthetic
ggcgcgccagtcctagaagccgttcttcttccagttgcttagctcgcccttggtcaagggtacattttttttcattttcactgccaggtaactgactgaaggcagtcaacaacggcttgatatttttgttattcaaggcttctctggtagatttcgtaaatcgcgtccgcgcctccggcaaactgaaacgactcggaccgatg

SEQ ID NO: 14202 - DNA, 203 bp, Artificial sequence
  synthetic
ggcgcgccagtcctgtactttgttctttaataccgaagggggatcttgggtgaaggtcagggcttgggcgctagctctccgaggcctgttctgaatcggtctccagaaatgctttgggttcatctttcattgctgcaaggaacttccatgcctctaacactcatcttcaaaagactgggactgctgagcgactcggaccgatg

SEQ ID NO: 14203 - DNA, 203 bp, Artificial sequence
  synthetic
ggcgcgccagtcctagtccgccttgaaaaggttacccaccccccgcagtaataaaggcccctgaacgtgtatgttggtctcccgggagctgcttgctgaagatccgcgcccctgtcgccgtctggtaggagctgtttgcagggtcctaactcaatcggcttgttgtgatgcgtatccccgtagatgcccgactcggaccgatg

SEQ ID NO: 14204 - DNA, 203 bp, Artificial sequence
  synthetic
ggcgcgccagtccttgaaaccattgaaattggctggcactgctgttgttaatttaagaccagatcaattaaatgatttagtttattctctgcccactttcctataattattagttcgcgatacgcgtaaagagatttttgttggtgatagtcttgtaaatacttgttagatctcattaaatctaaactcgactcggaccgatg

SEQ ID NO: 14205 - DNA, 203 bp, Artificial sequence
  synthetic
ggcgcgccagtcctgtttggacttgaagtgaagcattctatgaatgtgagctgaagaaatgaggacctcagttgggtgcaggtcattttacctgggacaaatacctaaaagaaacatgttcagtcccagcgcctgtccattgcttcaagcagtcctacacacctccaagcaacgagttcaagatcagtcgactcggaccgatg

SEQ ID NO: 14206 - DNA, 203 bp, Artificial sequence
  synthetic
ggcgcgccagtcctgcagattcttgaagtgaagcattctatgaatgtggagactttgcggcgatgaaatgaaataatgcaggtcattttacctgggacaaatacctaaaagaaacatgttcagtcccagcgcctgtccattgcttcaagcagtcctacacacctccaagcaacgagttcaagatcagtcgactcggaccgatg

SEQ ID NO: 14207 - DNA, 203 bp, Artificial sequence
  synthetic
ggcgcgccagtccttactaccattgcaatcaggtagctcgcggctcacgctgagagggacacgcagtgacgagcggccgaagcagctttgcggtgagagcacgctgggccgggggccgggcgggagcctggtggcgggtaacgccggactcgagggttttgtagtgcatccctgagcatgagcacagacgactcggaccgatg

SEQ ID NO: 14208 - DNA, 203 bp, Artificial sequence
  synthetic
ggcgcgccagtcctgattagatttgcatagaatggcggatggacctgcccgtcgcagatgacaacaccgtccacttcaattccaccctcatggctctgatccgcacagccctggacatcaagattgccaagggaggagccgacaaacagcagatggacgctgagctgcggaaggagatgatggcgattcgactcggaccgatg

SEQ ID NO: 14209 - DNA, 203 bp, Artificial sequence
  synthetic
ggcgcgccagtccttcttacttttgcctgttccactaggaatattgtttgcaaggcacaaggtgtcttttggtagtgagcgcgctctgcgcatgcgcaggtccaacattactgaggcacccagcagccgactaagttgcattccttgaatcttcgcagaaaagacaattcttttaatcagagttagtacgactcggaccgatg

SEQ ID NO: 14210 - DNA, 203 bp, Artificial sequence
  synthetic
ggcgcgccagtcctctcagagattgctgcatttcccacacggccataatgttactcccagccaatagaaagtgagcttcttgacaagtgccaaaatggcgatgcctaccacctagaactggattgtgcgctccatttctttcacctcaaagctggccgccaccgctgccacctgctcagagtgaaatacgactcggaccgatg

SEQ ID NO: 14211 - DNA, 203 bp, Artificial sequence
  synthetic
ggcgcgccagtcctagcagcttttgctgcatttctattggttggcgtttgttactcccagccaatagaaagtgagcccaccccgccatgccaaaatggcgatgcctaccacctagaactggattgtgcgctccatttctttcacctcaaagctggccgccaccgctgccacctgctcagagtgaaatacgactcggaccgatg

SEQ ID NO: 14212 - DNA, 203 bp, Artificial sequence
  synthetic
ggcgcgccagtcctctgcaatattgctgcatttctattggttggcgtttgttactcccagccaatagaaagtgagcttcttgacaagtgccaaaatggcgatgcctaccacctagaactggattgtgcgctctcgacagaggtgtccaaagctggccgccaccgctgccacctgctcagagtgaaatacgactcggaccgatg

SEQ ID NO: 14213 - DNA, 203 bp, Artificial sequence
  synthetic
ggcgcgccagtcctcggatcgcttgctgcatttctattggttggcgtttgttactcccagccaatagaaagtgagcttcttgacaagtgcttggtcaagccctgctaccacctagaactggattgtgcgctccatttctttcacctcaaagctggccgccaccgctgccacctgctcagagtgaaatacgactcggaccgatg

SEQ ID NO: 14214 - DNA, 203 bp, Artificial sequence
  synthetic
ggcgcgccagtcctctctgatcttgcttactctcgccggggcctccgggcggcgccgtgtccgcgaccgcgtaccctgacacccccgcggaattccctccgcacctccaggcgggtgcgatgcggcgccgcttttggggcgtattcaactgtctgtgcgccggcgcgttcggggccctggccgccgcccgactcggaccgatg

SEQ ID NO: 14215 - DNA, 203 bp, Artificial sequence
  synthetic
ggcgcgccagtcctgattcgccttggacaaatcaaaattataatttggttcagggcctccctccagcgacggccgaactgggctagccatgcccatagtaggactagcaaaacggagggactagccatagtggcgagctccctgggatcaaccgtggtctagtacaggacagtcgtcagtagttcgaccgactcggaccgatg

SEQ ID NO: 14216 - DNA, 203 bp, Artificial sequence
  synthetic
ggcgcgccagtcctcgatagatttggacaaatcaaaattataatttggttcagggcctccctccagcgacggccgaactgggctagccatgcccatagtaggactagcaaaacggagggactagccatagtggcgagctccctgggtggtctaagtcctgagtacaggacagtctggttccaactctgcgactcggaccgatg

SEQ ID NO: 14217 - DNA, 203 bp, Artificial sequence
  synthetic
ggcgcgccagtcctatccactattggacaaatcaaaattataatttggttcagggcctccctccagcgacggccgaactgggctagccatgcccatagtaggactagcaaaacggagggactagccatagtggcgagctccctgggtggtctaagtcctgcagtttaattgtatgtcagtagttcgaccgactcggaccgatg

SEQ ID NO: 14218 - DNA, 203 bp, Artificial sequence
  synthetic
ggcgcgccagtcctttcatcgcttggacaaatcaaaattataatttggttcagggcctccctccagcgacggccgaactgggctagccatgcccatagtaggactagcaaaacggaggttgagctggaccgtgcgagctccctgggtggtctaagtcctgagtacaggacagtcgtcagtagttcgaccgactcggaccgatg

SEQ ID NO: 14219 - DNA, 203 bp, Artificial sequence
  synthetic
ggcgcgccagtcctaggtaactttggagagttattgcgagggccaggtccgcgcctgccccgccaggcgaagcgaggcgacccgcgtgcggccatggcttcgctgctgggagcctacccttggcccgagggtctcgagtgcccggccctggacgccgagctgtcggatggacaatcgccgccggccgtcgactcggaccgatg

SEQ ID NO: 14220 - DNA, 203 bp, Artificial sequence
  synthetic
ggcgcgccagtcctgcattgtattggagtgaatgggaccccaggcagcagcgagtgacaggacgtctggacccgcgcgccgctagcagctctgccgggccgcggcggtgatcgatggggagcggctggagcggacccagcgagtgagggcgcacagccgggacgccgaggcggcgggcgggagacccgcgactcggaccgatg

SEQ ID NO: 14221 - DNA, 203 bp, Artificial sequence
  synthetic
ggcgcgccagtcctaatcacttttggatctttggcctgctgactcaaaacaactgagttgtaagacgttcatcgccgtgttatccttgagtaaagaatgaactctggaagcccagccagggacaatgcaccttcacagagattctgcactaatctgagtgaaggtctaaggtttggaatctccccctccgactcggaccgatg

SEQ ID NO: 14222 - DNA, 203 bp, Artificial sequence
  synthetic
ggcgcgccagtcctacaagcgcttgggagcgccagttccgtctgtgtgttcgagtggacaaaatggcgaagatcgccaagactcacgaagatattgaagcacagattcgagaaattcaaggcaagaaggcagaatccatgcttcggcaaggagtgggcctcgattctacaggttattatgaccaggaacgactcggaccgatg

SEQ ID NO: 14223 - DNA, 203 bp, Artificial sequence
  synthetic
ggcgcgccagtccttctctgagttgggagcgccagttccgtctgtgtgttcgagtggacaaaatggcgaagatcgccaagactcacgaagatattgaagcacagattcgagaaattcaaggcaagaaggcagctcttgatgaagctgttacttatctgggcgattctacaggttattatgaccaggaacgactcggaccgatg

SEQ ID NO: 14224 - DNA, 203 bp, Artificial sequence
  synthetic
ggcgcgccagtcctagttcctcttgggagcgccagttccgtctgtgtgttcgagtggacaaaatggcgaagatcgccaagactcacgaagtgtgccctcacttaattcgagaaattcaaggcaagaaggcagctcttgatgaagctcaaggagtgggcctcgattctacaggttattatgaccaggaacgactcggaccgatg

SEQ ID NO: 14225 - DNA, 203 bp, Artificial sequence
  synthetic
ggcgcgccagtcctcctggacattgggagcgccagttccgtctgtgtgttcgagtggacaaagcctacgccggtaacaagactcacgaagatattgaagcacagattcgagaaattcaaggcaagaaggcagctcttgatgaagctcaaggagtgggcctcgattctacaggttattatgaccaggaacgactcggaccgatg

SEQ ID NO: 14226 - DNA, 203 bp, Artificial sequence
  synthetic
ggcgcgccagtcctttacctacttgggcagagggactcttacaatgtagattgcggcggcccgcagcgggataaccttgaggctgaggcagtggctccttgcacagcagctgcacgcgccgtggctccggatctcttcgtctttgcagcgtagcccgagtcggtcagcgccggaggacctcagcagcccgactcggaccgatg

SEQ ID NO: 14227 - DNA, 203 bp, Artificial sequence
  synthetic
ggcgcgccagtcctggcacacgttgggcagagggcggggcggcggagggattgcggcggcccgcagcgggataacccaattatgtgtagggtggctccttgcacagcagctgcacgcgccgtggctccggatctcttcgtctttgcagcgtagcccgagtcggtcagcgccggaggacctcagcagcccgactcggaccgatg

SEQ ID NO: 14228 - DNA, 203 bp, Artificial sequence
  synthetic
ggcgcgccagtcctcccatttgttgggcagagggcggggcggcggagggattgcggcggcccgcagcgggataaccttgaggctgaggcagtggctccttgcacagcagctgcacgcgccgtggctccggatctcttcgtctttgcagcgtagcccgagtataatcctatgcagggacctcagcagcccgactcggaccgatg

SEQ ID NO: 14229 - DNA, 203 bp, Artificial sequence
  synthetic
ggcgcgccagtcctgggccggcttgggcagagggcggggcggcggagggattgcggcggcccgcagcgggataaccttgaggctgaggcagtggctccttgcacagcagctgcacgcgccgtggctccggatctcttcgtctttgcgtaaactgtacccgcggtcagcgccggaggacctcagcagcccgactcggaccgatg

SEQ ID NO: 14230 - DNA, 203 bp, Artificial sequence
  synthetic
ggcgcgccagtccttggagtagttgggcagagggcggggcggcggagggattgcggcggcccgcagcgggataaccttgaggctgaggcagtggctccttgcacagcagctgcacgcgtaaatttcatttcactcttcgtctttgcagcgtagcccgagtcggtcagcgccggaggacctcagcagcccgactcggaccgatg

SEQ ID NO: 14231 - DNA, 203 bp, Artificial sequence
  synthetic
ggcgcgccagtcctgtcgtcaattgggcagagggcggggcggcggagggattgcggcggcccgcagcgggataaccttgaggctgaggcatatcaattggatttagcagctgcacgcgccgtggctccggatctcttcgtctttgcagcgtagcccgagtcggtcagcgccggaggacctcagcagcccgactcggaccgatg

SEQ ID NO: 14232 - DNA, 203 bp, Artificial sequence
  synthetic
ggcgcgccagtcctctactgcgttggtgggggagccctgccctcctggacttaataagtgaggcactagaacgatcatgaacttctgaagggacccagctttctttgtgtgctccaagtgatttgcacaaataataatatatatatttattgaaggagagaatcagagcaagtgataatcaagttactcgactcggaccgatg

SEQ ID NO: 14233 - DNA, 203 bp, Artificial sequence
  synthetic
ggcgcgccagtccttgggcaacttggttttatttattcctccttcaacaaaagaaagccccagcgctctagagctcagctgacgggaaagggggtgcgcagcctcgagtttgagagctacccggagctccaagacaggggtgggttccagctgcccgcacgccccgaccttccatcgtaggccggacccgactcggaccgatg

SEQ ID NO: 14234 - DNA, 203 bp, Artificial sequence
  synthetic
ggcgcgccagtccttggtgtccttggttttatttcaagaagtcgatcaaaaagaaagccccagcgctctagagctcagctgacgggaaagggggtgcgcagcctcgagtttgagagctacccggagctccaaaggtaactgttccaccagctgcccgcacgccccgaccttccatcgtaggccggacccgactcggaccgatg

SEQ ID NO: 14235 - DNA, 203 bp, Artificial sequence
  synthetic
ggcgcgccagtcctactccagcttggttttatttcaagaagtcgatcaaaaagaaagccccagcgctctagagctcagctgacgggaaagggggtgcgcagcctcgagtttgagagctacccggagctccaagacaggggtgggttccagctgcccgcacgccccgaccttccacacatccaaatggtcgactcggaccgatg

SEQ ID NO: 14236 - DNA, 203 bp, Artificial sequence
  synthetic
ggcgcgccagtccttggcattcttgtattgctcttttttatatgttgttgtactggttgtggttctgcatgttttagtaaatgtcataattgttgtgatgagtatggtggtcatcatgattttgttatcaaaacatctcatgatgattagaatctcttgtcagatctcattaaacgcggttaccgggccgactcggaccgatg

SEQ ID NO: 14237 - DNA, 203 bp, Artificial sequence
  synthetic
ggcgcgccagtccttttgaaatttgtggggtagttcggcgggagtgttggaggtcggcgccggcccccgccttccgcgccccccacgggaaggaagcacccccggtattaaaacgaacggggcggaaagaagccctcagtcgccggccgggaggcgagccgatgccgagctgctccacgtccaccatgcgactcggaccgatg

SEQ ID NO: 14238 - DNA, 203 bp, Artificial sequence
  synthetic
ggcgcgccagtcctccggctgattgtgttggcaaatcaggcagcgcgtctgattcaattgtgttttacttgtcattatttttttagtaggacattatatcaaccagtttataaaatttttcttgcttaccaagattatatgcaaatagcacctgttccagctgaagtactaaatgtctaaactaaacgcgactcggaccgatg

SEQ ID NO: 14239 - DNA, 203 bp, Artificial sequence
  synthetic
ggcgcgccagtcctccaattaattgtgttggcaatgacctttattaaactgattcaattgtggggccaaaccacaaatttttttagtaggacattatatcaaccagtttataaaatttttcttgcttaccaagattatatgcaaatagcacctgttccagctgaagtactaaatgtctaaactaaacgcgactcggaccgatg

SEQ ID NO: 14240 - DNA, 203 bp, Artificial sequence
  synthetic
ggcgcgccagtcctccacttggttgtgttggcaatgacctttattaaactgattcaattgtgttttacttgtcattatttttttagtaggacattatatcaaccagtttataaaatttttcttgcttaccaagattatatgcaaatagcacctgttccagagatccctgactgggtctaaactaaacgcgactcggaccgatg

SEQ ID NO: 14241 - DNA, 203 bp, Artificial sequence
  synthetic
ggcgcgccagtcctgattgcgtttgttaagagaggcaggcggcccggcgcggtgtttacccgcggtgcatggtggggcggtctccttcggcaaccccggccgaacggccacccagaggctgtgctgagctggcgcagcggcagcagcatgagccggaccctcgcatcggccgtgcccctgtcgagtcccgactcggaccgatg

SEQ ID NO: 14242 - DNA, 203 bp, Artificial sequence
  synthetic
ggcgcgccagtcctagcgaaacttgttagatcttaggccgcatcgctatttataaaaacatccactccctgtaatctatgcttgtgggcgtagatttttcatagtggtgtttatattcatttctgctgttaacagctttcagccagggacgtgttgtatcctaggcagtggcccgcccataggtcacacgactcggaccgatg

SEQ ID NO: 14243 - DNA, 203 bp, Artificial sequence
  synthetic
ggcgcgccagtccttccggtcattgttagatctttttgtaatctaaacccatcgtccggtcacactccctgtaatctatgcttgtgggcgtagatttttcatagtggtgtttatattcatttctgctgttaacagctttcagccagggacgtgttgtatcctaggcagtggcccgcccataggtcacacgactcggaccgatg

SEQ ID NO: 14244 - DNA, 203 bp, Artificial sequence
  synthetic
ggcgcgccagtccttaaacgcgttgttagatctttttgtaatctaaactttataaaaacatccactccctgtaatctatgcttgtgggcgtagatttttcatagtggtgtttatattcatttctgctgttaacagctttcagccagtattagccaagcagctaggcagtggcccgcccataggtcacacgactcggaccgatg

SEQ ID NO: 14245 - DNA, 203 bp, Artificial sequence
  synthetic
ggcgcgccagtcctggaagaacttgtttttcccgcgaaactcggcggctgagcgtggaggttcttgtctcccctggtttgtgaagtgcggaaaaccagaggcgcttgtcgtgatttcatcgacgatcctggcattttctacagcgacagcttcgggggcgacgcccaggccgacgaggggcaggcccgcgactcggaccgatg

SEQ ID NO: 14246 - DNA, 203 bp, Artificial sequence
  synthetic
ggcgcgccagtcctaggtccatttgtttttcccgtcgccggtaagacttgagcgtggaggttcttgtctcccctggtttgtgaagtgcggaaaaccagaggcgcagtcatgtcgggattcgacgatcctggcattttctacagcgacagcttcgggggcgacgcccaggccgacgaggggcaggcccgcgactcggaccgatg

SEQ ID NO: 14247 - DNA, 203 bp, Artificial sequence
  synthetic
ggcgcgccagtcctttccctggtttaaaaacagaaaatgcaaagttggactgaaaatatccccacaagctgtttttatctgcttaaggcttccaaacttaccttaatttggtaagaaaataagctgccctatttttctttcttcttctcttacaactggaagcagccatttccccaaaccaccaccatcgactcggaccgatg

SEQ ID NO: 14248 - DNA, 203 bp, Artificial sequence
  synthetic
ggcgcgccagtcctggccacggtttacttctgtccgacagcgtgacgacgctagcctcggcttgggtaaggcgaggcggaattaaaccccgctccgagagcggcagcttcgcgcgcggtgcgctcggcctatgcctgccccgaggggcgtctggtaggcaccccgccctctcccgcagctcgaccccccgactcggaccgatg

SEQ ID NO: 14249 - DNA, 203 bp, Artificial sequence
  synthetic
ggcgcgccagtcctccggtgtatttacttctgtctcgtctgccccaacattcgtggcacaaatgggtaaggcgaggcggaattaaaccccgctccgagagcggcagcttcgcgcgcggtgcgctcggcctatgcctgccccgaggggcgtctggtaggcaccccgccctctcccgcagctcgaccccccgactcggaccgatg

SEQ ID NO: 14250 - DNA, 203 bp, Artificial sequence
  synthetic
ggcgcgccagtcctgggcatcatttacttctgtctcgtctgccccaaccgctagcctcggctgcccgttccacgctcggaattaaaccccgctccgagagcggcagcttcgcgcgcggtgcgctcggcctatgcctgccccgaggggcgtctggtaggcaccccgccctctcccgcagctcgaccccccgactcggaccgatg

SEQ ID NO: 14251 - DNA, 203 bp, Artificial sequence
  synthetic
ggcgcgccagtccttaccgcagtttacttctgtctcgtctgccccaaccgctagcctcggcttgggtaaggcgaggaatttaacccgggagctccgagagcggcagcttcgcgcgcggtgcgctcggcctatgcctgccccgaggggcgtctggtaggcaccccgccctctcccgcagctcgaccccccgactcggaccgatg

SEQ ID NO: 14252 - DNA, 203 bp, Artificial sequence
  synthetic
ggcgcgccagtccttaagtctatttacttctgtctcgtctgccccaaccgctagcctcggcttgggtaaggcgaggcggaattaaaccccgctccgagagcggcagcttcgcgcgcggcaattcttagtccggcctgccccgaggggcgtctggtaggcaccccgccctctcccgcagctcgaccccccgactcggaccgatg

SEQ ID NO: 14253 - DNA, 203 bp, Artificial sequence
  synthetic
ggcgcgccagtcctcacggatgtttacttctgtctcgtctgccccaaccgctagcctcggcttgggtaaggcgaggcggaattaaaccccgctccgagagcggcagcttcgcgcgcggtgcgctcggcctataaggcttagtccttgcgtctggtaggcaccccgccctctcccgcagctcgaccccccgactcggaccgatg

SEQ ID NO: 14254 - DNA, 203 bp, Artificial sequence
  synthetic
ggcgcgccagtccttaaagtaatttacttctgtctcgtctgccccaaccgctagcctcggcttgggtaaggcgaggcggaattaaaccccgctccgagagcggcagcttcgcgcgcggtgcgctcggcctatgcctgccccgagggaaagtaaaggcaacccccgccctctcccgcagctcgaccccccgactcggaccgatg

SEQ ID NO: 14255 - DNA, 203 bp, Artificial sequence
  synthetic
ggcgcgccagtccttgcaccggtttacttctgtctcgtctgccccaaccgctagcctcggcttgggtaaggcgaggcggaattaaaccccgctccgagagcggcagcttcgcgcgcggtgcgctcggcctatgcctgccccgaggggcgtctggtaggcaccccgccctctcccgcagctcgaccccccgactcggaccgatg

SEQ ID NO: 14256 - DNA, 203 bp, Artificial sequence
  synthetic
ggcgcgccagtcctacttgggttttacttctgtctcgtctgccccaaccgctagcctcggcttgggtaaggcgaggcggaattaaaccccgctccgagagcggcagcttcgcgcgcggtgcgctcggcctatgcctgccccgaggggcgtctggtaggcagatatgttcggggtgcagctcgaccccccgactcggaccgatg

SEQ ID NO: 14257 - DNA, 203 bp, Artificial sequence
  synthetic
ggcgcgccagtcctcgacacagtttacttctgtctcgtctgccccaaccgctagcctcggcttgggtaaggcgaggcggaattaaaccccgctccgagagcggcgatactcaaacatatgcgctcggcctatgcctgccccgaggggcgtctggtaggcaccccgccctctcccgcagctcgaccccccgactcggaccgatg

SEQ ID NO: 14258 - DNA, 203 bp, Artificial sequence
  synthetic
ggcgcgccagtcctgcgcccagtttagaagaggataaaagaatcagagctggaatgaaacacacaagaggaccaagtgcctttattccagagaaggaagttgtccaagcaaacacagtggatgaacgtactaactttcttgtggaagaatactctacatccggtcgtctggacaacatcacacaggtccgactcggaccgatg

SEQ ID NO: 14259 - DNA, 203 bp, Artificial sequence
  synthetic
ggcgcgccagtcctctgggtcgtttagaattagaatgtttcttagcgggaacccccactcaattatgtcataagtggataatttgttagctcctataacaaaagtctgttgcttgtgtttcacattttggatttcctaatataatgttctctttttagaaaaggtggacaagtcctattttcaagagacgactcggaccgatg

SEQ ID NO: 14260 - DNA, 203 bp, Artificial sequence
  synthetic
ggcgcgccagtccttcaggacgtttagaattagaatgtttcttagcggtcgtgtagttatttttatgtcataagtgccctgccgcgcctatcctataacaaaagtctgttgcttgtgtttcacattttggatttcctaatataatgttctctttttagaaaaggtggacaagtcctattttcaagagacgactcggaccgatg

SEQ ID NO: 14261 - DNA, 203 bp, Artificial sequence
  synthetic
ggcgcgccagtcctttctcggctttataacggtcgctaaggatgcccttcaggtaccccgaggtaacacgcgacactcgggatctgagaaggggactggggcttctataaaagcgctcggtttaaaaagcttctatgcctgaataggtgaccggaggtcggcacctttcctttacaattaatgaccctcgactcggaccgatg

SEQ ID NO: 14262 - DNA, 203 bp, Artificial sequence
  synthetic
ggcgcgccagtcctctccaacctttatcgaaggaggagctgctggtactcccgattggagacgtagaaccgttacttgtcgagggccttagcggccgccgtgaccctctcggggatcccacgatgttcttctacctgagcaagaaaatttccattcccaataacgtgaagctgcagtgtgtatcctggcgactcggaccgatg

SEQ ID NO: 14263 - DNA, 203 bp, Artificial sequence
  synthetic
ggcgcgccagtcctgtgcgaattttcaacaccagcgaacggcgacagatcattttggtgggattctcagattggccgcaactggagcccatcctgtttgtctttatttttattttctactccctaactctctttggcaacaccatcatcatcgctctctcctggctagaccttcggctgcacacacctcgactcggaccgatg

SEQ ID NO: 14264 - DNA, 203 bp, Artificial sequence
  synthetic
ggcgcgccagtcctagcgcgagtttcaacaccagttttgaagatggcttcattttggtgggattctcagattggccgcaactggagcccaagactagctataggatttttattttctactccctaactctctttggcaacaccatcatcatcgctctctcctggctagaccttcggctgcacacacctcgactcggaccgatg

SEQ ID NO: 14265 - DNA, 203 bp, Artificial sequence
  synthetic
ggcgcgccagtcctttatgtgatttcaacaccagttttgaagatggcttcattttggtgggattctcagattggccgcaactggagcccatcctgtttgtctttatttttattttctactccctaactctctaaacttgataatcaatcatcgctctctcctggctagaccttcggctgcacacacctcgactcggaccgatg

SEQ ID NO: 14266 - DNA, 203 bp, Artificial sequence
  synthetic
ggcgcgccagtcctatgtgagatttcaacaccagttttgaagatggcttcattttggtgggattctcagattggccgcaactggagcccatcctgtttgtctttatttttattttctactccctaactctctttggcaacaccatcatcatcgctctctcctggctagaccttccctacaggtattgccgactcggaccgatg

SEQ ID NO: 14267 - DNA, 203 bp, Artificial sequence
  synthetic
ggcgcgccagtcctctttggcgtttcaacaccagttttgaagatggcttcattttggtgggattctcagattggccgcaactggagcccatcctgtttgtctttatttttattttctactccctaactctctttggcaacaccatcccttattggggtcactggctagaccttcggctgcacacacctcgactcggaccgatg

SEQ ID NO: 14268 - DNA, 203 bp, Artificial sequence
  synthetic
ggcgcgccagtcctaattcgtttttcaagggataagaaaccctgcgacaaaacctcctccttttccaagcggctgccgaagatggcggaggtgcaggtcctggtgcttgatggtcgaggccatctcctgggccgcctggcggccatttgacaccttataggaagtacctggctttcctccgcaagcggcgactcggaccgatg

SEQ ID NO: 14269 - DNA, 203 bp, Artificial sequence
  synthetic
ggcgcgccagtcctagtattaatttcaagggatagctgggtggtatgtaaaacctcctccttttccaagcggctgccgaagatggcggaggtgcaggtcctggtgcttgatggtcgaggccatctcctgggccgcctggcggccatcgtggctaaacagtgaagtacctggctttcctccgcaagcggcgactcggaccgatg

SEQ ID NO: 14270 - DNA, 203 bp, Artificial sequence
  synthetic
ggcgcgccagtcctggtgtttctttcagcagcagaaagctatgccaagagtttgaaagaaagcaataaaattaacttttcttcattaggactcacagatgaagaaaaagaggctgcagaacactttctaaatgtgagtgacgacagtcaaaatgattatgagtaattaaaaaaggcattaggccacgtcgactcggaccgatg

SEQ ID NO: 14271 - DNA, 203 bp, Artificial sequence
  synthetic
ggcgcgccagtcctaggaacggtttcagcagcagaaagctatgccaagagtttgaaagaaagcaataaaattaacttttcttcattaggactcacagatgaagaaaaagaggctgcagtggtaaaatagttagtgagtgacgacagtcaaaatgattatgagtaattaaaaaagtgggacaagtcaaacgactcggaccgatg

SEQ ID NO: 14272 - DNA, 203 bp, Artificial sequence
  synthetic
ggcgcgccagtcctcacaagactttcatttgcaagttggagaacgagtatggccggctgacctgctttgccttgctggaccctagatatcacactctgaacaaggtcttgaagcatgaaaaaacaccgctgttccgtaaccaggtcatcattcctctggtgttgtctccagaccgagatgaagatctccgactcggaccgatg

SEQ ID NO: 14273 - DNA, 203 bp, Artificial sequence
  synthetic
ggcgcgccagtccttgtcgttttttcatttgcaagttggagaacgagtatggccggctgacctgctttgccttgctttctggacagctgaacactctgaacaaggtcttgaagcatgaaaaaacaccgctgttccgtaaccaggtcggaggcgtcggtaagttgtctccagaccgagatgaagatctccgactcggaccgatg

SEQ ID NO: 14274 - DNA, 203 bp, Artificial sequence
  synthetic
ggcgcgccagtcctttagccgatttccacacctggttgctgactaattatccgaagacacaagcatacttctgcctgctggggagcctggggactttccacaccctaactgacacacattccacagctggttctttccgcctcagaaggtacctaaccaagttcctctttcagaggttatttcaggcccgactcggaccgatg

SEQ ID NO: 14275 - DNA, 203 bp, Artificial sequence
  synthetic
ggcgcgccagtcctctcccaaatttccacacctggttgctgactaattgagatgcatgctttgcatacttctgcctgctggggagcctggggactttccacacctccctaaggtggggttccacagctggttctttccgcctcagaaggtacctaaccaagttcctctttcagaggttatttcaggcccgactcggaccgatg

SEQ ID NO: 14276 - DNA, 203 bp, Artificial sequence
  synthetic
ggcgcgccagtcctgtgtttagtttccacacctgtacatgattactgggagatgcatgctttgcatacttctgcctgctggggagcctggggactttccacaccctaactgacacacattccacagctggttctttccgcctcagaaggtacctaaccaagttcctctttcagaggttatttcaggcccgactcggaccgatg

SEQ ID NO: 14277 - DNA, 203 bp, Artificial sequence
  synthetic
ggcgcgccagtcctatgggctgtttctgatcagttaccaatctgtacatcaacacacaacaccaacagaagaccaacaaacaaaccaactcacccatccaaccaaacatctatacgccaatcagccaatccaaaactagccacccggaaaaaatagatactatagttacaaaaactatgcttatccgacgactcggaccgatg

SEQ ID NO: 14278 - DNA, 203 bp, Artificial sequence
  synthetic
ggcgcgccagtcctggaggcagtttgcaattttaagccagtgtttgggtttgagagacattgatttttctccccgtgctcccccgttcttccctgcggagtgcgctgcgccgcccagccctgtcgccccccggaggtgatccctccctcctgcctgcccgccagcctgacctgtgcccggctcgcgggcgactcggaccgatg

SEQ ID NO: 14279 - DNA, 203 bp, Artificial sequence
  synthetic
ggcgcgccagtcctctttaagctttgcaattttatattttgcaaatattttgagagacattgatttttctccccgtgctcccccgttcttccctgcggagtgcgctgcgccgcccagctaacaacaaaaatcgaggtgatccctccctcctgcctgcccgccagcctgacctgtgcccggctcgcgggcgactcggaccgatg

SEQ ID NO: 14280 - DNA, 203 bp, Artificial sequence
  synthetic
ggcgcgccagtcctaggcgtactttgcaattttatattttgcaaatattttgagagacattgatttttctccccgtgctcccccgttcttccctgcggagtgcggaaacttagtggttcctgtcgccccccggaggtgatccctccctcctgcctgcccgccagcctgacctgtgcccggctcgcgggcgactcggaccgatg

SEQ ID NO: 14281 - DNA, 203 bp, Artificial sequence
  synthetic
ggcgcgccagtcctccgggccctttgcctgctgccttccaagccaagcgctttaacaggagagcgtactgcggtcagtgcagcgagaggatatggggcctcgcgaggcaaggctacaggtgcatcaactgcaaactgctggtccataagcgctgccacggcctcgtcccgctgacctgcaggaagcatcgactcggaccgatg

SEQ ID NO: 14282 - DNA, 203 bp, Artificial sequence
  synthetic
ggcgcgccagtcctttcgtctgtttgccttggttaagccccatagaaacgaggcgtcacgtgccgaaaatccctttgcgtttcacagaaccatcctaaccatgggtgtagtatgggaactacaagccccttagattaggatctctcgtagagggataggtgtgccattcaaatccagggagtactctgcgactcggaccgatg

SEQ ID NO: 14283 - DNA, 203 bp, Artificial sequence
  synthetic
ggcgcgccagtcctgacggcggtttgccttggttaagccccatagaaacgaggcgtcacgtgccgaaaatccctttgcgtttcacagaaccatcctaaccatgggtgtagtatgggaatcgtgtatggggatgattaggatctctcgtagagggataggtgtgccattcaaatccagggagtactctgcgactcggaccgatg

SEQ ID NO: 14284 - DNA, 203 bp, Artificial sequence
  synthetic
ggcgcgccagtcctcaggaaattttgccttggttaagccccatagaaacgaggcgtcacgtgccgaaaatccctttgcgtttcacagaaccatcctaaccatgggtgtagtatgggaatcgtgtatggggatgattaggatctctcgtagagggataggtgtgccattcaaatctcacatactggacccgactcggaccgatg

SEQ ID NO: 14285 - DNA, 203 bp, Artificial sequence
  synthetic
ggcgcgccagtccttatgcttctttgccttggttaagccccatagaaacgaggcgtcacgtggattcttcagggccgcgtttcacagaaccatcctaaccatgggtgtagtatgggaatcgtgtatggggatgattaggatctctcgtagagggataggtgtgccattcaaatccagggagtactctgcgactcggaccgatg

SEQ ID NO: 14286 - DNA, 203 bp, Artificial sequence
  synthetic
ggcgcgccagtcctgtgtgctatttgccttggttttagtatggtatctcgaggcgtcacgtgccgaaaatccctttgcgtttcacagaaccatcctaaccatgggtgtagtatgggaatcgtgtatggggatgattaggatctctcgtagagggataggtgtgccattcaaatccagggagtactctgcgactcggaccgatg

SEQ ID NO: 14287 - DNA, 203 bp, Artificial sequence
  synthetic
ggcgcgccagtcctcaagttgatttgcttctcactttacattacgtaggtcatcggagcatgatagtaataattttggtgttgtaactagttttactacttatggtaatactgtttctgaggctgtgtctagattagttgaatcagcttctgaatttattgtttggcgtgcagaggcacttaataagtcgactcggaccgatg

SEQ ID NO: 14288 - DNA, 203 bp, Artificial sequence
  synthetic
ggcgcgccagtccttgaatgtatttgcttctcactttacattacgtagtcacgatatttcccatagtaataattttggtgttgtaactagacaggactaagtgcgtaatactgtttctgaggctgtgtctagattagttgaatcagcttctgaatttattgtttggcgtgcagaggcacttaataagtcgactcggaccgatg

SEQ ID NO: 14289 - DNA, 203 bp, Artificial sequence
  synthetic
ggcgcgccagtcctcgataacgtttgtctttactaggccaccgtctcgtcagcgttacggagtattttgtccgcctgccgccgccgtcccagatattaatcacggagttccagggagaaggaacttgtgaaatgggggagccggctggggttgccggcaccatggagtcaccttttagcccgggactccgactcggaccgatg

SEQ ID NO: 14290 - DNA, 203 bp, Artificial sequence
  synthetic
ggcgcgccagtcctgccgccactttgtctttactaggccaccgtctcgtcagcgttacggagtattttgtccgcctgccgccgccgtcccagatattaatcacggagttccagggagaaggaacttgtgaaatgggggagccggctggggttgccggcacgccacttatcgagattagcccgggactccgactcggaccgatg

SEQ ID NO: 14291 - DNA, 203 bp, Artificial sequence
  synthetic
ggcgcgccagtcctccaacggctttgtctttactctcagtatccaaactcagcgttacggagtattttgtccgcctgccgccgccgtcccagatattaatcacggagttccagggagaaggaacttgtgaaatgggggagccggctggggttgccggcaccatggagtcaccttttagcccgggactccgactcggaccgatg

SEQ ID NO: 14292 - DNA, 203 bp, Artificial sequence
  synthetic
ggcgcgccagtcctaacattggtttgtgtgtttggactagcggcaccatttgttcgtcacttgtcgacagcgccctgcgaattggtgtacccacaccgcgcggcttgcgaataatactttggagagtcttttgcctccagtgtcttccgtttgtactcgtcctcctctccctctccggccgggatgggcgactcggaccgatg

SEQ ID NO: 14293 - DNA, 203 bp, Artificial sequence
  synthetic
ggcgcgccagtccttgttgtaatttgtgtgtttgtttgttaccttgtgagacaattaacaaggtcgacagcgccctgcgaattggtgtacccacaccgcgcggcttgcgaataatactttggagagtcttttgcctccagtgtcttccgtttgtactcgtcctcctctccctctccggccgggatgggcgactcggaccgatg

SEQ ID NO: 14294 - DNA, 203 bp, Artificial sequence
  synthetic
ggcgcgccagtcctggtttcggtttgtgtgtttgtttgttaccttgtgtttgttcgtcacttcgtttgtaacaatcgcgaattggtgtacccacaccgcgcggcttgcgaataatactttggagagtcttttgcctccagtgtcttccgtttgtactcgtcctcctctccctctccggccgggatgggcgactcggaccgatg

SEQ ID NO: 14295 - DNA, 203 bp, Artificial sequence
  synthetic
ggcgcgccagtcctttattcggtttgtgtgtttgtttgttaccttgtgtttgttcgtcacttgtcgacagcgccctgcgaattggtgtacccacaccgcgcggcgatgtgggctcggcttggagagtcttttgcctccagtgtcttccgtttgtactcgtcctcctctccctctccggccgggatgggcgactcggaccgatg

SEQ ID NO: 14296 - DNA, 203 bp, Artificial sequence
  synthetic
ggcgcgccagtccttcgagagatttgtgtgtttgtttgttaccttgtgtttgttcgtcacttgtcgacagcgccctgcgaattggtgtacccacaccgcgcggcttgcgaataatactttggagagtcttttgcctccagtgtcttccgtttgtactcgtaacatgtcgaggtcccggccgggatgggcgactcggaccgatg

SEQ ID NO: 14297 - DNA, 203 bp, Artificial sequence
  synthetic
ggcgcgccagtcctgaaagctgtttgtgtgtttgtttgttaccttgtgtttgttcgtcacttgtcgacagcgccctgcgaattggtgtacccacaccgcgcggcttgcgaataatactttggagagtcttttgcctccagtgtcttccgtttgtactcgtcctcctctccctcttgtaaacaagcccacgactcggaccgatg

SEQ ID NO: 14298 - DNA, 203 bp, Artificial sequence
  synthetic
ggcgcgccagtcctcatttaaatttgtgtgtttgtttgttaccttgtgtttgttcgtcacttgtcgacagcgccctgcgaattggtgtacccacaccgcgcggcttgcgaataatactttggagagtcttttgcctccagtgtcttgtaaagcctacgagcctcctctccctctccggccgggatgggcgactcggaccgatg

SEQ ID NO: 14299 - DNA, 203 bp, Artificial sequence
  synthetic
ggcgcgccagtcctaatcgaactttgttcaccacatcagtcaccctttattctggtcccatgcgtcctctgcccaagaaacacgtagaacccatggcagtgcgacagctgcttcttggcaactccaccatgatcaggcacacttgtcccatgtctgtcccgttgagccggcaagtcaaggaagttgctcgactcggaccgatg

SEQ ID NO: 14300 - DNA, 203 bp, Artificial sequence
  synthetic
ggcgcgccagtccttcattccttttgttcaccaccattcctggtgcccattctggtcccatgatagagagtgaagcgaaacacgtagaacccatggcagtgcgacagctgcttcttggcaactccaccatgatcaggcacacttgtcccatgtctgtcccgttgagccggcaagtcaaggaagttgctcgactcggaccgatg

SEQ ID NO: 14301 - DNA, 203 bp, Artificial sequence
  synthetic
ggcgcgccagtcctgtaaaccgtttgttcaccaccattcctggtgcccattctggtcccatgcgtcctctgcccaagaaacacgtagaacccatggcagtgcgaagcacctgagactacaactccaccatgatcaggcacacttgtcccatgtctgtcccgttgagccggcaagtcaaggaagttgctcgactcggaccgatg

SEQ ID NO: 14302 - DNA, 203 bp, Artificial sequence
  synthetic
ggcgcgccagtccttctcagtctttgttcaccaccattcctggtgcccattctggtcccatgcgtcctctgcccaagaaacacgtagaacccatggcagtgcgacagctgcttcttggcaactccaccatgatcaggcacacttgtttgtccctgaaaaggttgagccggcaagtcaaggaagttgctcgactcggaccgatg

SEQ ID NO: 14303 - DNA, 203 bp, Artificial sequence
  synthetic
ggcgcgccagtcctcgaagatgtttgttcaccaccattcctggtgcccattctggtcccatgcgtcctctgcccaagaaacacgtagaacccatggcagtgcgacagctgcttcttggtggacggggacgcttcaggcacacttgtcccatgtctgtcccgttgagccggcaagtcaaggaagttgctcgactcggaccgatg

SEQ ID NO: 14304 - DNA, 203 bp, Artificial sequence
  synthetic
ggcgcgccagtccttcctcttatttgttcaccaccattcctggtgcccattctggtcccatgcgtcctctgcccaatttggttcctacttccatggcagtgcgacagctgcttcttggcaactccaccatgatcaggcacacttgtcccatgtctgtcccgttgagccggcaagtcaaggaagttgctcgactcggaccgatg

SEQ ID NO: 14305 - DNA, 203 bp, Artificial sequence
  synthetic
ggcgcgccagtccttgatggcgtttgttcaccaccattcctggtgccccggagtaagttcgccgtcctctgcccaagaaacacgtagaacccatggcagtgcgacagctgcttcttggcaactccaccatgatcaggcacacttgtcccatgtctgtcccgttgagccggcaagtcaaggaagttgctcgactcggaccgatg

SEQ ID NO: 14306 - DNA, 203 bp, Artificial sequence
  synthetic
ggcgcgccagtcctagtcatctttttacagatatgtctgctatgtggggacgataagtcgagttccccgggataagcctcactcgtcccctctcggggggcggaacacccacctgctagccccgctgctctctttgctttcctcctcgcttcggtctcccccaactcctagcatcccctcctatcgctcgactcggaccgatg

SEQ ID NO: 14307 - DNA, 203 bp, Artificial sequence
  synthetic
ggcgcgccagtccttgtaattattttacttctgaacgaaatggagaaagatcgggtagtaggcttcagacttgaacaagaaactgggtctcactatgttgcccaggttgatattgaactcctggactcaagcaaccctccctctttggcctctgaaagtactgggattacaagcataagccaccgggccgactcggaccgatg

SEQ ID NO: 14308 - DNA, 203 bp, Artificial sequence
  synthetic
ggcgcgccagtcctacatctgcttttagatttaagtaagtttgaatgtaaacataaagccactgttgttgttacaccagctcgcgccctcgtaaatgatatggttttgagtttgattaagagtggtaggttgttgttacgcaataatggtcgttttggtggttttagtaatcatttagtctcaactaacgactcggaccgatg

SEQ ID NO: 14309 - DNA, 203 bp, Artificial sequence
  synthetic
ggcgcgccagtcctaagaatgcttttagatttaagtaagtttgaatgtaaacataaagccactgttgttgttacacttaaagatagtgatgtaaatgatatggttttgagtttgattaagagtggtaggttgttgttacgcaataagctcgtgaagttccgttttagtaatcatttagtctcaactaacgactcggaccgatg

SEQ ID NO: 14310 - DNA, 203 bp, Artificial sequence
  synthetic
ggcgcgccagtcctcgtggttattttagatttaagtaagtttgaatgtaaacataaagccactgttgttgttacacttaaagatagtgatgtaaatgatatggttttgagtttgattattctcccaccagacttgttacgcaataatggtcgttttggtggttttagtaatcatttagtctcaactaacgactcggaccgatg

SEQ ID NO: 14311 - DNA, 203 bp, Artificial sequence
  synthetic
ggcgcgccagtccttcatagtgttttataataatcgccggcgctcgcaggccgcggatgaagaagaaaacccggcgccgctcgacccggagcgaggagttgacccggagcgaggagttgaccctgagtgaggaagcgacctggagtgaagaggcgacccagagtgaggaggcgacccagggcgaagagcgactcggaccgatg

SEQ ID NO: 14312 - DNA, 203 bp, Artificial sequence
  synthetic
ggcgcgccagtccttaacgcccttttgaagtattatttttatgaatcaagccctggaaaaggacaagatatttgaaatgctctcgtaaagtaatggagaacttcacagttgctactcctgtgataggtttatcttagtttcattgtggtataaatggaatagcaggtgttgtcaggtacaaggtttgtcgactcggaccgatg

SEQ ID NO: 14313 - DNA, 203 bp, Artificial sequence
  synthetic
ggcgcgccagtcctgaggcaccttttgaagtattatttttatgaatcaagccctggaaaaggacaagatatttgaatgaaatagcacccataatggagaacttcacagttgctactcctgtgataggtttatcttagtttcattgtggtataaatggaatagcaggtgttgtcaggtacaaggtttgtcgactcggaccgatg

SEQ ID NO: 14314 - DNA, 203 bp, Artificial sequence
  synthetic
ggcgcgccagtcctcaccaaggttttgaagtattatttttatgaatcaagccctggaaaaggcgccaggccccttctgaaatagcacccataatggagaacttcacagttgctactcctgtgataggtttatcttagtttcattgtggtataaatggaatagcaggtgttgtcaggtacaaggtttgtcgactcggaccgatg

SEQ ID NO: 14315 - DNA, 203 bp, Artificial sequence
  synthetic
ggcgcgccagtcctttgtcaccttttgaagtattccgcaacaagcaacagccctggaaaaggacaagatatttgaatgaaatagcacccataatggagaacttcacagttgctactcctgtgataggtttatcttagtttcattgtggtataaatggaatagcaggtgttgtcaggtacaaggtttgtcgactcggaccgatg

SEQ ID NO: 14316 - DNA, 203 bp, Artificial sequence
  synthetic
ggcgcgccagtcctgctcagcttttttcatctaacctctgagctgagtttgaggccgtccccgactccttcctcccccttccctcccccttttttttgttttccgttcccctttcccctcccttccctatccccgacgaccggatcctgaggaggcagctgcggtggcagctgctgagttctcggtgacgactcggaccgatg

SEQ ID NO: 14317 - DNA, 203 bp, Artificial sequence
  synthetic
ggcgcgccagtcctaggctcttctaacaatttccggcgggtgagattttcccggcgggtattctatagccggcgggtggcaaaataccggcgggttaggaggagccggcgggtgaacaaattccggcgggttacatttagccggcgggtatgaaaattccggcgggtaatgtatatccggcgggttttcgactcggaccgatg

SEQ ID NO: 14318 - DNA, 203 bp, Artificial sequence
  synthetic
ggcgcgccagtcctagtaaagttgagaaaaacaccggccgtcattaagaaaccggccgtttcgtagtgaccggccgttggaaggagaccggccgtttcagcttgaccggccgtttgttacttaccggccgttttttgaaaaccggccgtacaaggtagaccggccgtatatccaaaaccggccgtgatcgactcggaccgatg

SEQ ID NO: 14319 - DNA, 203 bp, Artificial sequence
  synthetic
ggcgcgccagtcctagctctgtatagaaaaactatgaagaacattaagaagatctttctttcgtagtgttcttttactggaaggagtactcccatttcagcttgtactcccaattgttactttactccccctttttgaaatactcccacacaaggtagtactcccttatatccaaatactcccttgatcgactcggaccgatg

SEQ ID NO: 14320 - DNA, 203 bp, Artificial sequence
  synthetic
ggcgcgccagtccttgacgattctagaaaaactatgaagaacattaagaagatctttctttcgtagtgttcttttactggaaggagtattccaatttcagcttgttggattaattgttacttaaattgtcctttttgaaaccggcgggtacaaggtagccggcgggtatatccaaaccggcgggtgatcgactcggaccgatg

SEQ ID NO: 14321 - DNA, 203 bp, Artificial sequence
  synthetic
ggcgcgccagtcctaggcttacaaagaaaaactatgaagaacattaagaagatctttctttcgtagtgttcttttactggaaggagtattccaatttcagcttgttggattaattgttacttaaattgtcctttttgaaattaattcacacaaggtagccggcgggtatatccaaaccggcgggtgatcgactcggaccgatg

SEQ ID NO: 14322 - DNA, 203 bp, Artificial sequence
  synthetic
ggcgcgccagtcctacttaagcctagaaaaactatgaagaacattaagaagatctttctttcgtagtgttcttttactggaaggagtattccaatttcagcttgttggattaattgttacttaaattgtcctttttgaaattaattcacacaaggtagcgtcaattcctttacaaaataaattttgatcgactcggaccgatg

SEQ ID NO: 14323 - DNA, 203 bp, Artificial sequence
  synthetic
ggcgcgccagtccttggtgagccaagaaaaactatgaagaacattaagaagatctttctttcgtagtgttcttttactggaaggagtattccaatttcagcttgttggattaattgttacttaaattgtcctttttgaaattaattcacacaaggtagtactcccttatatccaaatactcccttgatcgactcggaccgatg

SEQ ID NO: 14324 - DNA, 203 bp, Artificial sequence
  synthetic
ggcgcgccagtccttagtttgcaaagaaaaactatgaagaacattaagaagatctttctttcgtagtgttcttttactggaaggagtattccaatttcagcttgttggattaattgttacttaaattgtcctttttgaaattaattcacacaaggtagtttaaatttatatccaaattcttggcaaatcgactcggaccgatg

SEQ ID NO: 14325 - DNA, 203 bp, Artificial sequence
  synthetic
ggcgcgccagtcctaacgaaagagagacagggaacctgagcaaccaggcaaagaagacacctagggatcgtcaattcctttaagaccgtcaattcctttaataccgtcaattcctttaccatcgtcaattcctttatccccgtcaattcctttacagacgtcaattcctttaagccctagataactagcgactcggaccgatg

SEQ ID NO: 14326 - DNA, 203 bp, Artificial sequence
  synthetic
ggcgcgccagtcctaacagacagtagacagggaacctgagcaaccaggcaaagaagacacctagggatggaagacctccactagacaaagaccagtgcgcataccacggaatcgagaaccatcacggaatcgagaatccccacggaatcgagaacagacacggaatcgagaaagccctagataactagcgactcggaccgatg

SEQ ID NO: 14327 - DNA, 203 bp, Artificial sequence
  synthetic
ggcgcgccagtccttgtaaaccgtagacagggaacctgagcaaccaggcaaagaagacacctagggatggaagacctccactagacaaagaccagtgcgcatactactcccagaagggccattactcccgagaatgtccctactcccaacacgtcagatactcccaggttctagcctactcccactagcgactcggaccgatg

SEQ ID NO: 14328 - DNA, 203 bp, Artificial sequence
  synthetic
ggcgcgccagtcctctaagattctagacagggaacctgagcaaccaggcaaagaagacacctagggatggaagacctccactagacaaagaccagtgcgcatactgtaaagagaagggccattgggcaagagaatgtcccccggcgggtcacgtcagaccggcgggtgttctagccccggcgggttagcgactcggaccgatg

SEQ ID NO: 14329 - DNA, 203 bp, Artificial sequence
  synthetic
ggcgcgccagtcctaccaacctttagacagggaacctgagcaaccaggcaaagaagacacctagggatggaagacctccactagacaaagaccagtgcgcatactgtaaagagaagggccattgggcaagagaatgtccccgaaaaaaacacgtcagaccggcgggtgttctagccccggcgggttagcgactcggaccgatg

SEQ ID NO: 14330 - DNA, 203 bp, Artificial sequence
  synthetic
ggcgcgccagtccttacaaaggttagacagggaacctgagcaaccaggcaaagaagacacctagggatggaagacctccactagacaaagaccagtgcgcatactgtaaagagaagggccattgggcaagagaatgtccccgaaaaaaacacgtcagagaagccaaggttctagccctagataactagcgactcggaccgatg

SEQ ID NO: 14331 - DNA, 203 bp, Artificial sequence
  synthetic
ggcgcgccagtccttagtcagactagacagggaacctgagcaaccaggcaaagaagacacctagggatggaagacctccactagacaaagaccagtgcgcatactgtaaagagaagggccattgggcaagagaatgtccctactcccaacacgtcagatactcccaggttctagcctactcccactagcgactcggaccgatg

SEQ ID NO: 14332 - DNA, 203 bp, Artificial sequence
  synthetic
ggcgcgccagtcctcagctgaggtagacagggaacctgagcaaccaggcaaagaagacacctagggatggaagacctccactagacaaagaccagtgcgcatactgtaaagagaagggccattgggcaagagaatgtcccttcttggcaaacgtcagattcttggcaaatctagccttcttggcaaagcgactcggaccgatg

SEQ ID NO: 14333 - DNA, 203 bp, Artificial sequence
  synthetic
ggcgcgccagtccttgcttaagcaagacagggaacctgagcaaccaggcaaagaagacacctagggatggaagacctccactagacaccggccgttgcgcatacaccggccgtaagggccataccggccgtgaatgtcccaccggccgtcacgtcagaaccggccgtgttctagccaccggccgttagcgactcggaccgatg

SEQ ID NO: 14334 - DNA, 203 bp, Artificial sequence
  synthetic
ggcgcgccagtcctaaccttcttgagacagggaacctgagcaaccaggcaaagaagacacctagggatggaagacctccactagacccggcgggttgcgcatacccggcgggtaagggccatccggcgggtgaatgtcccccggcgggtcacgtcagaccggcgggtgttctagccccggcgggttagcgactcggaccgatg

SEQ ID NO: 14335 - DNA, 203 bp, Artificial sequence
  synthetic
ggcgcgccagtcctaatggtagttagacagggaacctgagcaaccaggcaaagaagacacctagggatggaagacctccactagaccgtcaattcctttaataccgtcaattcctttaccatcgtcaattcctttatccccgtcaattcctttacagacgtcaattcctttaagccctagataactagcgactcggaccgatg

SEQ ID NO: 14336 - DNA, 203 bp, Artificial sequence
  synthetic
ggcgcgccagtccttaacagagttagacagggaacctgagcaaccaggcaaagaagacacctagggatggaagacctccactagacttcttggcaaacgcatacttcttggcaaagggccatttcttggcaaaatgtcccttcttggcaaacgtcagattcttggcaaatctagccttcttggcaaagcgactcggaccgatg

SEQ ID NO: 14337 - DNA, 203 bp, Artificial sequence
  synthetic
ggcgcgccagtcctcactagcttaagacagggaacctgagcaaccaggcatactccccacctagggattactcccctccactagactactcccagtgcgcatactactcccagaagggccattactcccgagaatgtccctactcccaacacgtcagatactcccaggttctagcctactcccactagcgactcggaccgatg

SEQ ID NO: 14338 - DNA, 203 bp, Artificial sequence
  synthetic
ggcgcgccagtccttagcttgctgagacagggaacctgagcaaccaggcattcttggcaaatagggatttcttggcaaaactagacttcttggcaaacgcatacttcttggcaaagggccatttcttggcaaaatgtcccttcttggcaaacgtcagattcttggcaaatctagccttcttggcaaagcgactcggaccgatg

SEQ ID NO: 14339 - DNA, 203 bp, Artificial sequence
  synthetic
ggcgcgccagtcctcaggactcgtagacagggccggcgggtaaccaggcaccggcgggtcctagggatccggcgggtccactagacccggcgggttgcgcatacccggcgggtaagggccatccggcgggtgaatgtcccccggcgggtcacgtcagaccggcgggtgttctagccccggcgggttagcgactcggaccgatg

SEQ ID NO: 14340 - DNA, 203 bp, Artificial sequence
  synthetic
ggcgcgccagtcctcagactgctgagacagggcgtcaattcctttaggcacgtcaattcctttaggatcgtcaattcctttaagaccgtcaattcctttaataccgtcaattcctttaccatcgtcaattcctttatccccgtcaattcctttacagacgtcaattcctttaagccctagataactagcgactcggaccgatg

SEQ ID NO: 14341 - DNA, 203 bp, Artificial sequence
  synthetic
ggcgcgccagtccttgcagtagctagacagggtactcccgcaaccaggcatactccccacctagggattactcccctccactagactactcccagtgcgcatactactcccagaagggccattactcccgagaatgtccctactcccaacacgtcagatactcccaggttctagcctactcccactagcgactcggaccgatg

SEQ ID NO: 14342 - DNA, 203 bp, Artificial sequence
  synthetic
ggcgcgccagtcctagactgtgctagacagggttcttggcaaaccaggcattcttggcaaatagggatttcttggcaaaactagacttcttggcaaacgcatacttcttggcaaagggccatttcttggcaaaatgtcccttcttggcaaacgtcagattcttggcaaatctagccttcttggcaaagcgactcggaccgatg

SEQ ID NO: 14343 - DNA, 203 bp, Artificial sequence
  synthetic
ggcgcgccagtcctaaaactctcaagcagccgcacggaatcgagaacacacacggaatcgagaaaagccacggaatcgagaatgtgcacggaatcgagaattcccacggaatcgagaatgcgcacggaatcgagaaaaagcacggaatcgagaaacaccacggaatcgagaatgcagcatgtcttcaacgactcggaccgatg

SEQ ID NO: 14344 - DNA, 203 bp, Artificial sequence
  synthetic
ggcgcgccagtcctagtagctaaaagcagccgcgtcaattcctttacacacgtcaattcctttaaagccgtcaattcctttatgtgcgtcaattcctttattcccgtcaattcctttatgcgcgtcaattcctttaaaagcgtcaattcctttaacaccgtcaattcctttatgcagcatgtcttcaacgactcggaccgatg

SEQ ID NO: 14345 - DNA, 203 bp, Artificial sequence
  synthetic
ggcgcgccagtcctcaactgctaaagcagccgggaacagctctgaccacacacggaatcgagaaaagccacggaatcgagaatgtgcacggaatcgagaattcccacggaatcgagaatgcgcacggaatcgagaaaaagcacggaatcgagaaacaccacggaatcgagaatgcagcatgtcttcaacgactcggaccgatg

SEQ ID NO: 14346 - DNA, 203 bp, Artificial sequence
  synthetic
ggcgcgccagtcctaatggactggagcagccgggaacagctctgaccacacgtcaattcctttaaagccgtcaattcctttatgtgcgtcaattcctttattcccgtcaattcctttatgcgcgtcaattcctttaaaagcgtcaattcctttaacaccgtcaattcctttatgcagcatgtcttcaacgactcggaccgatg

SEQ ID NO: 14347 - DNA, 203 bp, Artificial sequence
  synthetic
ggcgcgccagtcctatgaggactgagcagccgggaacagctctgaccacagtggttccggggagaagccacggaatcgagaatgtgcacggaatcgagaattcccacggaatcgagaatgcgcacggaatcgagaaaaagcacggaatcgagaaacaccacggaatcgagaatgcagcatgtcttcaacgactcggaccgatg

SEQ ID NO: 14348 - DNA, 203 bp, Artificial sequence
  synthetic
ggcgcgccagtccttaactggactagcagccgggaacagctctgaccacagtggttccggggagaagccgtcaattcctttatgtgcgtcaattcctttattcccgtcaattcctttatgcgcgtcaattcctttaaaagcgtcaattcctttaacaccgtcaattcctttatgcagcatgtcttcaacgactcggaccgatg

SEQ ID NO: 14349 - DNA, 203 bp, Artificial sequence
  synthetic
ggcgcgccagtccttcgctacgttagcagccgggaacagctctgaccacagtggttccggggagaagcctttccaggacccatgtgtaggcacaactgttttccctgatcaggatacttgcggcactcaacagaggaaagaaattcctaagggaacacccggcgggtagtactgcaccggcgggtcaacgactcggaccgatg

SEQ ID NO: 14350 - DNA, 203 bp, Artificial sequence
  synthetic
ggcgcgccagtcctttaaagtgtaagcagccgggaacagctctgaccacagtggttccggggagaagcctttccaggacccatgtgtaggcacaactgttttccctgatcaggatacttgcggcactcaacagaggaaagaaattcctaagggaacacttcttggcaaatactgcattcttggcaaaacgactcggaccgatg

SEQ ID NO: 14351 - DNA, 203 bp, Artificial sequence
  synthetic
ggcgcgccagtcctacgttcaagtagcagccgggaacagctctgaccacagtggttccggggagaagcctttccaggacccatgtgtaggcacaactgttttccctgatcaggatacttgcggcactcaacagaggaaagcacggaatcgagaaacaccacggaatcgagaatgcagcatgtcttcaacgactcggaccgatg

SEQ ID NO: 14352 - DNA, 203 bp, Artificial sequence
  synthetic
ggcgcgccagtcctatggatacaaagcagccgggaacagctctgaccacagtggttccggggagaagcctttccaggacccatgtgtaggcacaactgttttccctgatcaggatacttgcggcactcaacagaggaaagcgtcaattcctttaacaccgtcaattcctttatgcagcatgtcttcaacgactcggaccgatg

SEQ ID NO: 14353 - DNA, 203 bp, Artificial sequence
  synthetic
ggcgcgccagtccttgtgcagtgtagcagccgggaacagctctgaccacagtggttccggggagaagcctttccaggacccatgtgtaggcacaactgttttccctgatcaggatacttgcggcactcaacagaggaaagtactccctaagggaacactactcccaaagtactgcatactcccttcaacgactcggaccgatg

SEQ ID NO: 14354 - DNA, 203 bp, Artificial sequence
  synthetic
ggcgcgccagtccttaaggttaggagcagccgggaacagctctgaccacattcttggcaaagagaagcttcttggcaaaccatgtgttcttggcaaagttttccttcttggcaaaacttgcgttcttggcaaaaggaaagttcttggcaaaggaacacttcttggcaaatactgcattcttggcaaaacgactcggaccgatg

SEQ ID NO: 14355 - DNA, 203 bp, Artificial sequence
  synthetic
ggcgcgccagtcctttgcaaaaggagcagccgtactcccctctgaccacatactccccggggagaagctactcccggacccatgtgtactcccaactgttttcctactcccggatacttgcgtactcccacagaggaaagtactccctaagggaacactactcccaaagtactgcatactcccttcaacgactcggaccgatg

SEQ ID NO: 14356 - DNA, 203 bp, Artificial sequence
  synthetic
ggcgcgccagtcctacatggtaggagcagccgttcttggcaaagaccacattcttggcaaagagaagcttcttggcaaaccatgtgttcttggcaaagttttccttcttggcaaaacttgcgttcttggcaaaaggaaagttcttggcaaaggaacacttcttggcaaatactgcattcttggcaaaacgactcggaccgatg

SEQ ID NO: 14357 - DNA, 203 bp, Artificial sequence
  synthetic
ggcgcgccagtccttagctaagtgagcctcctcacggaatcgagaacctacacggaatcgagaaaggacacggaatcgagaattaacacggaatcgagaagagccacggaatcgagaacaagcacggaatcgagaaccctcacggaatcgagaacaatcacggaatcgagaatgaccagtcacagattcgactcggaccgatg

SEQ ID NO: 14358 - DNA, 203 bp, Artificial sequence
  synthetic
ggcgcgccagtccttccagtgcatagcctcctcgtcaattcctttacctacgtcaattcctttaaggacgtcaattcctttattaacgtcaattcctttagagccgtcaattcctttacaagcgtcaattcctttaccctcgtcaattcctttacaatcgtcaattcctttatgaccagtcacagattcgactcggaccgatg

SEQ ID NO: 14359 - DNA, 203 bp, Artificial sequence
  synthetic
ggcgcgccagtcctacctcaagtgagcctcctgttgcacggtcttgcctaaccggccgtctccaaggaaccggccgtcataattaaaccggccgtatgtcgagcaccggccgtaagaccaagaccggccgtaagcgccctaccggccgtacatccaataccggccgtatgtttgacaccggccgtattcgactcggaccgatg

SEQ ID NO: 14360 - DNA, 203 bp, Artificial sequence
  synthetic
ggcgcgccagtcctctaaggtccaagcctcctgttgcacggtcttgcctaaggtgaagcctccaaggaagccattagcataattaaacaaccaccatgtcgagcaaaaaggcaaagaccaagaccaccaagaagcgccctaccggccgtacatccaataccggccgtatgtttgacaccggccgtattcgactcggaccgatg

SEQ ID NO: 14361 - DNA, 203 bp, Artificial sequence
  synthetic
ggcgcgccagtcctagtctttcatagcctcctgttgcacggtcttgcctaaggtgaagcctccaaggaagccattagcataattaaacaaccaccatgtcgagcaaaaaggcaaagaccaagaccaccaagaagcgccctcagcgtgcaacatccaatcacggaatcgagaatgaccagtcacagattcgactcggaccgatg

SEQ ID NO: 14362 - DNA, 203 bp, Artificial sequence
  synthetic
ggcgcgccagtcctctgactaggtagcctcctgttgcacggtcttgcctaaggtgaagcctccaaggaagccattagcataattaaacaaccaccatgtcgagcaaaaaggcaaagaccaagaccaccaagaagcgccctcagcgtgcaacatccaatgtgtttgccatgtttgaccagtcacagattcgactcggaccgatg

SEQ ID NO: 14363 - DNA, 203 bp, Artificial sequence
  synthetic
ggcgcgccagtcctctgacggtgaagcctcctgttgcacggtcttgcctaaggtgaagcctccaaggaagccattagcataattaaacaaccaccatgtcgagcaaaaaggcaaagaccaagaccaccaagaagcgccctcagcgtgcaacatccaatgtgtttgccatgtttgacccggcgggtattcgactcggaccgatg

SEQ ID NO: 14364 - DNA, 203 bp, Artificial sequence
  synthetic
ggcgcgccagtcctctttcttcagagcctcctgttgcacggtcttgcctaaggtgaagcctccaaggaagccattagcataattaaacaaccaccatgtcgagcaaaaaggcaaagaccaagaccggccgtaagcgccctaccggccgtacatccaataccggccgtatgtttgacaccggccgtattcgactcggaccgatg

SEQ ID NO: 14365 - DNA, 203 bp, Artificial sequence
  synthetic
ggcgcgccagtccttgtccaagaaagcctcctgttgcacggtcttgcctaaggtgaagcctccaaggaagccattagcataattaaacaaccaccatgtcgagcaaaaaggcaaagaccaagccggcgggtaagcgccctccggcgggtacatccaatccggcgggtatgtttgacccggcgggtattcgactcggaccgatg

SEQ ID NO: 14366 - DNA, 203 bp, Artificial sequence
  synthetic
ggcgcgccagtccttacagttaagagcctcctgttgcacggtcttgcctaaggtgaagcctccaaggaagccattagcataattaaacaaccaccatgtcgagccgtcaattcctttacaagcgtcaattcctttaccctcgtcaattcctttacaatcgtcaattcctttatgaccagtcacagattcgactcggaccgatg

SEQ ID NO: 14367 - DNA, 203 bp, Artificial sequence
  synthetic
ggcgcgccagtcctatccttgccaagcctcctgttgcacggtcttgcctaaggtgaagcctccaaggaagccattagcataattaacacggaatcgagaagagccacggaatcgagaacaagcacggaatcgagaaccctcacggaatcgagaacaatcacggaatcgagaatgaccagtcacagattcgactcggaccgatg

SEQ ID NO: 14368 - DNA, 203 bp, Artificial sequence
  synthetic
ggcgcgccagtcctcttaaggcgtagcctcctgttgcacggtcttgcctaaggtgaagcctccaaggacacggaatcgagaattaacacggaatcgagaagagccacggaatcgagaacaagcacggaatcgagaaccctcacggaatcgagaacaatcacggaatcgagaatgaccagtcacagattcgactcggaccgatg

SEQ ID NO: 14369 - DNA, 203 bp, Artificial sequence
  synthetic
ggcgcgccagtcctatcacaaaggagcctcctgttgcacggtcttgcctatactcccgcctccaaggatactcccagcataattaatactcccccatgtcgagctactccccaaagaccaagtactcccagaagcgcccttactccccaacatccaattactcccccatgtttgactactcccagattcgactcggaccgatg

SEQ ID NO: 14370 - DNA, 203 bp, Artificial sequence
  synthetic
ggcgcgccagtcctagaaaggtttaggcgcttacagtgcaccaagatggccgcccccgtggatctagagctgaagaaggccttcacagagcttcaagccaaagttactcccactcaacagaatactcccctcgcagacattactcccgaacagctaaatactcccaaaaagcatgctactcccacagacgactcggaccgatg

SEQ ID NO: 14371 - DNA, 203 bp, Artificial sequence
  synthetic
ggcgcgccagtcctcaaccggtataggcgcttacagtgcaccaagatggccgcccccgtggatctagagctgaagaaggccttcacagagcttcaagccaaagttattgacactcaacagaaggtgaagctcgcagacatacagattgaacagctaaacacggaatcgagaaatgcacatcttacagacgactcggaccgatg

SEQ ID NO: 14372 - DNA, 203 bp, Artificial sequence
  synthetic
ggcgcgccagtccttgacgaccagaggcgcttacagtgcaccaagatggccgcccccgtggatctagagctgaagaaggccttcacagagcttcaagccaaagttattgacactcaacagaaggtgaagctcgcagacatacagattgaacagctaaatactcccaaaaagcatgctactcccacagacgactcggaccgatg

SEQ ID NO: 14373 - DNA, 203 bp, Artificial sequence
  synthetic
ggcgcgccagtcctctggtacttgaggcgcttacagtgcaccaagatggccgcccccgtggatctagagctgaagaaggccttcacagagcttcaagccaaagttattgacactcaacagaaggtgaagctcgcagacatacagattgaacagctaaattcttggcaaaagcatgcttcttggcaaaacgactcggaccgatg

SEQ ID NO: 14374 - DNA, 203 bp, Artificial sequence
  synthetic
ggcgcgccagtccttggtaggataaggcgcttacagtgcaccaagatggccgcccccgtggatctagagctgaagaaggccttcacagagcttcaagccaaagttattgacactcaacagaaggtgaagctcgcagacatccggcgggtacagctaaaccggcgggtaaagcatgcccggcgggtagacgactcggaccgatg

SEQ ID NO: 14375 - DNA, 203 bp, Artificial sequence
  synthetic
ggcgcgccagtccttctttgagctaggcgcttacagtgcaccaagatggccgcccccgtggatctagagctgaagaaggccttcacagagcttcaagccaaagttattgacactcaacagaaggtgaagctcgcagacatcgtcaattcctttataaacgtcaattcctttaatgcacatcttacagacgactcggaccgatg

SEQ ID NO: 14376 - DNA, 203 bp, Artificial sequence
  synthetic
ggcgcgccagtcctagtctcaaaaaggcgcttacagtgcaccaagatggccgcccccgtggatctagagctgaagaaggccttcacagagcttcaagccaaagttattgacactcaacagaaggtgaagctcgcagacattactcccgaacagctaaatactcccaaaaagcatgctactcccacagacgactcggaccgatg

SEQ ID NO: 14377 - DNA, 203 bp, Artificial sequence
  synthetic
ggcgcgccagtcctctcaaaactaaggcgcttacagtgcaccaagatggccgcccccgtggatctagagctgaagaaggccttcacagagcttcaagccaaagttattgacactcaacagaaggtgaagctcgcagacatttcttggcaaaagctaaattcttggcaaaagcatgcttcttggcaaaacgactcggaccgatg

SEQ ID NO: 14378 - DNA, 203 bp, Artificial sequence
  synthetic
ggcgcgccagtcctaatacagcgaaggcgcttacagtgcaccaagatggccgcccccgtggatctagagctgaagaaggccttcacagagcttcaagccaaagttattgacactcaacagaatactcccctcgcagacattactcccgaacagctaaatactcccaaaaagcatgctactcccacagacgactcggaccgatg

SEQ ID NO: 14379 - DNA, 203 bp, Artificial sequence
  synthetic
ggcgcgccagtcctagctgctgtgaggcgcttacagtgcaccaagatggccgcccccgtggatctagatactcccaaggccttcactactccccaagccaaagttactcccactcaacagaatactcccctcgcagacattactcccgaacagctaaatactcccaaaaagcatgctactcccacagacgactcggaccgatg

SEQ ID NO: 14380 - DNA, 203 bp, Artificial sequence
  synthetic
ggcgcgccagtcctatcagattcaaggcgcttacagtgcaccaagatggccgtcaattcctttatagacgtcaattcctttatcaccgtcaattcctttaaagtcgtcaattcctttaagaacgtcaattcctttaacatcgtcaattcctttataaacgtcaattcctttaatgcacatcttacagacgactcggaccgatg

SEQ ID NO: 14381 - DNA, 203 bp, Artificial sequence
  synthetic
ggcgcgccagtccttgttactggaaggcgcttacagtgcaccaagatggcttcttggcaaaatctagattcttggcaaaccttcacttcttggcaaaccaaagtttcttggcaaaaacagaattcttggcaaacagacatttcttggcaaaagctaaattcttggcaaaagcatgcttcttggcaaaacgactcggaccgatg

SEQ ID NO: 14382 - DNA, 203 bp, Artificial sequence
  synthetic
ggcgcgccagtcctagtatggtcaaggcgcttccggcgggtcaagatggcccggcgggtggatctagaccggcgggtggccttcacccggcgggtagccaaagtccggcgggttcaacagaaccggcgggtcgcagacatccggcgggtacagctaaaccggcgggtaaagcatgcccggcgggtagacgactcggaccgatg

SEQ ID NO: 14383 - DNA, 203 bp, Artificial sequence
  synthetic
ggcgcgccagtcctacgcttacttaggctgccaccggccgtcccccagctaccggccgtgtccctctcaccggccgtctccatccgaccggccgttgcccagggaccggccgtagatgtcgcaccggccgtgcctgtgtcaccggccgttcgttggccaccggccgtccaccagagaccggccgttgacgactcggaccgatg

SEQ ID NO: 14384 - DNA, 203 bp, Artificial sequence
  synthetic
ggcgcgccagtcctccttacttgtaggctgcccacggaatcgagaaagctcacggaatcgagaatctccacggaatcgagaatccgcacggaatcgagaaacggcacggaatcgagaatcgccacggaatcgagaatgtccacggaatcgagaaggcccacggaatcgagaaagaggacagacgttgacgactcggaccgatg

SEQ ID NO: 14385 - DNA, 203 bp, Artificial sequence
  synthetic
ggcgcgccagtcctaggttacttgaggctgccccggcgggtcccccagctccggcgggtgtccctctcccggcgggtctccatccgccggcgggttgcccacggccggcgggtagatgtcgcccggcgggtgcctgtgtcccggcgggttcgttggccccggcgggtccaccagagccggcgggttgacgactcggaccgatg

SEQ ID NO: 14386 - DNA, 203 bp, Artificial sequence
  synthetic
ggcgcgccagtccttgaggtttagaggctgcccgtcaattcctttaagctcgtcaattcctttatctccgtcaattcctttatccgcgtcaattcctttaacggcgtcaattcctttatcgccgtcaattcctttatgtccgtcaattcctttaggcccgtcaattcctttaagaggacagacgttgacgactcggaccgatg

SEQ ID NO: 14387 - DNA, 203 bp, Artificial sequence
  synthetic
ggcgcgccagtcctaaccgttaggaggctgccggcttaggacccccagctaccggccgtgtccctctcaccggccgtctccatccgaccggccgttgcccagggaccggccgtagatgtcgcaccggccgtgcctgtgtcaccggccgttcgttggccaccggccgtccaccagagaccggccgttgacgactcggaccgatg

SEQ ID NO: 14388 - DNA, 203 bp, Artificial sequence
  synthetic
ggcgcgccagtcctcactgaggtgaggctgccggcttaggacccccagctccgacgtaagtccctctccacggaatcgagaatccgcacggaatcgagaaacggcacggaatcgagaatcgccacggaatcgagaatgtccacggaatcgagaaggcccacggaatcgagaaagaggacagacgttgacgactcggaccgatg

SEQ ID NO: 14389 - DNA, 203 bp, Artificial sequence
  synthetic
ggcgcgccagtcctaacctcagttaggctgccggcttaggacccccagctccgacgtaagtccctctcgtgcgccacctccatccgaccggccgttgcccagggaccggccgtagatgtcgcaccggccgtgcctgtgtcaccggccgttcgttggccaccggccgtccaccagagaccggccgttgacgactcggaccgatg

SEQ ID NO: 14390 - DNA, 203 bp, Artificial sequence
  synthetic
ggcgcgccagtcctctacactgagaggctgccggcttaggacccccagctccgacgtaagtccctctcgtgcgccacctccatccgcacggaatcgagaaacggcacggaatcgagaatcgccacggaatcgagaatgtccacggaatcgagaaggcccacggaatcgagaaagaggacagacgttgacgactcggaccgatg

SEQ ID NO: 14391 - DNA, 203 bp, Artificial sequence
  synthetic
ggcgcgccagtcctcttcactctcaggctgccggcttaggacccccagctccgacgtaagtccctctcgtgcgccacctccatccgctgcccctctgcccacgggccgggctcagatgtcgcaccggccgtgcctgtgtcaccggccgttcgttggccaccggccgtccaccagagaccggccgttgacgactcggaccgatg

SEQ ID NO: 14392 - DNA, 203 bp, Artificial sequence
  synthetic
ggcgcgccagtccttgtaacggtcaggctgccggcttaggacccccagctccgacgtaagtccctctcgtgcgccacctccatccgctgcccctctgcccacgggccgggctcagatgtcgccacggaatcgagaatgtccacggaatcgagaaggcccacggaatcgagaaagaggacagacgttgacgactcggaccgatg

SEQ ID NO: 14393 - DNA, 203 bp, Artificial sequence
  synthetic
ggcgcgccagtcctgactcgtctaaggctgccggcttaggacccccagctccgacgtaagtccctctcgtgcgccacctccatccgctgcccctctgcccacgggccgggctcagatgtcgcccggcgggtgcctgtgtcccggcgggttcgttggccccggcgggtccaccagagccggcgggttgacgactcggaccgatg

SEQ ID NO: 14394 - DNA, 203 bp, Artificial sequence
  synthetic
ggcgcgccagtcctcaggactgtcaggctgccggcttaggacccccagctccgacgtaagtccctctcgtgcgccacctccatccgctgcccctctgcccacgggccgggctcagatgtcgccctctggtcgcctgtgtcaccggccgttcgttggccaccggccgtccaccagagaccggccgttgacgactcggaccgatg

SEQ ID NO: 14395 - DNA, 203 bp, Artificial sequence
  synthetic
ggcgcgccagtcctgacgcttgaaaggctgccggcttaggacccccagctccgacgtaagtccctctcgtgcgccacctccatccgctgcccctctgcccacgggccgggctcagatgtcgccctctggtcgcctgtgtccacggaatcgagaaggcccacggaatcgagaaagaggacagacgttgacgactcggaccgatg

SEQ ID NO: 14396 - DNA, 203 bp, Artificial sequence
  synthetic
ggcgcgccagtcctgacctttgtcaggctgccggcttaggacccccagctccgacgtaagtccctctcgtgcgccacctccatccgctgcccctctgcccacgggccgggctcagatgtcgccctctggtcgcctgtgtcttctcaccatcgttggccccggcgggtccaccagagccggcgggttgacgactcggaccgatg

SEQ ID NO: 14397 - DNA, 203 bp, Artificial sequence
  synthetic
ggcgcgccagtccttcagaacgtcaggctgccggcttaggacccccagctccgacgtaagtccctctcgtgcgccacctccatccgctgcccctctgcccacgggccgggctcagatgtcgccctctggtcgcctgtgtcttctcaccatcgttggcctactcccccccaccagagtactcccgttgacgactcggaccgatg

SEQ ID NO: 14398 - DNA, 203 bp, Artificial sequence
  synthetic
ggcgcgccagtcctacagctagtcaggctgccggcttaggacccccagctccgacgtaagtccctctcgtgcgccacctccatccgctgcccctctgcccacgggccgggctcagatgtcgccctctggtcgcctgtgtcttctcaccatcgttggcctgattctccccaccagagaccggccgttgacgactcggaccgatg

SEQ ID NO: 14399 - DNA, 203 bp, Artificial sequence
  synthetic
ggcgcgccagtcctgaccggtcataggctgccggcttaggacccccagctccgacgtaagtccctctcgtgcgccacctccatccgctgcccctctgcccacgggccgggctcagatgtcgccctctggtcgcctgtgtcttctcaccatcgttggcctgattctccccaccagagccggcgggttgacgactcggaccgatg

SEQ ID NO: 14400 - DNA, 203 bp, Artificial sequence
  synthetic
ggcgcgccagtcctatgacagctcaggctgccggcttaggacccccagctccgacgtaagtccctctcgtgcgccacctccatccgctgcccctctgcccacgggccgggctcagatgtcgccctctggtcgcctgtgtcttctcaccatcgttggcctgattctccccaccagaggacagacgttgacgactcggaccgatg

SEQ ID NO: 14401 - DNA, 203 bp, Artificial sequence
  synthetic
ggcgcgccagtcctgaaccttgctaggctgccggcttaggacccccagctccgacgtaagtccctctcgtgcgccacctccatccgctgcccctctgcccacgggccgggctcagatgtcgccctctggtcgcctgtgtcttctcaccatcgttggcctgattctccccaccagagtactcccgttgacgactcggaccgatg

SEQ ID NO: 14402 - DNA, 203 bp, Artificial sequence
  synthetic
ggcgcgccagtcctgagctcaagaaggctgccggcttaggacccccagctccgacgtaagtccctctcgtgcgccacctccatccgctgcccctctgcccacgggccgggctcagatgtcgccctctggtcgcctgtgtcttctcaccatcgttggccttcttggcaaaaccagagttcttggcaaaacgactcggaccgatg

SEQ ID NO: 14403 - DNA, 203 bp, Artificial sequence
  synthetic
ggcgcgccagtcctatccaagctcaggctgccggcttaggacccccagctccgacgtaagtccctctcgtgcgccacctccatccgctgcccctctgcccacgggccgggctcagatgtcgccgtcaattcctttatgtccgtcaattcctttaggcccgtcaattcctttaagaggacagacgttgacgactcggaccgatg

SEQ ID NO: 14404 - DNA, 203 bp, Artificial sequence
  synthetic
ggcgcgccagtcctgagctgagtaaggctgccggcttaggacccccagctccgacgtaagtccctctcgtgcgccacctccatccgctgcccctctgcccacgggccgggctcagatgtcgctactccctcgcctgtgtctactccccatcgttggcctactcccccccaccagagtactcccgttgacgactcggaccgatg

SEQ ID NO: 14405 - DNA, 203 bp, Artificial sequence
  synthetic
ggcgcgccagtcctgagctgtatcaggctgccggcttaggacccccagctccgacgtaagtccctctcgtgcgccacctccatccgctgcccctctgcccacggtactccctcagatgtcgctactccctcgcctgtgtctactccccatcgttggcctactcccccccaccagagtactcccgttgacgactcggaccgatg

SEQ ID NO: 14406 - DNA, 203 bp, Artificial sequence
  synthetic
ggcgcgccagtcctgaacctctgtaggctgccggcttaggacccccagctccgacgtaagtccctctcgtgcgccacctccatccgctgcccctctgcccacggttcttggcaaaatgtcgcttcttggcaaactgtgtcttcttggcaaagttggccttcttggcaaaaccagagttcttggcaaaacgactcggaccgatg

SEQ ID NO: 14407 - DNA, 203 bp, Artificial sequence
  synthetic
ggcgcgccagtcctgagcagtttgaggctgccggcttaggacccccagctccgacgtaagtccctctcgtgcgccacctccatccgtactccctctgcccacggtactccctcagatgtcgctactccctcgcctgtgtctactccccatcgttggcctactcccccccaccagagtactcccgttgacgactcggaccgatg

SEQ ID NO: 14408 - DNA, 203 bp, Artificial sequence
  synthetic
ggcgcgccagtcctgactgagctcaggctgccggcttaggacccccagctccgacgtaagtccctctcgtgcgccacctccatccgttcttggcaaacccacggttcttggcaaaatgtcgcttcttggcaaactgtgtcttcttggcaaagttggccttcttggcaaaaccagagttcttggcaaaacgactcggaccgatg

SEQ ID NO: 14409 - DNA, 203 bp, Artificial sequence
  synthetic
ggcgcgccagtcctgagttaccgtaggctgccggcttaggacccccagctccgacgtaagtccctctcttcttggcaaaccatccgttcttggcaaacccacggttcttggcaaaatgtcgcttcttggcaaactgtgtcttcttggcaaagttggccttcttggcaaaaccagagttcttggcaaaacgactcggaccgatg

SEQ ID NO: 14410 - DNA, 203 bp, Artificial sequence
  synthetic
ggcgcgccagtcctcaaaaccgtcaggctgccggcttaggacccccagctcgtcaattcctttatctccgtcaattcctttatccgcgtcaattcctttaacggcgtcaattcctttatcgccgtcaattcctttatgtccgtcaattcctttaggcccgtcaattcctttaagaggacagacgttgacgactcggaccgatg

SEQ ID NO: 14411 - DNA, 203 bp, Artificial sequence
  synthetic
ggcgcgccagtcctgacctctgctaggctgccggcttaggacccccagcttactcccaagtccctctctactcccacctccatccgtactccctctgcccacggtactccctcagatgtcgctactccctcgcctgtgtctactccccatcgttggcctactcccccccaccagagtactcccgttgacgactcggaccgatg

SEQ ID NO: 14412 - DNA, 203 bp, Artificial sequence
  synthetic
ggcgcgccagtcctgactcagagaaggctgccggcttaggacccccagctttcttggcaaaccctctcttcttggcaaaccatccgttcttggcaaacccacggttcttggcaaaatgtcgcttcttggcaaactgtgtcttcttggcaaagttggccttcttggcaaaaccagagttcttggcaaaacgactcggaccgatg

SEQ ID NO: 14413 - DNA, 203 bp, Artificial sequence
  synthetic
ggcgcgccagtcctgacggtcattaggctgcctactcccgacccccagcttactcccaagtccctctctactcccacctccatccgtactccctctgcccacggtactccctcagatgtcgctactccctcgcctgtgtctactccccatcgttggcctactcccccccaccagagtactcccgttgacgactcggaccgatg

SEQ ID NO: 14414 - DNA, 203 bp, Artificial sequence
  synthetic
ggcgcgccagtcctcttcaacgtcatatttgaaccggccgttgtatgattaccggccgtgagacaggaaccggccgtaagatggcaaccggccgttctaattagaccggccgttaattttctaccggccgtagtttgttcaccggccgtaacctgcttaccggccgtatcagaaagaccggccgtggacgactcggaccgatg

SEQ ID NO: 14415 - DNA, 203 bp, Artificial sequence
  synthetic
ggcgcgccagtcctccaactggtcatatttgacacggaatcgagaagattcacggaatcgagaaaggacacggaatcgagaaggcacacggaatcgagaattagcacggaatcgagaattctcacggaatcgagaagttccacggaatcgagaagcttcacggaatcgagaaaaagacatccttcggacgactcggaccgatg

SEQ ID NO: 14416 - DNA, 203 bp, Artificial sequence
  synthetic
ggcgcgccagtcctcatgaccttaatatttgattcttggcaaatatgattttcttggcaaagacaggattcttggcaaagatggcattcttggcaaataattagttcttggcaaaattttctttcttggcaaatttgttcttcttggcaaacctgcttttcttggcaaacagaaagttcttggcaaaacgactcggaccgatg

SEQ ID NO: 14417 - DNA, 203 bp, Artificial sequence
  synthetic
ggcgcgccagtcctacggtcatgaatatttgattttttgcatgtatgattaccggccgtgagacaggaaccggccgtaagatggcaaccggccgttctaattagaccggccgttaattttctaccggccgtagtttgttcaccggccgtaacctgcttaccggccgtatcagaaagaccggccgtggacgactcggaccgatg

SEQ ID NO: 14418 - DNA, 203 bp, Artificial sequence
  synthetic
ggcgcgccagtcctttgagtgagtatatttgattttttgcatgtatgattataccatgagagacaggattaatatagaagatggcaaggcaaatttctaattagaccggccgttaattttctaccggccgtagtttgttcaccggccgtaacctgcttaccggccgtatcagaaagaccggccgtggacgactcggaccgatg

SEQ ID NO: 14419 - DNA, 203 bp, Artificial sequence
  synthetic
ggcgcgccagtcctgaacagtctcatatttgattttttgcatgtatgattataccatgagagacaggattaatatagaagatggcaaggcaaatttctaattagagggaatattaattttctacaaaataaagtttgttcatcaatacaaacctgcttcacggaatcgagaaaaagacatccttcggacgactcggaccgatg

SEQ ID NO: 14420 - DNA, 203 bp, Artificial sequence
  synthetic
ggcgcgccagtccttaaactcatgatatttgattttttgcatgtatgattataccatgagagacaggattaatatagaagatggcaaggcaaatttctaattagagggaatattaattttctacaaaataaagtttgttcccggcgggtaacctgcttccggcgggtatcagaaagccggcgggtggacgactcggaccgatg

SEQ ID NO: 14421 - DNA, 203 bp, Artificial sequence
  synthetic
ggcgcgccagtccttcactacactatatttgattttttgcatgtatgattataccatgagagacaggattaatatagaagatggcaaggcaaatttctaattagagggaatattaattttctcgtcaattcctttagttccgtcaattcctttagcttcgtcaattcctttaaaagacatccttcggacgactcggaccgatg

SEQ ID NO: 14422 - DNA, 203 bp, Artificial sequence
  synthetic
ggcgcgccagtccttgtagtgaatatatttgattttttgcatgtatgattttcttggcaaagacaggattcttggcaaagatggcattcttggcaaataattagttcttggcaaaattttctttcttggcaaatttgttcttcttggcaaacctgcttttcttggcaaacagaaagttcttggcaaaacgactcggaccgatg

SEQ ID NO: 14423 - DNA, 203 bp, Artificial sequence
  synthetic
ggcgcgccagtcctaactacactgatgatcttaagtagataagtgctgttaccggccgttcaacagaaaccggccgttacgtctttaccggccgtaagaacacaaccggccgtatgctctcaaccggccgttttttatttaccggccgtggaaagctcaccggccgttacgaatagaccggccgttatcgactcggaccgatg

SEQ ID NO: 14424 - DNA, 203 bp, Artificial sequence
  synthetic
ggcgcgccagtcctactacaactgatgatcttaagtagataagtgctgttcgtcaattcctttaagaacgtcaattcctttactttcgtcaattcctttacacacgtcaattcctttactcacgtcaattcctttaatttcgtcaattcctttagctccgtcaattcctttaatagccaaccctttatcgactcggaccgatg

SEQ ID NO: 14425 - DNA, 203 bp, Artificial sequence
  synthetic
ggcgcgccagtcctacgttaactaatgatcttaagtagataagtgctgttgcttgtagttcaacagaaagctttgagtacgtctttccggcgggtaagaacacaccggcgggtatgctctcaccggcgggttttttatttccggcgggtggaaagctcccggcgggttacgaatagccggcgggttatcgactcggaccgatg

SEQ ID NO: 14426 - DNA, 203 bp, Artificial sequence
  synthetic
ggcgcgccagtccttaagagtattatgatcttaagtagataagtgctgttgcttgtagttcaacagaaagctttgagtacgtctttcgtcaattcctttacacacgtcaattcctttactcacgtcaattcctttaatttcgtcaattcctttagctccgtcaattcctttaatagccaaccctttatcgactcggaccgatg

SEQ ID NO: 14427 - DNA, 203 bp, Artificial sequence
  synthetic
ggcgcgccagtccttttactgtgtatgatcttaagtagataagtgctgttgcttgtagttcaacagaaagctttgagtacgtctttcttgcgagaaagaacacatgcattcttatgctctcaattctattatttttattttgggcgaaaggaaagctctactcccagtacgaatagtactccctttatcgactcggaccgatg

SEQ ID NO: 14428 - DNA, 203 bp, Artificial sequence
  synthetic
ggcgcgccagtcctaggactgtgaatgatcttaagtagataagtgctgttgcttgtagttcaacagaaagctttgagtacgtctttcttgcgagaaagaacacatgcattcttatgctctcaattctattatttttattttgggcgaaaggaaagctctcacgcgagtacgaatagaccggccgttatcgactcggaccgatg

SEQ ID NO: 14429 - DNA, 203 bp, Artificial sequence
  synthetic
ggcgcgccagtccttaaactttggatgatcttaagtagataagtgctgttgcttgtagttcaacagaaagctttgagtacgtctttcttgcgagaaagaacacatgcattcttatgctctcaattctattatttttatttttcttggcaaaaaagctcttcttggcaaacgaatagttcttggcaaatcgactcggaccgatg

SEQ ID NO: 14430 - DNA, 203 bp, Artificial sequence
  synthetic
ggcgcgccagtcctactgctttggatgatcttaagtagataagtgctgttgcttgtagttcaacagaaagctttgagtacgtctttcttgcgagaaagaacacatgcattcttatgctctcaccggcgggttttttatttccggcgggtggaaagctcccggcgggttacgaatagccggcgggttatcgactcggaccgatg

SEQ ID NO: 14431 - DNA, 203 bp, Artificial sequence
  synthetic
ggcgcgccagtcctaacctttggtatgatcttaagtagataagtgctgttgcttgtagttcaacagaaagctttgagtacgtctttcttgcgagaaagaacacatgcattcttatgctctcacgtcaattcctttaatttcgtcaattcctttagctccgtcaattcctttaatagccaaccctttatcgactcggaccgatg

SEQ ID NO: 14432 - DNA, 203 bp, Artificial sequence
  synthetic
ggcgcgccagtcctagtccaggttatgatcttaagtagataagtgctgttgcttgtagttcaacagaaagctttgagtacgtctttttcttggcaaagaacacattcttggcaaagctctcattcttggcaaatttatttttcttggcaaaaaagctcttcttggcaaacgaatagttcttggcaaatcgactcggaccgatg

SEQ ID NO: 14433 - DNA, 203 bp, Artificial sequence
  synthetic
ggcgcgccagtccttctaacactaatgatcttaagtagataagtgctgttgcttgtagttcaacagaaccggcgggttacgtctttccggcgggtaagaacacaccggcgggtatgctctcaccggcgggttttttatttccggcgggtggaaagctcccggcgggttacgaatagccggcgggttatcgactcggaccgatg

SEQ ID NO: 14434 - DNA, 203 bp, Artificial sequence
  synthetic
ggcgcgccagtcctacgactgttcatgatcttaagtagataagtgctgtttactcccgttcaacagaatactcccagtacgtcttttactcccgaaagaacacatactcccttatgctctcatactccctatttttattttactcccaaggaaagctctactcccagtacgaatagtactccctttatcgactcggaccgatg

SEQ ID NO: 14435 - DNA, 203 bp, Artificial sequence
  synthetic
ggcgcgccagtcctgagaactggtatgatcttaccggccgtagtgctgttaccggccgttcaacagaaaccggccgttacgtctttaccggccgtaagaacacaaccggccgtatgctctcaaccggccgttttttatttaccggccgtggaaagctcaccggccgttacgaatagaccggccgttatcgactcggaccgatg

SEQ ID NO: 14436 - DNA, 203 bp, Artificial sequence
  synthetic
ggcgcgccagtccttaccactaggatgatcttcacggaatcgagaatgttcacggaatcgagaaagaacacggaatcgagaactttcacggaatcgagaacacacacggaatcgagaactcacacggaatcgagaaatttcacggaatcgagaagctccacggaatcgagaaatagccaaccctttatcgactcggaccgatg

SEQ ID NO: 14437 - DNA, 203 bp, Artificial sequence
  synthetic
ggcgcgccagtcctatcagtggtcatgatcttccggcgggtagtgctgttccggcgggttcaacagaaccggcgggttacgtctttccggcgggtaagaacacaccggcgggtatgctctcaccggcgggttttttatttccggcgggtggaaagctcccggcgggttacgaatagccggcgggttatcgactcggaccgatg

SEQ ID NO: 14438 - DNA, 203 bp, Artificial sequence
  synthetic
ggcgcgccagtcctcacagtggttatgatcttcgtcaattcctttatgttcgtcaattcctttaagaacgtcaattcctttactttcgtcaattcctttacacacgtcaattcctttactcacgtcaattcctttaatttcgtcaattcctttagctccgtcaattcctttaatagccaaccctttatcgactcggaccgatg

SEQ ID NO: 14439 - DNA, 203 bp, Artificial sequence
  synthetic
ggcgcgccagtccttgtagtggtaatgatctttactccctaagtgctgtttactcccgttcaacagaatactcccagtacgtcttttactcccgaaagaacacatactcccttatgctctcatactccctatttttattttactcccaaggaaagctctactcccagtacgaatagtactccctttatcgactcggaccgatg

SEQ ID NO: 14440 - DNA, 203 bp, Artificial sequence
  synthetic
ggcgcgccagtcctttggtgactgatttgacccgaggcttcttagaagaattcttggcaaatccaagtttcttggcaaaatgtgctttcttggcaaaagaatgattcttggcaaaaaaaattttcttggcaaattttattttcttggcaaagctgaaattcttggcaaacgaaatcttcttggcaaaacgactcggaccgatg

SEQ ID NO: 14441 - DNA, 203 bp, Artificial sequence
  synthetic
ggcgcgccagtcctacgtactcgtatttgacccgaggcttcttagaagaattttttaacattccaagtttatctaatagatgtgctatgaagagaacagaatgaaccggccgtaaaaaaattaccggccgtatttttattaccggccgtgagctgaaaaccggccgtggcgaaatcaccggccgtaaacgactcggaccgatg

SEQ ID NO: 14442 - DNA, 203 bp, Artificial sequence
  synthetic
ggcgcgccagtcctttcaaccggtatttgacccgaggcttcttagaagaattttttaacattccaagtttatctaatagatgtgctatgaagagaacagaatgacacggaatcgagaaaattcacggaatcgagaatattcacggaatcgagaagaaacacggaatcgagaaaatcaaaattcataaacgactcggaccgatg

SEQ ID NO: 14443 - DNA, 203 bp, Artificial sequence
  synthetic
ggcgcgccagtcctccatgaagatatttgacccgaggcttcttagaagaattttttaacattccaagtttatctaatagatgtgctatgaagagaacagaatgatactcccttaaaaaaatttactcccttatttttatttactcccatgagctgaaatactcccgtggcgaaatctactcccataaacgactcggaccgatg

SEQ ID NO: 14444 - DNA, 203 bp, Artificial sequence
  synthetic
ggcgcgccagtccttcgtcacaagatttgacccgaggcttcttagaagaattttttaacattccaagtttatctaatagatgtgctatgaagagaacagaatgatgggactttaaaaaaattaccggccgtatttttattaccggccgtgagctgaaaaccggccgtggcgaaatcaccggccgtaaacgactcggaccgatg

SEQ ID NO: 14445 - DNA, 203 bp, Artificial sequence
  synthetic
ggcgcgccagtcctagaccgagttatttgacccgaggcttcttagaagaattttttaacattccaagtttatctaatagatgtgctatgaagagaacagaatgatgggactttaaaaaaatttttacagttatttttattcgtcaattcctttagaaacgtcaattcctttaaatcaaaattcataaacgactcggaccgatg

SEQ ID NO: 14446 - DNA, 203 bp, Artificial sequence
  synthetic
ggcgcgccagtccttaaaccactaatttgacccgaggcttcttagaagaattttttaacattccaagtttatctaatagatgtgcttactcccgaacagaatgatactcccttaaaaaaatttactcccttatttttatttactcccatgagctgaaatactcccgtggcgaaatctactcccataaacgactcggaccgatg

SEQ ID NO: 14447 - DNA, 203 bp, Artificial sequence
  synthetic
ggcgcgccagtcctgattctgaggatttgaccttcttggcaaaagaagaattcttggcaaatccaagtttcttggcaaaatgtgctttcttggcaaaagaatgattcttggcaaaaaaaattttcttggcaaattttattttcttggcaaagctgaaattcttggcaaacgaaatcttcttggcaaaacgactcggaccgatg

SEQ ID NO: 14448 - DNA, 203 bp, Artificial sequence
  synthetic
ggcgcgccagtcctcctcaagcttcaaagagcagttctgtcaaagaaaacaacataaatcaggtacagaatttcagagtgggatataccggccgtagtgtgaagaccggccgtcattaaaccaccggccgttagaactgaaccggccgtaagaaaattaccggccgtttaaaactgaccggccgtatccgactcggaccgatg

SEQ ID NO: 14449 - DNA, 203 bp, Artificial sequence
  synthetic
ggcgcgccagtcctatgtgcacaacaaagagcagttctgtcaaagaaaacaacataaatcaggtacagaatttcagagtgggatatcagatctttagtgtgaagatacatctacattaaaccaggaatcactagaactgacacggaatcgagaaaattcacggaatcgagaaactgtgaaggttgatccgactcggaccgatg

SEQ ID NO: 14450 - DNA, 203 bp, Artificial sequence
  synthetic
ggcgcgccagtcctcaaaggtgttcaaagagcagttctgtcaaagaaaacaacataaatcaggtacagaatttcagagtgggatatcagatctttagtgtgaagatacatctacattaaaccaggaatcactagaactgacatttggacaagaaaattccggcgggtttaaaactgccggcgggtatccgactcggaccgatg

SEQ ID NO: 14451 - DNA, 203 bp, Artificial sequence
  synthetic
ggcgcgccagtcctgagaagtactcaaagagcagttctgtcaaagaaaacccggcgggtcaggtacagccggcgggtgtgggatatccggcgggtagtgtgaagccggcgggtcattaaaccccggcgggttagaactgaccggcgggtaagaaaattccggcgggtttaaaactgccggcgggtatccgactcggaccgatg

SEQ ID NO: 14452 - DNA, 203 bp, Artificial sequence
  synthetic
ggcgcgccagtcctgaccaacttacaaagagccgtcaattcctttaaaaccgtcaattcctttaacagcgtcaattcctttaatatcgtcaattcctttagaagcgtcaattcctttaaacccgtcaattcctttactgacgtcaattcctttaaattcgtcaattcctttaactgtgaaggttgatccgactcggaccgatg

SEQ ID NO: 14453 - DNA, 203 bp, Artificial sequence
  synthetic
ggcgcgccagtcctgaggtagtttcaccggccgttgtgttcactagcaacctcaaacagacaccatggtgcatctgactcctgaggagaagtctgccgttactgccctgtggggcaaggtgaacgtggatgaagttggtggtgaggccctgggcaggctgctggtggtctaccccgtcaattcctttacgactcggaccgatg

SEQ ID NO: 14454 - DNA, 203 bp, Artificial sequence
  synthetic
ggcgcgccagtcctgacgttgtatcaccggccgttgtgttcactagcaacctcaaacagacaccatggtgcatctgactcctgaggagaagtctgccgttactgccctgtggggcaaggtgaacgtggatgaagttggtggtgaggccctgggcaggctgctggtggtctacccttggacccagaggtcgactcggaccgatg

SEQ ID NO: 14455 - DNA, 203 bp, Artificial sequence
  synthetic
ggcgcgccagtccttttgagtcgtcattggctcgtcaattcctttattgacgtcaattcctttaatagcgtcaattcctttaatcccgtcaattcctttactatcgtcaattcctttattggcgtcaattcctttaattacgtcaattcctttactctcgtcaattcctttacactcaatacagcaaacgactcggaccgatg

SEQ ID NO: 14456 - DNA, 203 bp, Artificial sequence
  synthetic
ggcgcgccagtccttttgtaagcacattggctgcttatggtgacaattgacaaattgttaccatatagcgtcaattcctttaatcccgtcaattcctttactatcgtcaattcctttattggcgtcaattcctttaattacgtcaattcctttactctcgtcaattcctttacactcaatacagcaaacgactcggaccgatg

SEQ ID NO: 14457 - DNA, 203 bp, Artificial sequence
  synthetic
ggcgcgccagtcctctgcagtacacattggctgcttatggtgacaattgacaaattgttaccatatagctattggattggccatccggtgacaaacagagctatcgtcaattcctttattggcgtcaattcctttaattacgtcaattcctttactctcgtcaattcctttacactcaatacagcaaacgactcggaccgatg

SEQ ID NO: 14458 - DNA, 203 bp, Artificial sequence
  synthetic
ggcgcgccagtccttctacagcatcattggctgcttatggtgacaattgacaaattgttaccatatagctattggattggccatccggtgacaaacagagctattgtttacttgtttgttggcacggaatcgagaaattacacggaatcgagaactctcacggaatcgagaacactcaatacagcaaacgactcggaccgatg

SEQ ID NO: 14459 - DNA, 203 bp, Artificial sequence
  synthetic
ggcgcgccagtccttgtgctgtagcattggctgcttatggtgacaattgacaaattgttaccatatagctattggattggccatccggtgacaaacagagctattgtttacttgtttgttggcgtcaattcctttaattacgtcaattcctttactctcgtcaattcctttacactcaatacagcaaacgactcggaccgatg

SEQ ID NO: 14460 - DNA, 203 bp, Artificial sequence
  synthetic
ggcgcgccagtcctgaatctcactcattggctgcttatggtgacaattgacaaattgttaccatatagctattggattggccatccggtgacaaacagagctattgtttacttgtttgttggtttcataccattaaattacaaggtcttagaaactctcaactttattttgacactcaatacagcaaacgactcggaccgatg

SEQ ID NO: 14461 - DNA, 203 bp, Artificial sequence
  synthetic
ggcgcgccagtcctagtgctgtcacattggctgcttatggtgacaattgacaaattgttaccatatagctattggattggccatccggtgacaaacagagctattgtttacttgtttgttggtttcataccattaaattacaaggtcttagaaactctcaactttattttgacactccggcgggtaaacgactcggaccgatg

SEQ ID NO: 14462 - DNA, 203 bp, Artificial sequence
  synthetic
ggcgcgccagtcctgacgttgaggcattggctgcttatggtgacaattgacaaattgttaccatatagctattggattggccatccggtgacaaacagagctattgtttacttgtttgttggtttcataccattaaattacaaggtcttagaaactctccggcgggttttgacactccggcgggtaaacgactcggaccgatg

SEQ ID NO: 14463 - DNA, 203 bp, Artificial sequence
  synthetic
ggcgcgccagtcctaatcagttttcattggctgcttatggtgacaattgacaaattgttaccatatagctattggattggccatccggtgacaaacagagctattgtttacttgtttgttggtttcataccattaaattacaaggtcttagaaactctttcttggcaaatgacactttcttggcaaaacgactcggaccgatg

SEQ ID NO: 14464 - DNA, 203 bp, Artificial sequence
  synthetic
ggcgcgccagtcctctcaaggccacattggctgcttatggtgacaattgacaaattgttaccatatagctattggattggccatccggtgacaaacagagctattgtttacttgtttgttggtttcataccattaaattacgtcaattcctttactctcgtcaattcctttacactcaatacagcaaacgactcggaccgatg

SEQ ID NO: 14465 - DNA, 203 bp, Artificial sequence
  synthetic
ggcgcgccagtcctcagtttctgcccacggaatcgagaatcactagcaacctcaaacagacaccatggtgcatctgactcctgaggagaagtctgccgttactgccctgtggggcaaggtgaacgtggatgaagttggtggtgaggccctgggcaggctgctggtggtctacccttggaaccggccgtcgactcggaccgatg

SEQ ID NO: 14466 - DNA, 203 bp, Artificial sequence
  synthetic
ggcgcgccagtcctaatgtacagcccatgatgcctcgctcccatcagccgaccggccgtccacatgaaaccggccgtcaagaagcgaccggccgtattgatgaaaccggccgtgaaatagacaccggccgtgaacaagccaccggccgtattttgaaaaccggccgtaaatataacaccggccgtcaacgactcggaccgatg

SEQ ID NO: 14467 - DNA, 203 bp, Artificial sequence
  synthetic
ggcgcgccagtcctctaagagtgcccatgatgcctcgctcccatcagccgccgccgccgccacatgaaaaagaacagcaagaagcgattgaacacattgatgaagtacaaaatgaaatagacaccggccgtgaacaagccaccggccgtattttgaaaaccggccgtaaatataacaccggccgtcaacgactcggaccgatg

SEQ ID NO: 14468 - DNA, 203 bp, Artificial sequence
  synthetic
ggcgcgccagtcctacgttcttgcccatgatgcctcgctcccatcagccgccgccgccgccacatgaaaaagaacagcaagaagcgattgaacacattgatgaagtacaaaatgaaatagacagacttaatgaacaagccagtgaggagattttgaaacgtcaattcctttataacaaactccgccaacgactcggaccgatg

SEQ ID NO: 14469 - DNA, 203 bp, Artificial sequence
  synthetic
ggcgcgccagtcctaaagtgttgcccatgatgcctcgctcccatcagccgccgccgccgccacatgaaaaagaacagcaagaagcgattgaacacattgatgaagtacaaaatgaaatagacagacttaatgaacaagccagtgaggagattttgaaagtagaacagaaatataacccggcgggtcaacgactcggaccgatg

SEQ ID NO: 14470 - DNA, 203 bp, Artificial sequence
  synthetic
ggcgcgccagtccttagtttgagcccatgatgcctcgctcccatcagccgccgccgccgccacatgaaaaagaacagcaagaagcgattgaacacattgatgaagtacaaaatgaaatagacagacttaatgaacaagcctactcccagattttgaaatactcccagaaatataactactcccgccaacgactcggaccgatg

SEQ ID NO: 14471 - DNA, 203 bp, Artificial sequence
  synthetic
ggcgcgccagtcctaggtttgtgcccatgatgcctcgctcccatcagccgccgccgccgccacatgaaaaagaacagcaagaagcgccggcgggtattgatgaaccggcgggtgaaatagacccggcgggtgaacaagccccggcgggtattttgaaaccggcgggtaaatataacccggcgggtcaacgactcggaccgatg

SEQ ID NO: 14472 - DNA, 203 bp, Artificial sequence
  synthetic
ggcgcgccagtcctagaagcaggcccatgatgcctcgctcccatcagccgccgccgccgccacatgaacgtcaattcctttaagcgcgtcaattcctttatgaacgtcaattcctttaagaccgtcaattcctttaagcccgtcaattcctttagaaacgtcaattcctttataacaaactccgccaacgactcggaccgatg

SEQ ID NO: 14473 - DNA, 203 bp, Artificial sequence
  synthetic
ggcgcgccagtcctgctagtctgtccatgatgcctcgctcccatcagccgcgtcaattcctttatgaacgtcaattcctttaagcgcgtcaattcctttatgaacgtcaattcctttaagaccgtcaattcctttaagcccgtcaattcctttagaaacgtcaattcctttataacaaactccgccaacgactcggaccgatg

SEQ ID NO: 14474 - DNA, 203 bp, Artificial sequence
  synthetic
ggcgcgccagtcctgcttgagcttcccactatcacggaatcgagaaagttcacggaatcgagaacgaacacggaatcgagaaccaccacggaatcgagaagctacacggaatcgagaaaaaacacggaatcgagaacccgcacggaatcgagaaccttcacggaatcgagaaggtggtagctgcaacccgactcggaccgatg

SEQ ID NO: 14475 - DNA, 203 bp, Artificial sequence
  synthetic
ggcgcgccagtcctgcctcttaagcccactatccggcgggtctccgagttccggcgggtatggccgaaccggcgggttggggccacccggcgggtgccgtgctaccggcgggtaggggaaaaccggcgggtgtgaccccgccggcgggtccctcccttccggcgggtagtgtggtgccggcgggtacccgactcggaccgatg

SEQ ID NO: 14476 - DNA, 203 bp, Artificial sequence
  synthetic
ggcgcgccagtcctgctcgtcaggcccactattgttgtgggctccgagttcctctagggatggccgaaaggcagccatggggccaccacggaatcgagaagctacacggaatcgagaaaaaacacggaatcgagaacccgcacggaatcgagaaccttcacggaatcgagaaggtggtagctgcaacccgactcggaccgatg

SEQ ID NO: 14477 - DNA, 203 bp, Artificial sequence
  synthetic
ggcgcgccagtcctgcctaactctcccactattgttgtgggctccgagttcctctagggatggccgaaaggcagccatggggccacccaggcggcgccgtgctacacggaatcgagaaaaaacacggaatcgagaacccgcacggaatcgagaaccttcacggaatcgagaaggtggtagctgcaacccgactcggaccgatg

SEQ ID NO: 14478 - DNA, 203 bp, Artificial sequence
  synthetic
ggcgcgccagtcctgcacagtagccccactattgttgtgggctccgagttcctctagggatggccgaaaggcagccatggggccacccaggcggcgccgtgctacaggcggcaaggggaaaaatccttcgggtgaccccgcgtcaattcctttaccttcgtcaattcctttaggtggtagctgcaacccgactcggaccgatg

SEQ ID NO: 14479 - DNA, 203 bp, Artificial sequence
  synthetic
ggcgcgccagtcctgcaccttcaacccactattgttgtgggctccgagttcctctagggatggccgaaaggcagccatggggccacccaggcggcgccgtgctacaggcggcaaggggaaaaatccttcgggtgaccccgggtggcattccctcccttaccggccgtagtgtggtgaccggccgtacccgactcggaccgatg

SEQ ID NO: 14480 - DNA, 203 bp, Artificial sequence
  synthetic
ggcgcgccagtcctgctactctagcccactattgttgtgggctccgagttcctctagggatggccgaaaggcagccatggggccacccaggcggcgccgtgctacaggcggcaaggggaaaaatccttcgggtgaccccgggtggcattccctcccttagcagcatgagtgtggtgtactccccaacccgactcggaccgatg

SEQ ID NO: 14481 - DNA, 203 bp, Artificial sequence
  synthetic
ggcgcgccagtcctgctcaagttgcccactattgttgtgggctccgagttcctctagggatggccgaaaggcagccatggggccacccaggcggcgccgtgctacaggcggcaaggggaaaaatccttcgggtgaccccgggtggcattccctccctttactccctgagtgtggtgtactccccaacccgactcggaccgatg

SEQ ID NO: 14482 - DNA, 203 bp, Artificial sequence
  synthetic
ggcgcgccagtcctgcctagtagtcccactattgttgtgggctccgagttcctctagggatggccgaaaggcagccatggggccacccaggcggcgccgtgctacaggcggcaaggggaaaaatccttcgggtgaccccgggtggcattccctcccttttcttggcaaatgtggtgttcttggcaaaccgactcggaccgatg

SEQ ID NO: 14483 - DNA, 203 bp, Artificial sequence
  synthetic
ggcgcgccagtcctgctctgcaagcccactattgttgtgggctccgagttcctctagggatggccgaaaggcagccatggggccacccaggcggcgccgtgctacaggcggcaaggggaaaaatccttcgggtgaccccgtactcccttccctccctttactccctgagtgtggtgtactccccaacccgactcggaccgatg

SEQ ID NO: 14484 - DNA, 203 bp, Artificial sequence
  synthetic
ggcgcgccagtcctgctcacctggcccactattgttgtgggctccgagttcctctagggatggccgaaaggcagccatggggccacccaggcggcgccgtgctacaggcggcaaggggaaaatactcccgggtgaccccgtactcccttccctccctttactccctgagtgtggtgtactccccaacccgactcggaccgatg

SEQ ID NO: 14485 - DNA, 203 bp, Artificial sequence
  synthetic
ggcgcgccagtcctgctcttaagacccactattgttgtgggctccgagttcctctagggatggccgaaaggcagccatggggccacccaggcggcgccgtgctacgtcaattcctttaaaaacgtcaattcctttacccgcgtcaattcctttaccttcgtcaattcctttaggtggtagctgcaacccgactcggaccgatg

SEQ ID NO: 14486 - DNA, 203 bp, Artificial sequence
  synthetic
ggcgcgccagtcctgcagtatgcacccactattgttgtgggctccgagttcctctagggatggccgaaaggcagccatggggccacccaggcggcgccgtgctatactccccaaggggaaaatactcccgggtgaccccgtactcccttccctccctttactccctgagtgtggtgtactccccaacccgactcggaccgatg

SEQ ID NO: 14487 - DNA, 203 bp, Artificial sequence
  synthetic
ggcgcgccagtcctagagccttcacccactattgttgtgggctccgagttcctctagggatggccgaacgtcaattcctttaccaccgtcaattcctttagctacgtcaattcctttaaaaacgtcaattcctttacccgcgtcaattcctttaccttcgtcaattcctttaggtggtagctgcaacccgactcggaccgatg

SEQ ID NO: 14488 - DNA, 203 bp, Artificial sequence
  synthetic
ggcgcgccagtcctgaagccttttcccactattgttgtgggctccgagttcgtcaattcctttacgaacgtcaattcctttaccaccgtcaattcctttagctacgtcaattcctttaaaaacgtcaattcctttacccgcgtcaattcctttaccttcgtcaattcctttaggtggtagctgcaacccgactcggaccgatg

SEQ ID NO: 14489 - DNA, 203 bp, Artificial sequence
  synthetic
ggcgcgccagtcctacaagtgctccccactatttcttggcaaaccgagttttcttggcaaaggccgaattcttggcaaagggccacttcttggcaaacgtgctattcttggcaaagggaaaattcttggcaaagaccccgttcttggcaaactcccttttcttggcaaatgtggtgttcttggcaaaccgactcggaccgatg

SEQ ID NO: 14490 - DNA, 203 bp, Artificial sequence
  synthetic
ggcgcgccagtcctaaagaaggatcccggcgggttgtgttcactagcaacctcaaacagacaccatggtgcatctgactcctgaggagaagtctgccgttactgccctgtggggcaaggtgaacgtggatgaagttggtggtgaggccctgggcaggctgctggtggtctaccccgtcaattcctttacgactcggaccgatg

SEQ ID NO: 14491 - DNA, 203 bp, Artificial sequence
  synthetic
ggcgcgccagtcctctctggactgcccggcgggttgtgttcactagcaacctcaaacagacaccatggtgcatctgactcctgaggagaagtctgccgttactgccctgtggggcaaggtgaacgtggatgaagttggtggtgaggccctgggcaggctgctggtggtctacccttggacctactccccgactcggaccgatg

SEQ ID NO: 14492 - DNA, 203 bp, Artificial sequence
  synthetic
ggcgcgccagtccttcaacgtaggccgcccgccacggaatcgagaacccccacggaatcgagaacccccacggaatcgagaaccttcacggaatcgagaactcgcacggaatcgagaaggctcacggaatcgagaagtgacacggaatcgagaaactccacggaatcgagaacagaacactgctcgaccgactcggaccgatg

SEQ ID NO: 14493 - DNA, 203 bp, Artificial sequence
  synthetic
ggcgcgccagtcctgagttctgtcccgcccgcccctattgttccgcccccaccggccgtcccttccccaccggccgtgctccccttaccggccgtgtcgcctcgaccggccgttttttggctaccggccgtaaccagtgaaccggccgttgaccactcaccggccgtctccccagaaccggccgtgaccgactcggaccgatg

SEQ ID NO: 14494 - DNA, 203 bp, Artificial sequence
  synthetic
ggcgcgccagtcctagctgtacacccgcccgcccctattgttccgccccccgtcaattcctttacccccgtcaattcctttaccttcgtcaattcctttactcgcgtcaattcctttaggctcgtcaattcctttagtgacgtcaattcctttaactccgtcaattcctttacagaacactgctcgaccgactcggaccgatg

SEQ ID NO: 14495 - DNA, 203 bp, Artificial sequence
  synthetic
ggcgcgccagtcctgtagtgctaaccgcccgcccctattgttccgcccccggcctcccgcccttccccccggcgggtgctccccttccggcgggtgtcgcctcgccggcgggttttttggctccggcgggtaaccagtgaccggcgggttgaccactcccggcgggtctccccagaccggcgggtgaccgactcggaccgatg

SEQ ID NO: 14496 - DNA, 203 bp, Artificial sequence
  synthetic
ggcgcgccagtcctgtgctctcgtccgcccgcccctattgttccgcccccggcctcccgcccttccccttcccgcccgctccccttaccggccgtgtcgcctcgaccggccgttttttggctaccggccgtaaccagtgaaccggccgttgaccactcaccggccgtctccccagaaccggccgtgaccgactcggaccgatg

SEQ ID NO: 14497 - DNA, 203 bp, Artificial sequence
  synthetic
ggcgcgccagtcctctgtgtacacccgcccgcccctattgttccgcccccggcctcccgcccttccccttcccgcccgctcccctttactccccagtcgcctcgtactcccagtttttggcttactcccccaaccagtgatactccccttgaccactctactcccagctccccagatactccctcgaccgactcggaccgatg

SEQ ID NO: 14498 - DNA, 203 bp, Artificial sequence
  synthetic
ggcgcgccagtcctgtgaatgttgccgcccgcccctattgttccgcccccggcctcccgcccttccccttcccgcccgctccccttttcccctcagtcgcctcgaccggccgttttttggctaccggccgtaaccagtgaaccggccgttgaccactcaccggccgtctccccagaaccggccgtgaccgactcggaccgatg

SEQ ID NO: 14499 - DNA, 203 bp, Artificial sequence
  synthetic
ggcgcgccagtcctgaccgagaacccgcccgcccctattgttccgcccccggcctcccgcccttccccttcccgcccgctccccttttcccctcagtcgcctcgcgcctgcagtttttggctccggcgggtaaccagtgaccggcgggttgaccactcccggcgggtctccccagaccggcgggtgaccgactcggaccgatg

SEQ ID NO: 14500 - DNA, 203 bp, Artificial sequence
  synthetic
ggcgcgccagtcctgttactggacccgcccgcccctattgttccgcccccggcctcccgcccttccccttcccgcccgctccccttttcccctcagtcgcctcgcgcctgcagtttttggctttcacccccaaccagtgaaccggccgttgaccactcaccggccgtctccccagaaccggccgtgaccgactcggaccgatg

SEQ ID NO: 14501 - DNA, 203 bp, Artificial sequence
  synthetic
ggcgcgccagtcctgtctacccagccgcccgcccctattgttccgcccccggcctcccgcccttccccttcccgcccgctccccttttcccctcagtcgcctcgcgcctgcagtttttggctttcacccccaaccagtgaccaaagacttgaccactcaaagtccagctccccagaccggcgggtgaccgactcggaccgatg

SEQ ID NO: 14502 - DNA, 203 bp, Artificial sequence
  synthetic
ggcgcgccagtcctgttgtaactgccgcccgcccctattgttccgcccccggcctcccgcccttccccttcccgcccgctccccttttcccctcagtcgcctcgcgcctgcagtttttggctttcacccccaaccagtgaccaaagacttgaccactccacggaatcgagaacagaacactgctcgaccgactcggaccgatg

SEQ ID NO: 14503 - DNA, 203 bp, Artificial sequence
  synthetic
ggcgcgccagtcctgtggttgactccgcccgcccctattgttccgcccccggcctcccgcccttccccttcccgcccgctccccttttcccctcagtcgcctcgcgcctgcagtttttggctttcacccccaaccagtgaccaaagacttgaccactctactcccagctccccagatactccctcgaccgactcggaccgatg

SEQ ID NO: 14504 - DNA, 203 bp, Artificial sequence
  synthetic
ggcgcgccagtcctatgagttgacccgcccgcccctattgttccgcccccggcctcccgcccttccccttcccgcccgctccccttttcccctcagtcgcctcgcgcctgcagtttttggctttcacccccaaccagtgaccaaagacttgaccactcttcttggcaaaccccagattcttggcaaaccgactcggaccgatg

SEQ ID NO: 14505 - DNA, 203 bp, Artificial sequence
  synthetic
ggcgcgccagtcctgtgaatcagtccgcccgcccctattgttccgcccccggcctcccgcccttccccttcccgcccgctccccttttcccctcagtcgcctcgtactcccagtttttggcttactcccccaaccagtgatactccccttgaccactctactcccagctccccagatactccctcgaccgactcggaccgatg

SEQ ID NO: 14506 - DNA, 203 bp, Artificial sequence
  synthetic
ggcgcgccagtcctctgacaaaacccgcccgcccctattgttccgccccctactccccgcccttcccctactcccccgctcccctttactccccagtcgcctcgtactcccagtttttggcttactcccccaaccagtgatactccccttgaccactctactcccagctccccagatactccctcgaccgactcggaccgatg

SEQ ID NO: 14507 - DNA, 203 bp, Artificial sequence
  synthetic
ggcgcgccagtcctcagtaactacccgcccgcccctattgttccgcccccttcttggcaaacttccccttcttggcaaatccccttttcttggcaaacgcctcgttcttggcaaatttggctttcttggcaaaccagtgattcttggcaaaaccactcttcttggcaaaccccagattcttggcaaaccgactcggaccgatg

SEQ ID NO: 14508 - DNA, 203 bp, Artificial sequence
  synthetic
ggcgcgccagtcctgtcacagttgccgcccgcccggcgggttccgcccccccggcgggtcccttccccccggcgggtgctccccttccggcgggtgtcgcctcgccggcgggttttttggctccggcgggtaaccagtgaccggcgggttgaccactcccggcgggtctccccagaccggcgggtgaccgactcggaccgatg

SEQ ID NO: 14509 - DNA, 203 bp, Artificial sequence
  synthetic
ggcgcgccagtcctgagaccagacccgcccgccgtcaattcctttacccccgtcaattcctttacccccgtcaattcctttaccttcgtcaattcctttactcgcgtcaattcctttaggctcgtcaattcctttagtgacgtcaattcctttaactccgtcaattcctttacagaacactgctcgaccgactcggaccgatg

SEQ ID NO: 14510 - DNA, 203 bp, Artificial sequence
  synthetic
ggcgcgccagtcctgtcaagcgttccgcccgctactcccgttccgccccctactccccgcccttcccctactcccccgctcccctttactccccagtcgcctcgtactcccagtttttggcttactcccccaaccagtgatactccccttgaccactctactcccagctccccagatactccctcgaccgactcggaccgatg

SEQ ID NO: 14511 - DNA, 203 bp, Artificial sequence
  synthetic
ggcgcgccagtcctccagagaaacccgcccgcttcttggcaaacgcccccttcttggcaaacttccccttcttggcaaatccccttttcttggcaaacgcctcgttcttggcaaatttggctttcttggcaaaccagtgattcttggcaaaaccactcttcttggcaaaccccagattcttggcaaaccgactcggaccgatg

SEQ ID NO: 14512 - DNA, 203 bp, Artificial sequence
  synthetic
ggcgcgccagtcctgtagaccgacccgtcaattcctttatcactagcaacctcaaacagacaccatggtgcatctgactcctgaggagaagtctgccgttactgccctgtggggcaaggtgaacgtggatgaagttggtggtgaggccctgggcaggctgctggtggtctacccttggaccggcgggtcgactcggaccgatg

SEQ ID NO: 14513 - DNA, 203 bp, Artificial sequence
  synthetic
ggcgcgccagtcctgttcaagaaccgagatgccatgtggacgagggcgtgcacggaatcgagaataaccacggaatcgagaacttgcacggaatcgagaagttacacggaatcgagaaagtacacggaatcgagaagttgcacggaatcgagaaaccacacggaatcgagaactgctgtacatggcaccgactcggaccgatg

SEQ ID NO: 14514 - DNA, 203 bp, Artificial sequence
  synthetic
ggcgcgccagtcctgtcctgtcagcgagatgccatgtggacgagggcgtgcccacggtgtatcttaacccaggcgggggccgcttgggtgaaatagggttgttaccggcgggtttgggagtaccggcgggtagggtgttgccggcgggtgctacaccaccggcgggtaaactctgcccggcgggtcaccgactcggaccgatg

SEQ ID NO: 14515 - DNA, 203 bp, Artificial sequence
  synthetic
ggcgcgccagtcctttcacttgaccgagatgccatgtggacgagggcgtgcccacggtgtatcttaacccaggcgggggccgcttgggtgaaatagggttgttacgtcaattcctttaagtacgtcaattcctttagttgcgtcaattcctttaaccacgtcaattcctttactgctgtacatggcaccgactcggaccgatg

SEQ ID NO: 14516 - DNA, 203 bp, Artificial sequence
  synthetic
ggcgcgccagtcctgtctctgttacgagatgccatgtggacgagggcgtgcccacggtgtatcttaacccaggcgggggccgcttgggtgaaatagggttgttatacaagcctttgggagtaaccggccgtagggtgttgaccggccgtgctacaccaaccggccgtaaactctgcaccggccgtcaccgactcggaccgatg

SEQ ID NO: 14517 - DNA, 203 bp, Artificial sequence
  synthetic
ggcgcgccagtcctgtgagagcctcgagatgccatgtggacgagggcgtgcccacggtgtatcttaacccaggcgggggccgcttgggtgaaatagggttgttatacaagcctttgggagtacacggaatcgagaagttgcacggaatcgagaaaccacacggaatcgagaactgctgtacatggcaccgactcggaccgatg

SEQ ID NO: 14518 - DNA, 203 bp, Artificial sequence
  synthetic
ggcgcgccagtcctgtccactagtcgagatgccatgtggacgagggcgtgcccacggtgtatcttaacccaggcgggggccgcttgggtgaaatagggttgttatacaagcctttgggagtacagcctgatagggtgttgcagagacctgctacaccaccggcgggtaaactctgcccggcgggtcaccgactcggaccgatg

SEQ ID NO: 14519 - DNA, 203 bp, Artificial sequence
  synthetic
ggcgcgccagtcctgtgaccaaagcgagatgccatgtggacgagggcgtgcccacggtgtatcttaacccaggcgggggccgcttgggtgaaatagggttgttatacaagcctttgggagtacagcctgatagggtgttgcagagacctgctacaccacgtcaattcctttactgctgtacatggcaccgactcggaccgatg

SEQ ID NO: 14520 - DNA, 203 bp, Artificial sequence
  synthetic
ggcgcgccagtcctgagtagataccgagatgccatgtggacgagggcgtgcccacggtgtatcttaacccaggcgggggccgcttgggtgaaatagggttgttatacaagcctttgggagtacagcctgatagggtgttgcagagacctgctacaccactagtataaaaactctgcccggcgggtcaccgactcggaccgatg

SEQ ID NO: 14521 - DNA, 203 bp, Artificial sequence
  synthetic
ggcgcgccagtcctgtgaccggttcgagatgccatgtggacgagggcgtgcccacggtgtatcttaacccaggcgggggccgcttgggtgaaatagggttgttatacaagcctttgggagtacagcctgatagggtgttgcagagacctgctacaccattcttggcaaaactctgcttcttggcaaaccgactcggaccgatg

SEQ ID NO: 14522 - DNA, 203 bp, Artificial sequence
  synthetic
ggcgcgccagtcctgtcaacgtaccgagatgccatgtggacgagggcgtgcccacggtgtatcttaacccaggcgggggccgcttgggtgaaatagggttgttatacaagcctttgggagtacgtcaattcctttagttgcgtcaattcctttaaccacgtcaattcctttactgctgtacatggcaccgactcggaccgatg

SEQ ID NO: 14523 - DNA, 203 bp, Artificial sequence
  synthetic
ggcgcgccagtcctgcagtcagaccgagatgccatgtggacgagggcgtgcccacggtgtatcttaaccgtcaattcctttacttgcgtcaattcctttagttacgtcaattcctttaagtacgtcaattcctttagttgcgtcaattcctttaaccacgtcaattcctttactgctgtacatggcaccgactcggaccgatg

SEQ ID NO: 14524 - DNA, 203 bp, Artificial sequence
  synthetic
ggcgcgccagtcctagtatgcaaccgagatgccatgtggacgagggcgtgcccacggtgtatcttaacttcttggcaaaccgcttgttcttggcaaagttgttattcttggcaaagggagtattcttggcaaaggtgttgttcttggcaaatacaccattcttggcaaaactctgcttcttggcaaaccgactcggaccgatg

SEQ ID NO: 14525 - DNA, 203 bp, Artificial sequence
  synthetic
ggcgcgccagtccttgaatcctaccgagatgccatgtggacgagggcgtgttcttggcaaatcttaacttcttggcaaaccgcttgttcttggcaaagttgttattcttggcaaagggagtattcttggcaaaggtgttgttcttggcaaatacaccattcttggcaaaactctgcttcttggcaaaccgactcggaccgatg

SEQ ID NO: 14526 - DNA, 203 bp, Artificial sequence
  synthetic
ggcgcgccagtcctcagaagttaccgccgggcaccggccgtgagcgtgagaccggccgtgcgttgcgtaccggccgttctgtgagcaccggccgtatacaccataccggccgttcaccctccaccggccgtaaaatttataccggccgtgttatcattaccggccgttggtggcagaccggccgtaggcgactcggaccgatg

SEQ ID NO: 14527 - DNA, 203 bp, Artificial sequence
  synthetic
ggcgcgccagtccttgtcttggaccgccgggccacggaatcgagaatgagcacggaatcgagaagcgtcacggaatcgagaagagccacggaatcgagaaccatcacggaatcgagaactcccacggaatcgagaattatcacggaatcgagaacattcacggaatcgagaagcagacatgtccaaggcgactcggaccgatg

SEQ ID NO: 14528 - DNA, 203 bp, Artificial sequence
  synthetic
ggcgcgccagtcctgttaacagaccgccgggcccggcgggtgagcgtgagccggcgggtgcgttgcgtccggcgggttctgtgagcccggcgggtatacaccatccggcgggttcaccctccccggcgggtaaaatttatccggcgggtgttatcattccggcgggttggtggcagccggcgggtaggcgactcggaccgatg

SEQ ID NO: 14529 - DNA, 203 bp, Artificial sequence
  synthetic
ggcgcgccagtccttgcaagtaaccgccgggcctacagcgggagcgtgagaccggccgtgcgttgcgtaccggccgttctgtgagcaccggccgtatacaccataccggccgttcaccctccaccggccgtaaaatttataccggccgtgttatcattaccggccgttggtggcagaccggccgtaggcgactcggaccgatg

SEQ ID NO: 14530 - DNA, 203 bp, Artificial sequence
  synthetic
ggcgcgccagtccttaagtaggaccgccgggcctacagcgggagcgtgagcacggaatcgagaagcgtcacggaatcgagaagagccacggaatcgagaaccatcacggaatcgagaactcccacggaatcgagaattatcacggaatcgagaacattcacggaatcgagaagcagacatgtccaaggcgactcggaccgatg

SEQ ID NO: 14531 - DNA, 203 bp, Artificial sequence
  synthetic
ggcgcgccagtcctgtaactacagcgccgggcctacagcgggagcgtgagcgtcaattcctttagcgtcgtcaattcctttagagccgtcaattcctttaccatcgtcaattcctttactcccgtcaattcctttattatcgtcaattcctttacattcgtcaattcctttagcagacatgtccaaggcgactcggaccgatg

SEQ ID NO: 14532 - DNA, 203 bp, Artificial sequence
  synthetic
ggcgcgccagtcctgttcagagaacgccgggcctacagcgggagcgtgaggaaagccgtgcgttgcgtaccggccgttctgtgagcaccggccgtatacaccataccggccgttcaccctccaccggccgtaaaatttataccggccgtgttatcattaccggccgttggtggcagaccggccgtaggcgactcggaccgatg

SEQ ID NO: 14533 - DNA, 203 bp, Artificial sequence
  synthetic
ggcgcgccagtcctatcggtgaaccgccgggcctacagcgggagcgtgaggaaagccgtgcgttgcgtcgtcaattcctttagagccgtcaattcctttaccatcgtcaattcctttactcccgtcaattcctttattatcgtcaattcctttacattcgtcaattcctttagcagacatgtccaaggcgactcggaccgatg

SEQ ID NO: 14534 - DNA, 203 bp, Artificial sequence
  synthetic
ggcgcgccagtcctctaagttcaccgccgggcctacagcgggagcgtgaggaaagccgtgcgttgcgttactccccatctgtgagctactcccgtatacaccattactcccgctcaccctcctactcccaaaaaatttattactcccaagttatcatttactcccaatggtggcagtactccccaaggcgactcggaccgatg

SEQ ID NO: 14535 - DNA, 203 bp, Artificial sequence
  synthetic
ggcgcgccagtcctcaagaatcatcgccgggcctacagcgggagcgtgaggaaagccgtgcgttgcgttccaaggcatctgtgagcccgcggagtatacaccatcacggaatcgagaactcccacggaatcgagaattatcacggaatcgagaacattcacggaatcgagaagcagacatgtccaaggcgactcggaccgatg

SEQ ID NO: 14536 - DNA, 203 bp, Artificial sequence
  synthetic
ggcgcgccagtcctcaacgagttacgccgggcctacagcgggagcgtgaggaaagccgtgcgttgcgttccaaggcatctgtgagcccgcggagtatacaccatcgtcaattcctttactcccgtcaattcctttattatcgtcaattcctttacattcgtcaattcctttagcagacatgtccaaggcgactcggaccgatg

SEQ ID NO: 14537 - DNA, 203 bp, Artificial sequence
  synthetic
ggcgcgccagtcctccaacgatctcgccgggcctacagcgggagcgtgaggaaagccgtgcgttgcgttccaaggcatctgtgagcccgcggagtatacaccatgagcaaagctcaccctcccacggaatcgagaattatcacggaatcgagaacattcacggaatcgagaagcagacatgtccaaggcgactcggaccgatg

SEQ ID NO: 14538 - DNA, 203 bp, Artificial sequence
  synthetic
ggcgcgccagtcctctcttcaaagcgccgggcctacagcgggagcgtgaggaaagccgtgcgttgcgttccaaggcatctgtgagcccgcggagtatacaccatgagcaaagctcaccctcccgagttgaaaaaatttatcgtcaattcctttacattcgtcaattcctttagcagacatgtccaaggcgactcggaccgatg

SEQ ID NO: 14539 - DNA, 203 bp, Artificial sequence
  synthetic
ggcgcgccagtcctctcaccatgtcgccgggcctacagcgggagcgtgaggaaagccgtgcgttgcgttccaaggcatctgtgagcccgcggagtatacaccatgagcaaagctcaccctcccgagttgaaaaaatttatggacaagaagttatcattccggcgggttggtggcagccggcgggtaggcgactcggaccgatg

SEQ ID NO: 14540 - DNA, 203 bp, Artificial sequence
  synthetic
ggcgcgccagtcctctagagtaaacgccgggcctacagcgggagcgtgaggaaagccgtgcgttgcgttccaaggcatctgtgagcccgcggagtatacaccatgagcaaagctcaccctcccgagttgaaaaaatttatggacaagaagttatcattcgtcaattcctttagcagacatgtccaaggcgactcggaccgatg

SEQ ID NO: 14541 - DNA, 203 bp, Artificial sequence
  synthetic
ggcgcgccagtcctctgagcctaccgccgggcctacagcgggagcgtgaggaaagccgtgcgttgcgttccaaggcatctgtgagcccgcggagtatacaccatgagcaaagctcaccctcccgagttgaaaaaatttatggacaagaagttatcattgaaattaaatggtggcagaccggccgtaggcgactcggaccgatg

SEQ ID NO: 14542 - DNA, 203 bp, Artificial sequence
  synthetic
ggcgcgccagtccttcaaagagatcgccgggcctacagcgggagcgtgaggaaagccgtgcgttgcgttccaaggcatctgtgagcccgcggagtatacaccatgagcaaagctcaccctcccgagttgaaaaaatttatggacaagaagttatcattgaaattaaatggtggcagccggcgggtaggcgactcggaccgatg

SEQ ID NO: 14543 - DNA, 203 bp, Artificial sequence
  synthetic
ggcgcgccagtccttgaagacgaccgccgggcctacagcgggagcgtgaggaaagccgtgcgttgcgttccaaggcatctgtgagcccgcggagtatacaccatgagcaaagctcaccctcccgagttgaaaaaatttattactcccaagttatcatttactcccaatggtggcagtactccccaaggcgactcggaccgatg

SEQ ID NO: 14544 - DNA, 203 bp, Artificial sequence
  synthetic
ggcgcgccagtcctgatcacaagtcgccgggcctacagcgggagcgtgaggaaagccgtgcgttgcgttccaaggcatctgtgagcccgcggagtatacaccatgagcaaagctcaccctcccgagttgaaaaaatttatttcttggcaaatatcattttcttggcaaagtggcagttcttggcaaagcgactcggaccgatg

SEQ ID NO: 14545 - DNA, 203 bp, Artificial sequence
  synthetic
ggcgcgccagtcctacgctagacacgccgggcctacagcgggagcgtgaggaaagccgtgcgttgcgttccaaggcatctgtgagcccgcggagtatacaccattactcccgctcaccctcctactcccaaaaaatttattactcccaagttatcatttactcccaatggtggcagtactccccaaggcgactcggaccgatg

SEQ ID NO: 14546 - DNA, 203 bp, Artificial sequence
  synthetic
ggcgcgccagtccttaactagcgtcgccgggcctacagcgggagcgtgaggaaagccgtgcgttgcgttccaaggcatctgtgagcccgcggagtatacaccatttcttggcaaaaccctccttcttggcaaaaatttatttcttggcaaatatcattttcttggcaaagtggcagttcttggcaaagcgactcggaccgatg

SEQ ID NO: 14547 - DNA, 203 bp, Artificial sequence
  synthetic
ggcgcgccagtcctagagtcctagcgccgggcctacagcgggagcgtgaggaaagccgtgcgttgcgttccaaggcatctgtgagcccggcgggtatacaccatccggcgggttcaccctccccggcgggtaaaatttatccggcgggtgttatcattccggcgggttggtggcagccggcgggtaggcgactcggaccgatg

SEQ ID NO: 14548 - DNA, 203 bp, Artificial sequence
  synthetic
ggcgcgccagtcctcagagtcctacgccgggcctacagcgggagcgtgaggaaagccgtgcgttgcgttccaaggcatctgtgagccgtcaattcctttaccatcgtcaattcctttactcccgtcaattcctttattatcgtcaattcctttacattcgtcaattcctttagcagacatgtccaaggcgactcggaccgatg

SEQ ID NO: 14549 - DNA, 203 bp, Artificial sequence
  synthetic
ggcgcgccagtcctaaaccgttcactccggaaaccggccgtagaattcataccggccgtgaatttttaaccggccgtacaaaaagaaccggccgttgccgaaacaccggccgtttagagaataccggccgtaaaagagaaaccggccgtaaggaaaagaccggccgtgaacgtgaaaccggccgtctacgactcggaccgatg

SEQ ID NO: 14550 - DNA, 203 bp, Artificial sequence
  synthetic
ggcgcgccagtcctaccgttcatactccggaaagtgataacagaattcataccggccgtgaatttttaaccggccgtacaaaaagaaccggccgttgccgaaacaccggccgtttagagaataccggccgtaaaagagaaaccggccgtaaggaaaagaccggccgtgaacgtgaaaccggccgtctacgactcggaccgatg

SEQ ID NO: 14551 - DNA, 203 bp, Artificial sequence
  synthetic
ggcgcgccagtcctatggtcacagctccggaaagtgataacagaattcatcgtcaattcctttatttacgtcaattcctttaaagacgtcaattcctttaaaaccgtcaattcctttagaatcgtcaattcctttaagaacgtcaattcctttaaaagcgtcaattcctttatgaaaaggaagagctacgactcggaccgatg

SEQ ID NO: 14552 - DNA, 203 bp, Artificial sequence
  synthetic
ggcgcgccagtcctagctaacgtactccggaaagtgataacagaattcattgaagtggagaatttttaaagaaggtaacaaaaagagaaagaaaatgccgaaaccaggcacaattagagaatgaaaagaagaaaagagaaatagcagaaaaggaaaaggaaagaatagaacgtgaaccggcgggtctacgactcggaccgatg

SEQ ID NO: 14553 - DNA, 203 bp, Artificial sequence
  synthetic
ggcgcgccagtcctttgttcagtgctccggaaagtgataacagaattcattgaagtggagaatttttaaagaaggtaacaaaaagagaaagaaaatgccgaaaccaggcacaattagagaatgaaaagaagaaaagagaaatagcagaaaaggaaaaggaaagaatagaacgtgaattcttggcaaaacgactcggaccgatg

SEQ ID NO: 14554 - DNA, 203 bp, Artificial sequence
  synthetic
ggcgcgccagtcctctcaactgaactccggaaagtgataacagaattcattgaagtggagaatttttaaagaaggtaacaaaaagagaaagaaaatgccgaaaccaggcacaattagagaatgaaaagaagaaaagagaacgtcaattcctttaaaagcgtcaattcctttatgaaaaggaagagctacgactcggaccgatg

SEQ ID NO: 14555 - DNA, 203 bp, Artificial sequence
  synthetic
ggcgcgccagtcctagagactgaactccggaaagtgataacagaattcattgaagtggagaatttttaaagaaggtaacaaaaagagaaagaaaatgccgaaaccaggcacaattagagaatgaaaagaagaaaagagaattcttggcaaaggaaaagttcttggcaaaacgtgaattcttggcaaaacgactcggaccgatg

SEQ ID NO: 14556 - DNA, 203 bp, Artificial sequence
  synthetic
ggcgcgccagtcctgagtactgaactccggaaagtgataacagaattcattgaagtggagaatttttaaagaaggtaacaaaaagagaaagaaaatgccgaaaccgtcaattcctttagaatcgtcaattcctttaagaacgtcaattcctttaaaagcgtcaattcctttatgaaaaggaagagctacgactcggaccgatg

SEQ ID NO: 14557 - DNA, 203 bp, Artificial sequence
  synthetic
ggcgcgccagtccttcactgaaagctccggaaagtgataacagaattcattgaagtggagaatttttaaagaaggtaacaaaaagagaaagaaaatgccgaaacttcttggcaaaagagaatttcttggcaaaaagagaattcttggcaaaggaaaagttcttggcaaaacgtgaattcttggcaaaacgactcggaccgatg

SEQ ID NO: 14558 - DNA, 203 bp, Artificial sequence
  synthetic
ggcgcgccagtcctcccaacggtcctccggaaagtgataacagaattcattgaagtggagaatttttaaagaaggtaacaaaaagatactcccaatgccgaaactactcccaattagagaattactcccagaaaagagaatactcccaaaaggaaaagtactccctagaacgtgaatactcccagctacgactcggaccgatg

SEQ ID NO: 14559 - DNA, 203 bp, Artificial sequence
  synthetic
ggcgcgccagtcctgttgggtcagctccggaaagtgataacagaattcattgaagtggagaatttttaccggcgggtacaaaaagaccggcgggttgccgaaacccggcgggtttagagaatccggcgggtaaaagagaaccggcgggtaaggaaaagccggcgggtgaacgtgaaccggcgggtctacgactcggaccgatg

SEQ ID NO: 14560 - DNA, 203 bp, Artificial sequence
  synthetic
ggcgcgccagtcctaaagagagacctccggaattcttggcaaaaattcatttcttggcaaaatttttattcttggcaaaaaaaagattcttggcaaaccgaaacttcttggcaaaagagaatttcttggcaaaaagagaattcttggcaaaggaaaagttcttggcaaaacgtgaattcttggcaaaacgactcggaccgatg

SEQ ID NO: 14561 - DNA, 203 bp, Artificial sequence
  synthetic
ggcgcgccagtccttccacggtgcctgaagtgacaagccacgctgcttctcacggaatcgagaaccaacacggaatcgagaacccccacggaatcgagaagtcacacggaatcgagaacgttcacggaatcgagaaccaccacggaatcgagaaggatcacggaatcgagaaaacagaaagtaaaaaacgactcggaccgatg

SEQ ID NO: 14562 - DNA, 203 bp, Artificial sequence
  synthetic
ggcgcgccagtcctactcaccttactgaagtgacaagccacgctgcttctccggcgggtgctgaccaaccggcgggtatccaccccccggcgggtctcaggtcaccggcgggtgccctcgttccggcgggttatccccacccggcgggtggtgaggatccggcgggtcactcaacaccggcgggtaaacgactcggaccgatg

SEQ ID NO: 14563 - DNA, 203 bp, Artificial sequence
  synthetic
ggcgcgccagtcctacccaagcgactgaagtgacaagccacgctgcttctggagccaaagctgaccaacgtcaattcctttacccccgtcaattcctttagtcacgtcaattcctttacgttcgtcaattcctttaccaccgtcaattcctttaggatcgtcaattcctttaaacagaaagtaaaaaacgactcggaccgatg

SEQ ID NO: 14564 - DNA, 203 bp, Artificial sequence
  synthetic
ggcgcgccagtcctcccaagcttgctgaagtgacaagccacgctgcttctggagccaaagctgaccaagaagaacaaatccaccccaccggccgtctcaggtcaaccggccgtgccctcgttaccggccgttatccccacaccggccgtggtgaggataccggccgtcactcaacaaccggccgtaaacgactcggaccgatg

SEQ ID NO: 14565 - DNA, 203 bp, Artificial sequence
  synthetic
ggcgcgccagtcctgacccaagtcctgaagtgacaagccacgctgcttctggagccaaagctgaccaagaagaacaaatccaccccagatctagactcaggtcaaccggccgtgccctcgttaccggccgttatccccacaccggccgtggtgaggataccggccgtcactcaacaaccggccgtaaacgactcggaccgatg

SEQ ID NO: 14566 - DNA, 203 bp, Artificial sequence
  synthetic
ggcgcgccagtcctattcttgggtctgaagtgacaagccacgctgcttctggagccaaagctgaccaagaagaacaaatccaccccagatctagactcaggtcacctcctgaagccctcgttaccggccgttatccccacaccggccgtggtgaggataccggccgtcactcaacaaccggccgtaaacgactcggaccgatg

SEQ ID NO: 14567 - DNA, 203 bp, Artificial sequence
  synthetic
ggcgcgccagtcctagactacggtctgaagtgacaagccacgctgcttctggagccaaagctgaccaagaagaacaaatccaccccagatctagactcaggtcacctcctgaagccctcgttcagggtcgatatccccacatcaaggacggtgaggatcttaaagaccactcaacatactcccaaaaacgactcggaccgatg

SEQ ID NO: 14568 - DNA, 203 bp, Artificial sequence
  synthetic
ggcgcgccagtcctctaccgtaagctgaagtgacaagccacgctgcttctggagccaaagctgaccaagaagaacaaatccaccccagatctagactcaggtcacctcctgaagccctcgttcagggtcgatatccccactactcccacggtgaggattactcccaccactcaacatactcccaaaaacgactcggaccgatg

SEQ ID NO: 14569 - DNA, 203 bp, Artificial sequence
  synthetic
ggcgcgccagtcctctacggttaactgaagtgacaagccacgctgcttctggagccaaagctgaccaagaagaacaaatccaccccagatctagactcaggtcacctcctgaagccctcgttccggcgggttatccccacccggcgggtggtgaggatccggcgggtcactcaacaccggcgggtaaacgactcggaccgatg

SEQ ID NO: 14570 - DNA, 203 bp, Artificial sequence
  synthetic
ggcgcgccagtcctaatgcacattctgaagtgacaagccacgctgcttctggagccaaagctgaccaagaagaacaaatccaccccagatctagactcaggtcacgtcaattcctttacgttcgtcaattcctttaccaccgtcaattcctttaggatcgtcaattcctttaaacagaaagtaaaaaacgactcggaccgatg

SEQ ID NO: 14571 - DNA, 203 bp, Artificial sequence
  synthetic
ggcgcgccagtcctcagcagcctactgaagtgacaagccacgctgcttctggagccaaagctgaccaagaagaacaaatccacccccacggaatcgagaagtcacacggaatcgagaacgttcacggaatcgagaaccaccacggaatcgagaaggatcacggaatcgagaaaacagaaagtaaaaaacgactcggaccgatg

SEQ ID NO: 14572 - DNA, 203 bp, Artificial sequence
  synthetic
ggcgcgccagtcctaactttacttctgaagtgacaagccacgctgcttctggagccaaagctgaccaagaagaacaaatccacccctactcccgactcaggtcatactcccaagccctcgtttactcccgatatccccactactcccacggtgaggattactcccaccactcaacatactcccaaaaacgactcggaccgatg

SEQ ID NO: 14573 - DNA, 203 bp, Artificial sequence
  synthetic
ggcgcgccagtcctacttgggtctctgaagtgacaagccacgctgcttcttactcccaagctgaccaatactcccaaatccacccctactcccgactcaggtcatactcccaagccctcgtttactcccgatatccccactactcccacggtgaggattactcccaccactcaacatactcccaaaaacgactcggaccgatg

SEQ ID NO: 14574 - DNA, 203 bp, Artificial sequence
  synthetic
ggcgcgccagtcctagcacggtctctgaagtgcacggaatcgagaattctcacggaatcgagaaccaacacggaatcgagaacccccacggaatcgagaagtcacacggaatcgagaacgttcacggaatcgagaaccaccacggaatcgagaaggatcacggaatcgagaaaacagaaagtaaaaaacgactcggaccgatg

SEQ ID NO: 14575 - DNA, 203 bp, Artificial sequence
  synthetic
ggcgcgccagtcctacagaccgtactgaagtgttcttggcaaatgcttctttcttggcaaatgaccaattcttggcaaaccaccccttcttggcaaacaggtcattcttggcaaacctcgttttcttggcaaatccccacttcttggcaaatgaggatttcttggcaaactcaacattcttggcaaaacgactcggaccgatg

SEQ ID NO: 14576 - DNA, 203 bp, Artificial sequence
  synthetic
ggcgcgccagtcctccaccatgaactgacacaaccggccgtactagcaacctcaaacagacaccatggtgcatctgactcctgaggagaagtctgccgttactgccctgtggggcaaggtgaacgtggatgaagttggtggtgaggccctgggcaggctgctggtggtctaccccgtcaattcctttacgactcggaccgatg

SEQ ID NO: 14577 - DNA, 203 bp, Artificial sequence
  synthetic
ggcgcgccagtcctttttcaaaagctgacacaaccggccgtactagcaacctcaaacagacaccatggtgcatctgactcctgaggagaagtctgccgttactgccctgtggggcaaggtgaacgtggatgaagttggtggtgaggccctgggcaggctgctggtggtctacccttggacccagaggtcgactcggaccgatg

SEQ ID NO: 14578 - DNA, 203 bp, Artificial sequence
  synthetic
ggcgcgccagtcctagtaactgtactgacacaaccggccgtactagcaacctcaaacagacaccatggtgcatctgactcctgaggagaagtctgccgttactgccctgtggggcaaggtgaacgtggatgaagttggtggtgaggccctgggcaggctgctggtggtctacccttggacctactccccgactcggaccgatg

SEQ ID NO: 14579 - DNA, 203 bp, Artificial sequence
  synthetic
ggcgcgccagtccttctctgtagactgacacaaccgtcaattcctttaacctcaaacagacaccatggtgcatctgactcctgaggagaagtctgccgttactgccctgtggggcaaggtgaacgtggatgaagttggtggtgaggccctgggcaggctgctggtggtctaccccacggaatcgagaacgactcggaccgatg

SEQ ID NO: 14580 - DNA, 203 bp, Artificial sequence
  synthetic
ggcgcgccagtcctacgatacccactgacacaaccgtcaattcctttaacctcaaacagacaccatggtgcatctgactcctgaggagaagtctgccgttactgccctgtggggcaaggtgaacgtggatgaagttggtggtgaggccctgggcaggctgctggtggtctaccccgtcaattcctttacgactcggaccgatg

SEQ ID NO: 14581 - DNA, 203 bp, Artificial sequence
  synthetic
ggcgcgccagtcctacgtttcgttctgacacaaccgtcaattcctttaacctcaaacagacaccatggtgcatctgactcctgaggagaagtctgccgttactgccctgtggggcaaggtgaacgtggatgaagttggtggtgaggccctgggcaggctgctggtggtctacccttggacccagaggtcgactcggaccgatg

SEQ ID NO: 14582 - DNA, 203 bp, Artificial sequence
  synthetic
ggcgcgccagtcctttagctgcacctgacacaaccgtcaattcctttaacctcaaacagacaccatggtgcatctgactcctgaggagaagtctgccgttactgccctgtggggcaaggtgaacgtggatgaagttggtggtgaggccctgggcaggctgctggtggtctacccttggacctactccccgactcggaccgatg

SEQ ID NO: 14583 - DNA, 203 bp, Artificial sequence
  synthetic
ggcgcgccagtccttgcagctctgctgacacaactaccggccgtagcaacctcaaacagacaccatggtgcatctgactcctgaggagaagtctgccgttactgccctgtggggcaaggtgaacgtggatgaagttggtggtgaggccctgggcaggctgctggtggtctacccttgttcttggcaaacgactcggaccgatg

SEQ ID NO: 14584 - DNA, 203 bp, Artificial sequence
  synthetic
ggcgcgccagtcctgtgcagctgcctgacacaactactcccactagcaacctcaaacagacaccatggtgcatctgactcctgaggagaagtctgccgttactgccctgtggggcaaggtgaacgtggatgaagttggtggtgaggccctgggcaggctgctggtggtctaccccacggaatcgagaacgactcggaccgatg

SEQ ID NO: 14585 - DNA, 203 bp, Artificial sequence
  synthetic
ggcgcgccagtccttctacaaggcctgacacaactactcccactagcaacctcaaacagacaccatggtgcatctgactcctgaggagaagtctgccgttactgccctgtggggcaaggtgaacgtggatgaagttggtggtgaggccctgggcaggctgctggtggtctacccttggacctactccccgactcggaccgatg

SEQ ID NO: 14586 - DNA, 203 bp, Artificial sequence
  synthetic
ggcgcgccagtcctccacctgcacctgacacaactccggcgggtagcaacctcaaacagacaccatggtgcatctgactcctgaggagaagtctgccgttactgccctgtggggcaaggtgaacgtggatgaagttggtggtgaggccctgggcaggctgctggtggtctacccttgttcttggcaaacgactcggaccgatg

SEQ ID NO: 14587 - DNA, 203 bp, Artificial sequence
  synthetic
ggcgcgccagtcctttcatactaactgacacaactgtgtaccggccgtacctcaaacagacaccatggtgcatctgactcctgaggagaagtctgccgttactgccctgtggggcaaggtgaacgtggatgaagttggtggtgaggccctgggcaggctgctggtggtctaccccacggaatcgagaacgactcggaccgatg

SEQ ID NO: 14588 - DNA, 203 bp, Artificial sequence
  synthetic
ggcgcgccagtcctaatactagctctgacacaactgtgtaccggccgtacctcaaacagacaccatggtgcatctgactcctgaggagaagtctgccgttactgccctgtggggcaaggtgaacgtggatgaagttggtggtgaggccctgggcaggctgctggtggtctaccccgtcaattcctttacgactcggaccgatg

SEQ ID NO: 14589 - DNA, 203 bp, Artificial sequence
  synthetic
ggcgcgccagtcctaggtgagtggctgacacaactgtgtaccggccgtacctcaaacagacaccatggtgcatctgactcctgaggagaagtctgccgttactgccctgtggggcaaggtgaacgtggatgaagttggtggtgaggccctgggcaggctgctggtggtctacccttggacccagaggtcgactcggaccgatg

SEQ ID NO: 14590 - DNA, 203 bp, Artificial sequence
  synthetic
ggcgcgccagtcctgaaactgcatctgacacaactgtgtcacggaatcgagaaaaacagacaccatggtgcatctgactcctgaggagaagtctgccgttactgccctgtggggcaaggtgaacgtggatgaagttggtggtgaggccctgggcaggctgctggtggtctacccttggaaccggccgtcgactcggaccgatg

SEQ ID NO: 14591 - DNA, 203 bp, Artificial sequence
  synthetic
ggcgcgccagtcctccaagcctgtctgacacaactgtgtcacggaatcgagaaaaacagacaccatggtgcatctgactcctgaggagaagtctgccgttactgccctgtggggcaaggtgaacgtggatgaagttggtggtgaggccctgggcaggctgctggtggtctacccttggaccggcgggtcgactcggaccgatg

SEQ ID NO: 14592 - DNA, 203 bp, Artificial sequence
  synthetic
ggcgcgccagtcctcctctctcgtctgacacaactgtgtccggcgggtacctcaaacagacaccatggtgcatctgactcctgaggagaagtctgccgttactgccctgtggggcaaggtgaacgtggatgaagttggtggtgaggccctgggcaggctgctggtggtctaccccgtcaattcctttacgactcggaccgatg

SEQ ID NO: 14593 - DNA, 203 bp, Artificial sequence
  synthetic
ggcgcgccagtccttaggatcaagctgacacaactgtgtccggcgggtacctcaaacagacaccatggtgcatctgactcctgaggagaagtctgccgttactgccctgtggggcaaggtgaacgtggatgaagttggtggtgaggccctgggcaggctgctggtggtctacccttggacccagaggtcgactcggaccgatg

SEQ ID NO: 14594 - DNA, 203 bp, Artificial sequence
  synthetic
ggcgcgccagtcctgacgacacctctgacacaactgtgtccggcgggtacctcaaacagacaccatggtgcatctgactcctgaggagaagtctgccgttactgccctgtggggcaaggtgaacgtggatgaagttggtggtgaggccctgggcaggctgctggtggtctacccttggacctactccccgactcggaccgatg

SEQ ID NO: 14595 - DNA, 203 bp, Artificial sequence
  synthetic
ggcgcgccagtcctttcaacgaaactgacacaactgtgtcgtcaattcctttaaaacagacaccatggtgcatctgactcctgaggagaagtctgccgttactgccctgtggggcaaggtgaacgtggatgaagttggtggtgaggccctgggcaggctgctggtggtctacccttggaccggcgggtcgactcggaccgatg

SEQ ID NO: 14596 - DNA, 203 bp, Artificial sequence
  synthetic
ggcgcgccagtcctacaccgaactctgacacaactgtgttactccccaacctcaaacagacaccatggtgcatctgactcctgaggagaagtctgccgttactgccctgtggggcaaggtgaacgtggatgaagttggtggtgaggccctgggcaggctgctggtggtctacccttggaaccggccgtcgactcggaccgatg

SEQ ID NO: 14597 - DNA, 203 bp, Artificial sequence
  synthetic
ggcgcgccagtcctacgttcggtgctgacacaactgtgttactccccaacctcaaacagacaccatggtgcatctgactcctgaggagaagtctgccgttactgccctgtggggcaaggtgaacgtggatgaagttggtggtgaggccctgggcaggctgctggtggtctacccttggaccggcgggtcgactcggaccgatg

SEQ ID NO: 14598 - DNA, 203 bp, Artificial sequence
  synthetic
ggcgcgccagtcctaattcggtgtctgacacaactgtgttcaaccggccgttcaaacagacaccatggtgcatctgactcctgaggagaagtctgccgttactgccctgtggggcaaggtgaacgtggatgaagttggtggtgaggccctgggcaggctgctggtggtctacccttgttcttggcaaacgactcggaccgatg

SEQ ID NO: 14599 - DNA, 203 bp, Artificial sequence
  synthetic
ggcgcgccagtccttaaccttggactgacacaactgtgttcaccggcgggttcaaacagacaccatggtgcatctgactcctgaggagaagtctgccgttactgccctgtggggcaaggtgaacgtggatgaagttggtggtgaggccctgggcaggctgctggtggtctacccttgttcttggcaaacgactcggaccgatg

SEQ ID NO: 14600 - DNA, 203 bp, Artificial sequence
  synthetic
ggcgcgccagtccttttgaggcagctgacacaactgtgttcactaaagccgcaggctccactcctggtggtgcccttccgtcaattcctttaagtttcagctttgcaaccatactccccccggaacccaaagactttggtttcccggaagctgcccggcgggtcatgggaataacgccgccgcgaggtcgactcggaccgatg

SEQ ID NO: 14601 - DNA, 203 bp, Artificial sequence
  synthetic
ggcgcgccagtcctaactgaggcactgacacaactgtgttcactaccggccgtaaacagacaccatggtgcatctgactcctgaggagaagtctgccgttactgccctgtggggcaaggtgaacgtggatgaagttggtggtgaggccctgggcaggctgctggtggtctacccttggaaccggccgtcgactcggaccgatg

SEQ ID NO: 14602 - DNA, 203 bp, Artificial sequence
  synthetic
ggcgcgccagtccttttgtgaggcctgacacaactgtgttcactaccggccgtaaacagacaccatggtgcatctgactcctgaggagaagtctgccgttactgccctgtggggcaaggtgaacgtggatgaagttggtggtgaggccctgggcaggctgctggtggtctacccttggaccggcgggtcgactcggaccgatg

SEQ ID NO: 14603 - DNA, 203 bp, Artificial sequence
  synthetic
ggcgcgccagtcctgcctcatggtctgacacaactgtgttcactacggaactacgacggtatctgatcgtcttcgaacctccgactttcgttcttgattaatgaaaacattcttggcaaatgctttcgctctggtccgtcttgcgccggtccaagaatttcacctctagcggcgcaatacgaagaggtcgactcggaccgatg

SEQ ID NO: 14604 - DNA, 203 bp, Artificial sequence
  synthetic
ggcgcgccagtcctacgcctcagtctgacacaactgtgttcactagaccggccgtacagacaccatggtgcatctgactcctgaggagaagtctgccgttactgccctgtggggcaaggtgaacgtggatgaagttggtggtgaggccctgggcaggctgctggtggtctaccccacggaatcgagaacgactcggaccgatg

SEQ ID NO: 14605 - DNA, 203 bp, Artificial sequence
  synthetic
ggcgcgccagtcctgacgaagttcctgacacaactgtgttcactagaccggccgtacagacaccatggtgcatctgactcctgaggagaagtctgccgttactgccctgtggggcaaggtgaacgtggatgaagttggtggtgaggccctgggcaggctgctggtggtctacccttggacctactccccgactcggaccgatg

SEQ ID NO: 14606 - DNA, 203 bp, Artificial sequence
  synthetic
ggcgcgccagtccttgtacgttgtctgacacaactgtgttcactagcaacaccggccgtacaccatggaccggccgtctcctgaggaccggccgtccgttactgaccggccgtgcaaggtgaaccggccgtaagttggtggtgaggccctgggcaggctgctggtggtctacccttggacccagaggtcgactcggaccgatg

SEQ ID NO: 14607 - DNA, 203 bp, Artificial sequence
  synthetic
ggcgcgccagtcctaatcacctgtctgacacaactgtgttcactagcaacaccggccgtacaccatggaccggccgtctcctgaggaccggccgtccgttactgaccggccgtgcaaggtgaacgtggatgaagttggtgaccggccgttgggcaggcaccggccgttctacccttaccggccgtggtcgactcggaccgatg

SEQ ID NO: 14608 - DNA, 203 bp, Artificial sequence
  synthetic
ggcgcgccagtcctgcttgaggacctgacacaactgtgttcactagcaacaccggccgtacaccatggaccggccgtctcctgaggaccggccgtccgttactgaccggccgtgcaaggtgaacgtggatgaagttggtgaccggccgttgggcaggctgctggtggtctacccttggacccagaggtcgactcggaccgatg

SEQ ID NO: 14609 - DNA, 203 bp, Artificial sequence
  synthetic
ggcgcgccagtcctaacgaactctctgacacaactgtgttcactagcaacaccggccgtacaccatggaccggccgtctcctgaggaccggccgtccgttactgccctgtggggcaaggtgaaccggccgtaagttggtgaccggccgttgggcaggcaccggccgttctacccttaccggccgtggtcgactcggaccgatg

SEQ ID NO: 14610 - DNA, 203 bp, Artificial sequence
  synthetic
ggcgcgccagtcctgtcatacccactgacacaactgtgttcactagcaacaccggccgtacaccatggaccggccgtctcctgaggaccggccgtccgttactgccctgtggggcaaggtgaaccggccgtaagttggtgaccggccgttgggcaggctgctggtggtctacccttggacccagaggtcgactcggaccgatg

SEQ ID NO: 14611 - DNA, 203 bp, Artificial sequence
  synthetic
ggcgcgccagtccttattctttagctgacacaactgtgttcactagcaacaccggccgtacaccatggaccggccgtctcctgaggaccggccgtccgttactgccctgtggggcaaggtgaaccggccgtaagttggtggtgaggccctgggcaggcaccggccgttctacccttggacccagaggtcgactcggaccgatg

SEQ ID NO: 14612 - DNA, 203 bp, Artificial sequence
  synthetic
ggcgcgccagtcctcccattcgtactgacacaactgtgttcactagcaacaccggccgtacaccatggaccggccgtctcctgaggaccggccgtccgttactgccctgtggggcaaggtgaacgtggatgaagttggtgaccggccgttgggcaggcaccggccgttctacccttaccggccgtggtcgactcggaccgatg

SEQ ID NO: 14613 - DNA, 203 bp, Artificial sequence
  synthetic
ggcgcgccagtcctagtgcaactactgacacaactgtgttcactagcaacaccggccgtacaccatggaccggccgtctcctgaggaccggccgtccgttactgccctgtggggcaaggtgaacgtggatgaagttggtgaccggccgttgggcaggcaccggccgttctacccttggacccagaggtcgactcggaccgatg

SEQ ID NO: 14614 - DNA, 203 bp, Artificial sequence
  synthetic
ggcgcgccagtcctctgcaacttactgacacaactgtgttcactagcaacaccggccgtacaccatggaccggccgtctcctgaggaccggccgtccgttactgccctgtggggcaaggtgaacgtggatgaagttggtgaccggccgttgggcaggctgctggtggtctacccttggacccagaggtcgactcggaccgatg

SEQ ID NO: 14615 - DNA, 203 bp, Artificial sequence
  synthetic
ggcgcgccagtcctctaacctctcctgacacaactgtgttcactagcaacaccggccgtacaccatggaccggccgtctcctgaggaccggccgtccgttactgccctgtggggcaaggtgaacgtggatgaagttggtggtgaggccctgggcaggctgctggtggtctacccttggacccagaggtcgactcggaccgatg

SEQ ID NO: 14616 - DNA, 203 bp, Artificial sequence
  synthetic
ggcgcgccagtccttgtctcagtcctgacacaactgtgttcactagcaacaccggccgtacaccatggaccggccgtctcctgaggagaagtctgccgttactgaccggccgtgcaaggtgaaccggccgtaagttggtgaccggccgttgggcaggcaccggccgttctacccttaccggccgtggtcgactcggaccgatg

SEQ ID NO: 14617 - DNA, 203 bp, Artificial sequence
  synthetic
ggcgcgccagtcctacatgagacactgacacaactgtgttcactagcaacaccggccgtacaccatggaccggccgtctcctgaggagaagtctgccgttactgaccggccgtgcaaggtgaaccggccgtaagttggtgaccggccgttgggcaggcaccggccgttctacccttggacccagaggtcgactcggaccgatg

SEQ ID NO: 14618 - DNA, 203 bp, Artificial sequence
  synthetic
ggcgcgccagtccttaacggtgtactgacacaactgtgttcactagcaacaccggccgtacaccatggaccggccgtctcctgaggagaagtctgccgttactgaccggccgtgcaaggtgaaccggccgtaagttggtgaccggccgttgggcaggctgctggtggtctacccttaccggccgtggtcgactcggaccgatg

SEQ ID NO: 14619 - DNA, 203 bp, Artificial sequence
  synthetic
ggcgcgccagtccttcgatcatggctgacacaactgtgttcactagcaacaccggccgtacaccatggaccggccgtctcctgaggagaagtctgccgttactgaccggccgtgcaaggtgaaccggccgtaagttggtgaccggccgttgggcaggctgctggtggtctacccttggacccagaggtcgactcggaccgatg

SEQ ID NO: 14620 - DNA, 203 bp, Artificial sequence
  synthetic
ggcgcgccagtcctacaacagtttctgacacaactgtgttcactagcaacaccggccgtacaccatggaccggccgtctcctgaggagaagtctgccgttactgaccggccgtgcaaggtgaaccggccgtaagttggtggtgaggccctgggcaggctgctggtggtctacccttggacccagaggtcgactcggaccgatg

SEQ ID NO: 14621 - DNA, 203 bp, Artificial sequence
  synthetic
ggcgcgccagtccttgaatgctctctgacacaactgtgttcactagcaacaccggccgtacaccatggaccggccgtctcctgaggagaagtctgccgttactgaccggccgtgcaaggtgaacgtggatgaagttggtgaccggccgttgggcaggcaccggccgttctacccttggacccagaggtcgactcggaccgatg

SEQ ID NO: 14622 - DNA, 203 bp, Artificial sequence
  synthetic
ggcgcgccagtcctctttgaaaacctgacacaactgtgttcactagcaacaccggccgtacaccatggaccggccgtctcctgaggagaagtctgccgttactgaccggccgtgcaaggtgaacgtggatgaagttggtgaccggccgttgggcaggctgctggtggtctacccttggacccagaggtcgactcggaccgatg

SEQ ID NO: 14623 - DNA, 203 bp, Artificial sequence
  synthetic
ggcgcgccagtcctagtacttaacctgacacaactgtgttcactagcaacaccggccgtacaccatggaccggccgtctcctgaggagaagtctgccgttactgaccggccgtgcaaggtgaacgtggatgaagttggtggtgaggccctgggcaggctgctggtggtctacccttggacccagaggtcgactcggaccgatg

SEQ ID NO: 14624 - DNA, 203 bp, Artificial sequence
  synthetic
ggcgcgccagtcctaacaaagtacctgacacaactgtgttcactagcaacaccggccgtacaccatggaccggccgtctcctgaggagaagtctgccgttactgccctgtggggcaaggtgaaccggccgtaagttggtgaccggccgttgggcaggctgctggtggtctacccttaccggccgtggtcgactcggaccgatg

SEQ ID NO: 14625 - DNA, 203 bp, Artificial sequence
  synthetic
ggcgcgccagtcctgaatcttcttctgacacaactgtgttcactagcaacaccggccgtacaccatggaccggccgtctcctgaggagaagtctgccgttactgccctgtggggcaaggtgaacgtggatgaagttggtgaccggccgttgggcaggcaccggccgttctacccttggacccagaggtcgactcggaccgatg

SEQ ID NO: 14626 - DNA, 203 bp, Artificial sequence
  synthetic
ggcgcgccagtcctgttgtagtatctgacacaactgtgttcactagcaacaccggccgtacaccatggaccggccgtctcctgaggagaagtctgccgttactgccctgtggggcaaggtgaacgtggatgaagttggtgaccggccgttgggcaggctgctggtggtctacccttggacccagaggtcgactcggaccgatg

SEQ ID NO: 14627 - DNA, 203 bp, Artificial sequence
  synthetic
ggcgcgccagtccttattcttagcctgacacaactgtgttcactagcaacaccggccgtacaccatggtgcatctgactcctgaggaccggccgtccgttactgaccggccgtgcaaggtgaaccggccgtaagttggtgaccggccgttgggcaggcaccggccgttctacccttaccggccgtggtcgactcggaccgatg

SEQ ID NO: 14628 - DNA, 203 bp, Artificial sequence
  synthetic
ggcgcgccagtcctgtcttttcaactgacacaactgtgttcactagcaacaccggccgtacaccatggtgcatctgactcctgaggaccggccgtccgttactgaccggccgtgcaaggtgaaccggccgtaagttggtgaccggccgttgggcaggctgctggtggtctacccttaccggccgtggtcgactcggaccgatg

SEQ ID NO: 14629 - DNA, 203 bp, Artificial sequence
  synthetic
ggcgcgccagtccttaagttactcctgacacaactgtgttcactagcaacaccggccgtacaccatggtgcatctgactcctgaggaccggccgtccgttactgaccggccgtgcaaggtgaaccggccgtaagttggtggtgaggccctgggcaggctgctggtggtctacccttaccggccgtggtcgactcggaccgatg

SEQ ID NO: 14630 - DNA, 203 bp, Artificial sequence
  synthetic
ggcgcgccagtccttaactcaaacctgacacaactgtgttcactagcaacaccggccgtacaccatggtgcatctgactcctgaggaccggccgtccgttactgaccggccgtgcaaggtgaaccggccgtaagttggtggtgaggccctgggcaggctgctggtggtctacccttggacccagaggtcgactcggaccgatg

SEQ ID NO: 14631 - DNA, 203 bp, Artificial sequence
  synthetic
ggcgcgccagtcctatgtagaaacctgacacaactgtgttcactagcaacaccggccgtacaccatggtgcatctgactcctgaggaccggccgtccgttactgaccggccgtgcaaggtgaacgtggatgaagttggtgaccggccgttgggcaggcaccggccgttctacccttggacccagaggtcgactcggaccgatg

SEQ ID NO: 14632 - DNA, 203 bp, Artificial sequence
  synthetic
ggcgcgccagtcctacgaaggatcctgacacaactgtgttcactagcaacaccggccgtacaccatggtgcatctgactcctgaggaccggccgtccgttactgaccggccgtgcaaggtgaacgtggatgaagttggtgaccggccgttgggcaggctgctggtggtctacccttggacccagaggtcgactcggaccgatg

SEQ ID NO: 14633 - DNA, 203 bp, Artificial sequence
  synthetic
ggcgcgccagtcctcttcatacagctgacacaactgtgttcactagcaacaccggccgtacaccatggtgcatctgactcctgaggaccggccgtccgttactgccctgtggggcaaggtgaaccggccgtaagttggtggtgaggccctgggcaggcaccggccgttctacccttaccggccgtggtcgactcggaccgatg

SEQ ID NO: 14634 - DNA, 203 bp, Artificial sequence
  synthetic
ggcgcgccagtccttcgttgtatgctgacacaactgtgttcactagcaacaccggccgtacaccatggtgcatctgactcctgaggaccggccgtccgttactgccctgtggggcaaggtgaaccggccgtaagttggtggtgaggccctgggcaggcaccggccgttctacccttggacccagaggtcgactcggaccgatg

SEQ ID NO: 14635 - DNA, 203 bp, Artificial sequence
  synthetic
ggcgcgccagtcctctctgtatggctgacacaactgtgttcactagcaacaccggccgtacaccatggtgcatctgactcctgaggaccggccgtccgttactgccctgtggggcaaggtgaaccggccgtaagttggtggtgaggccctgggcaggctgctggtggtctacccttaccggccgtggtcgactcggaccgatg

SEQ ID NO: 14636 - DNA, 203 bp, Artificial sequence
  synthetic
ggcgcgccagtcctatgtatgtagctgacacaactgtgttcactagcaacaccggccgtacaccatggtgcatctgactcctgaggaccggccgtccgttactgccctgtggggcaaggtgaaccggccgtaagttggtggtgaggccctgggcaggctgctggtggtctacccttggacccagaggtcgactcggaccgatg

SEQ ID NO: 14637 - DNA, 203 bp, Artificial sequence
  synthetic
ggcgcgccagtccttgtatgagatctgacacaactgtgttcactagcaacaccggccgtacaccatggtgcatctgactcctgaggaccggccgtccgttactgccctgtggggcaaggtgaacgtggatgaagttggtgaccggccgttgggcaggcaccggccgttctacccttggacccagaggtcgactcggaccgatg

SEQ ID NO: 14638 - DNA, 203 bp, Artificial sequence
  synthetic
ggcgcgccagtccttgtatgaagactgacacaactgtgttcactagcaacaccggccgtacaccatggtgcatctgactcctgaggaccggccgtccgttactgccctgtggggcaaggtgaacgtggatgaagttggtgaccggccgttgggcaggctgctggtggtctacccttaccggccgtggtcgactcggaccgatg

SEQ ID NO: 14639 - DNA, 203 bp, Artificial sequence
  synthetic
ggcgcgccagtcctatcagacgaactgacacaactgtgttcactagcaacaccggccgtacaccatggtgcatctgactcctgaggaccggccgtccgttactgccctgtggggcaaggtgaacgtggatgaagttggtggtgaggccctgggcaggcaccggccgttctacccttggacccagaggtcgactcggaccgatg

SEQ ID NO: 14640 - DNA, 203 bp, Artificial sequence
  synthetic
ggcgcgccagtccttcagaagttactgacacaactgtgttcactagcaacaccggccgtacaccatggtgcatctgactcctgaggaccggccgtccgttactgccctgtggggcaaggtgaacgtggatgaagttggtggtgaggccctgggcaggctgctggtggtctacccttggacccagaggtcgactcggaccgatg

SEQ ID NO: 14641 - DNA, 203 bp, Artificial sequence
  synthetic
ggcgcgccagtcctactggtaggactgacacaactgtgttcactagcaacaccggccgtacaccatggtgcatctgactcctgaggagaagtctgccgttactgaccggccgtgcaaggtgaaccggccgtaagttggtgaccggccgttgggcaggctgctggtggtctacccttaccggccgtggtcgactcggaccgatg

SEQ ID NO: 14642 - DNA, 203 bp, Artificial sequence
  synthetic
ggcgcgccagtcctaggatacctcctgacacaactgtgttcactagcaacaccggccgtacaccatggtgcatctgactcctgaggagaagtctgccgttactgaccggccgtgcaaggtgaaccggccgtaagttggtggtgaggccctgggcaggcaccggccgttctacccttggacccagaggtcgactcggaccgatg

SEQ ID NO: 14643 - DNA, 203 bp, Artificial sequence
  synthetic
ggcgcgccagtcctgaggtatgacctgacacaactgtgttcactagcaacaccggccgtacaccatggtgcatctgactcctgaggagaagtctgccgttactgaccggccgtgcaaggtgaaccggccgtaagttggtggtgaggccctgggcaggctgctggtggtctacccttggacccagaggtcgactcggaccgatg

SEQ ID NO: 14644 - DNA, 203 bp, Artificial sequence
  synthetic
ggcgcgccagtcctgtgctgaactctgacacaactgtgttcactagcaacaccggccgtacaccatggtgcatctgactcctgaggagaagtctgccgttactgaccggccgtgcaaggtgaacgtggatgaagttggtgaccggccgttgggcaggctgctggtggtctacccttggacccagaggtcgactcggaccgatg

SEQ ID NO: 14645 - DNA, 203 bp, Artificial sequence
  synthetic
ggcgcgccagtcctgcagttcacactgacacaactgtgttcactagcaacaccggccgtacaccatggtgcatctgactcctgaggagaagtctgccgttactgaccggccgtgcaaggtgaacgtggatgaagttggtggtgaggccctgggcaggcaccggccgttctacccttggacccagaggtcgactcggaccgatg

SEQ ID NO: 14646 - DNA, 203 bp, Artificial sequence
  synthetic
ggcgcgccagtcctcagcagttctctgacacaactgtgttcactagcaacaccggccgtacaccatggtgcatctgactcctgaggagaagtctgccgttactgaccggccgtgcaaggtgaacgtggatgaagttggtggtgaggccctgggcaggctgctggtggtctacccttaccggccgtggtcgactcggaccgatg

SEQ ID NO: 14647 - DNA, 203 bp, Artificial sequence
  synthetic
ggcgcgccagtcctctaccagtagctgacacaactgtgttcactagcaacaccggccgtacaccatggtgcatctgactcctgaggagaagtctgccgttactgccctgtggggcaaggtgaaccggccgtaagttggtgaccggccgttgggcaggcaccggccgttctacccttaccggccgtggtcgactcggaccgatg

SEQ ID NO: 14648 - DNA, 203 bp, Artificial sequence
  synthetic
ggcgcgccagtcctcctgctgacactgacacaactgtgttcactagcaacaccggccgtacaccatggtgcatctgactcctgaggagaagtctgccgttactgccctgtggggcaaggtgaaccggccgtaagttggtgaccggccgttgggcaggcaccggccgttctacccttggacccagaggtcgactcggaccgatg

SEQ ID NO: 14649 - DNA, 203 bp, Artificial sequence
  synthetic
ggcgcgccagtccttgtcagcattctgacacaactgtgttcactagcaacaccggccgtacaccatggtgcatctgactcctgaggagaagtctgccgttactgccctgtggggcaaggtgaaccggccgtaagttggtgaccggccgttgggcaggctgctggtggtctacccttaccggccgtggtcgactcggaccgatg

SEQ ID NO: 14650 - DNA, 203 bp, Artificial sequence
  synthetic
ggcgcgccagtcctctaggtgactctgacacaactgtgttcactagcaacaccggccgtacaccatggtgcatctgactcctgaggagaagtctgccgttactgccctgtggggcaaggtgaaccggccgtaagttggtgaccggccgttgggcaggctgctggtggtctacccttggacccagaggtcgactcggaccgatg

SEQ ID NO: 14651 - DNA, 203 bp, Artificial sequence
  synthetic
ggcgcgccagtccttagagtgcagctgacacaactgtgttcactagcaacaccggccgtacaccatggtgcatctgactcctgaggagaagtctgccgttactgccctgtggggcaaggtgaaccggccgtaagttggtggtgaggccctgggcaggcaccggccgttctacccttggacccagaggtcgactcggaccgatg

SEQ ID NO: 14652 - DNA, 203 bp, Artificial sequence
  synthetic
ggcgcgccagtcctgtggtgattcctgacacaactgtgttcactagcaacaccggccgtacaccatggtgcatctgactcctgaggagaagtctgccgttactgccctgtggggcaaggtgaaccggccgtaagttggtggtgaggccctgggcaggctgctggtggtctacccttggacccagaggtcgactcggaccgatg

SEQ ID NO: 14653 - DNA, 203 bp, Artificial sequence
  synthetic
ggcgcgccagtccttctgaagacactgacacaactgtgttcactagcaacaccggccgtacaccatggtgcatctgactcctgaggagaagtctgccgttactgccctgtggggcaaggtgaacgtggatgaagttggtgaccggccgttgggcaggctgctggtggtctacccttaccggccgtggtcgactcggaccgatg

SEQ ID NO: 14654 - DNA, 203 bp, Artificial sequence
  synthetic
ggcgcgccagtccttctgaagtacctgacacaactgtgttcactagcaacaccggccgtacaccatggtgcatctgactcctgaggagaagtctgccgttactgccctgtggggcaaggtgaacgtggatgaagttggtggtgaggccctgggcaggcaccggccgttctacccttggacccagaggtcgactcggaccgatg

SEQ ID NO: 14655 - DNA, 203 bp, Artificial sequence
  synthetic
ggcgcgccagtccttctgttctggctgacacaactgtgttcactagcaacaccggccgtacaccatggtgcatctgactcctgaggagaagtctgccgttactgccctgtggggcaaggtgaacgtggatgaagttggtggtgaggccctgggcaggctgctggtggtctacccttggacccagaggtcgactcggaccgatg

SEQ ID NO: 14656 - DNA, 203 bp, Artificial sequence
  synthetic
ggcgcgccagtcctcttgttcagactgacacaactgtgttcactagcaaccacggaatcgagaaatggcacggaatcgagaagaggagaagtctgccgttactgcacggaatcgagaagtgaacgtggatgaagttggtgcacggaatcgagaaaggccacggaatcgagaaccttggacccagaggtcgactcggaccgatg

SEQ ID NO: 14657 - DNA, 203 bp, Artificial sequence
  synthetic
ggcgcgccagtcctaccactcagactgacacaactgtgttcactagcaaccacggaatcgagaaatggcacggaatcgagaagaggagaagtctgccgttactgcacggaatcgagaagtgaacgtggatgaagttggtggtgaggccctgggcaggccacggaatcgagaaccttggacccagaggtcgactcggaccgatg

SEQ ID NO: 14658 - DNA, 203 bp, Artificial sequence
  synthetic
ggcgcgccagtccttacaacctggctgacacaactgtgttcactagcaaccacggaatcgagaaatggcacggaatcgagaagaggagaagtctgccgttactgcacggaatcgagaagtgacacggaatcgagaaggtggtgaggccctgggcaggccacggaatcgagaaccttggacccagaggtcgactcggaccgatg

SEQ ID NO: 14659 - DNA, 203 bp, Artificial sequence
  synthetic
ggcgcgccagtccttgtaggctttctgacacaactgtgttcactagcaaccacggaatcgagaaatggcacggaatcgagaagaggagaagtctgccgttactgcacggaatcgagaagtgacacggaatcgagaaggtggtgaggccctgggcaggctgctggtggtctacccttggacccagaggtcgactcggaccgatg

SEQ ID NO: 14660 - DNA, 203 bp, Artificial sequence
  synthetic
ggcgcgccagtcctgagcaactggctgacacaactgtgttcactagcaaccacggaatcgagaaatggcacggaatcgagaagaggagaagtctgccgttactgccctgtggggcaaggtgaacgtggatgaagttggtgcacggaatcgagaaaggctgctggtggtctacccttggacccagaggtcgactcggaccgatg

SEQ ID NO: 14661 - DNA, 203 bp, Artificial sequence
  synthetic
ggcgcgccagtcctaggtttcaagctgacacaactgtgttcactagcaaccacggaatcgagaaatggcacggaatcgagaagaggagaagtctgccgttactgccctgtggggcaaggtgacacggaatcgagaaggtggtgaggccctgggcaggccacggaatcgagaaccttggacccagaggtcgactcggaccgatg

SEQ ID NO: 14662 - DNA, 203 bp, Artificial sequence
  synthetic
ggcgcgccagtcctcttttcagcactgacacaactgtgttcactagcaaccacggaatcgagaaatggcacggaatcgagaagaggcacggaatcgagaaactgcacggaatcgagaagtgacacggaatcgagaaggtgcacggaatcgagaaaggctgctggtggtctacccttggacccagaggtcgactcggaccgatg

SEQ ID NO: 14663 - DNA, 203 bp, Artificial sequence
  synthetic
ggcgcgccagtccttaactctcaactgacacaactgtgttcactagcaaccacggaatcgagaaatggcacggaatcgagaagaggcacggaatcgagaaactgcacggaatcgagaagtgacacggaatcgagaaggtggtgaggccctgggcaggccacggaatcgagaaccttggacccagaggtcgactcggaccgatg

SEQ ID NO: 14664 - DNA, 203 bp, Artificial sequence
  synthetic
ggcgcgccagtcctggcaacgagcctgacacaactgtgttcactagcaaccacggaatcgagaaatggcacggaatcgagaagaggcacggaatcgagaaactgccctgtggggcaaggtgaacgtggatgaagttggtgcacggaatcgagaaaggctgctggtggtctacccttggacccagaggtcgactcggaccgatg

SEQ ID NO: 14665 - DNA, 203 bp, Artificial sequence
  synthetic
ggcgcgccagtcctggcactgtgcctgacacaactgtgttcactagcaaccacggaatcgagaaatggcacggaatcgagaagaggcacggaatcgagaaactgccctgtggggcaaggtgaacgtggatgaagttggtggtgaggccctgggcaggctgctggtggtctacccttggacccagaggtcgactcggaccgatg

SEQ ID NO: 14666 - DNA, 203 bp, Artificial sequence
  synthetic
ggcgcgccagtcctggacggtcacctgacacaactgtgttcactagcaaccacggaatcgagaaatggcacggaatcgagaagaggcacggaatcgagaaactgccctgtggggcaaggtgacacggaatcgagaaggtgcacggaatcgagaaaggccacggaatcgagaaccttggacccagaggtcgactcggaccgatg

SEQ ID NO: 14667 - DNA, 203 bp, Artificial sequence
  synthetic
ggcgcgccagtcctgtgaccgtccctgacacaactgtgttcactagcaaccacggaatcgagaaatggtgcatctgactcctgaggagaagtctgccgttactgcacggaatcgagaagtgaacgtggatgaagttggtgcacggaatcgagaaaggctgctggtggtctacccttggacccagaggtcgactcggaccgatg

SEQ ID NO: 14668 - DNA, 203 bp, Artificial sequence
  synthetic
ggcgcgccagtcctcaaggctttcctgacacaactgtgttcactagcaaccacggaatcgagaaatggtgcatctgactcctgaggagaagtctgccgttactgcacggaatcgagaagtgacacggaatcgagaaggtgcacggaatcgagaaaggctgctggtggtctacccttggacccagaggtcgactcggaccgatg

SEQ ID NO: 14669 - DNA, 203 bp, Artificial sequence
  synthetic
ggcgcgccagtcctacaaagccttctgacacaactgtgttcactagcaaccacggaatcgagaaatggtgcatctgactcctgaggagaagtctgccgttactgcacggaatcgagaagtgacacggaatcgagaaggtggtgaggccctgggcaggccacggaatcgagaaccttggacccagaggtcgactcggaccgatg

SEQ ID NO: 14670 - DNA, 203 bp, Artificial sequence
  synthetic
ggcgcgccagtcctacaacggtccctgacacaactgtgttcactagcaaccacggaatcgagaaatggtgcatctgactcctgaggagaagtctgccgttactgccctgtggggcaaggtgacacggaatcgagaaggtgcacggaatcgagaaaggccacggaatcgagaaccttggacccagaggtcgactcggaccgatg

SEQ ID NO: 14671 - DNA, 203 bp, Artificial sequence
  synthetic
ggcgcgccagtcctgtagctcaccctgacacaactgtgttcactagcaaccacggaatcgagaaatggtgcatctgactcctgaggagaagtctgccgttactgccctgtggggcaaggtgacacggaatcgagaaggtgcacggaatcgagaaaggctgctggtggtctacccttggacccagaggtcgactcggaccgatg

SEQ ID NO: 14672 - DNA, 203 bp, Artificial sequence
  synthetic
ggcgcgccagtcctgtcacctaccctgacacaactgtgttcactagcaaccacggaatcgagaaatggtgcatctgactcctgaggcacggaatcgagaaactgcacggaatcgagaagtgaacgtggatgaagttggtgcacggaatcgagaaaggccacggaatcgagaaccttggacccagaggtcgactcggaccgatg

SEQ ID NO: 14673 - DNA, 203 bp, Artificial sequence
  synthetic
ggcgcgccagtccttgagcagtccctgacacaactgtgttcactagcaaccacggaatcgagaaatggtgcatctgactcctgaggcacggaatcgagaaactgcacggaatcgagaagtgaacgtggatgaagttggtgcacggaatcgagaaaggctgctggtggtctacccttggacccagaggtcgactcggaccgatg

SEQ ID NO: 14674 - DNA, 203 bp, Artificial sequence
  synthetic
ggcgcgccagtcctctgaaaggccctgacacaactgtgttcactagcaaccacggaatcgagaaatggtgcatctgactcctgaggcacggaatcgagaaactgcacggaatcgagaagtgacacggaatcgagaaggtggtgaggccctgggcaggccacggaatcgagaaccttggacccagaggtcgactcggaccgatg

SEQ ID NO: 14675 - DNA, 203 bp, Artificial sequence
  synthetic
ggcgcgccagtcctggctctgcaactgacacaactgtgttcactagcaaccacggaatcgagaaatggtgcatctgactcctgaggcacggaatcgagaaactgccctgtggggcaaggtgaacgtggatgaagttggtggtgaggccctgggcaggccacggaatcgagaaccttggacccagaggtcgactcggaccgatg

SEQ ID NO: 14676 - DNA, 203 bp, Artificial sequence
  synthetic
ggcgcgccagtcctatccaggaccctgacacaactgtgttcactagcaaccacggaatcgagaaatggtgcatctgactcctgaggcacggaatcgagaaactgccctgtggggcaaggtgacacggaatcgagaaggtggtgaggccctgggcaggccacggaatcgagaaccttggacccagaggtcgactcggaccgatg

SEQ ID NO: 14677 - DNA, 203 bp, Artificial sequence
  synthetic
ggcgcgccagtcctactgaaggccctgacacaactgtgttcactagcaaccaggagcgagcgaccaaaggaaccataactgatttaatgagccattcgcagtttcactgtaccggccgtgcgtactcagacatgcatggcttaatctttgagacaagcatatgctactggcaggatcgacccagaggtcgactcggaccgatg

SEQ ID NO: 14678 - DNA, 203 bp, Artificial sequence
  synthetic
ggcgcgccagtcctctacagagccctgacacaactgtgttcactagcaaccccggcgggtcaccatggtgcatctgactcctgaggagaagtctgccgttactgccctgtggggcaaggtgaacgtggatgaagttggtggtgaggccctgggcaggctgctggtggtctacccttggaaccggccgtcgactcggaccgatg

SEQ ID NO: 14679 - DNA, 203 bp, Artificial sequence
  synthetic
ggcgcgccagtcctggcactcaacctgacacaactgtgttcactagcaacccggcgggtacaccatggccggcgggtctcctgaggagaagtctgccgttactgccctgtggggcaaggtgaccggcgggtaagttggtgccggcgggttgggcaggctgctggtggtctacccttccggcgggtggtcgactcggaccgatg

SEQ ID NO: 14680 - DNA, 203 bp, Artificial sequence
  synthetic
ggcgcgccagtcctggtgtagagcctgacacaactgtgttcactagcaacccggcgggtacaccatggccggcgggtctcctgaggagaagtctgccgttactgccctgtggggcaaggtgaccggcgggtaagttggtggtgaggccctgggcaggctgctggtggtctacccttggacccagaggtcgactcggaccgatg

SEQ ID NO: 14681 - DNA, 203 bp, Artificial sequence
  synthetic
ggcgcgccagtcctggtttcggtcctgacacaactgtgttcactagcaacccggcgggtacaccatggccggcgggtctcctgaggagaagtctgccgttactgccggcgggtgcaaggtgaacgtggatgaagttggtgccggcgggttgggcaggcccggcgggttctacccttccggcgggtggtcgactcggaccgatg

SEQ ID NO: 14682 - DNA, 203 bp, Artificial sequence
  synthetic
ggcgcgccagtcctggttggactgctgacacaactgtgttcactagcaacccggcgggtacaccatggccggcgggtctcctgaggagaagtctgccgttactgccggcgggtgcaaggtgaacgtggatgaagttggtggtgaggccctgggcaggcccggcgggttctacccttggacccagaggtcgactcggaccgatg

SEQ ID NO: 14683 - DNA, 203 bp, Artificial sequence
  synthetic
ggcgcgccagtcctgacatgacgactgacacaactgtgttcactagcaacccggcgggtacaccatggccggcgggtctcctgaggagaagtctgccgttactgccggcgggtgcaaggtgaacgtggatgaagttggtggtgaggccctgggcaggctgctggtggtctacccttccggcgggtggtcgactcggaccgatg

SEQ ID NO: 14684 - DNA, 203 bp, Artificial sequence
  synthetic
ggcgcgccagtcctcctctttgtgctgacacaactgtgttcactagcaacccggcgggtacaccatggccggcgggtctcctgaggagaagtctgccgttactgccggcgggtgcaaggtgaacgtggatgaagttggtggtgaggccctgggcaggctgctggtggtctacccttggacccagaggtcgactcggaccgatg

SEQ ID NO: 14685 - DNA, 203 bp, Artificial sequence
  synthetic
ggcgcgccagtccttcgtagaggtctgacacaactgtgttcactagcaacccggcgggtacaccatggccggcgggtctcctgaggagaagtctgccgttactgccggcgggtgcaaggtgaccggcgggtaagttggtgccggcgggttgggcaggctgctggtggtctacccttccggcgggtggtcgactcggaccgatg

SEQ ID NO: 14686 - DNA, 203 bp, Artificial sequence
  synthetic
ggcgcgccagtcctatcgtagtacctgacacaactgtgttcactagcaacccggcgggtacaccatggccggcgggtctcctgaggagaagtctgccgttactgccggcgggtgcaaggtgaccggcgggtaagttggtgccggcgggttgggcaggctgctggtggtctacccttggacccagaggtcgactcggaccgatg

SEQ ID NO: 14687 - DNA, 203 bp, Artificial sequence
  synthetic
ggcgcgccagtcctgctctacgaactgacacaactgtgttcactagcaacccggcgggtacaccatggccggcgggtctcctgaggccggcgggtccgttactgccctgtggggcaaggtgaacgtggatgaagttggtgccggcgggttgggcaggcccggcgggttctacccttggacccagaggtcgactcggaccgatg

SEQ ID NO: 14688 - DNA, 203 bp, Artificial sequence
  synthetic
ggcgcgccagtcctccacctgtgtctgacacaactgtgttcactagcaacccggcgggtacaccatggccggcgggtctcctgaggccggcgggtccgttactgccctgtggggcaaggtgaccggcgggtaagttggtgccggcgggttgggcaggcccggcgggttctacccttccggcgggtggtcgactcggaccgatg

SEQ ID NO: 14689 - DNA, 203 bp, Artificial sequence
  synthetic
ggcgcgccagtcctcctgtgtttgctgacacaactgtgttcactagcaacccggcgggtacaccatggccggcgggtctcctgaggccggcgggtccgttactgccctgtggggcaaggtgaccggcgggtaagttggtgccggcgggttgggcaggctgctggtggtctacccttccggcgggtggtcgactcggaccgatg

SEQ ID NO: 14690 - DNA, 203 bp, Artificial sequence
  synthetic
ggcgcgccagtcctatgtgtccttctgacacaactgtgttcactagcaacccggcgggtacaccatggccggcgggtctcctgaggccggcgggtccgttactgccctgtggggcaaggtgaccggcgggtaagttggtggtgaggccctgggcaggcccggcgggttctacccttggacccagaggtcgactcggaccgatg

SEQ ID NO: 14691 - DNA, 203 bp, Artificial sequence
  synthetic
ggcgcgccagtcctaggacacaggctgacacaactgtgttcactagcaacccggcgggtacaccatggccggcgggtctcctgaggccggcgggtccgttactgccctgtggggcaaggtgaccggcgggtaagttggtggtgaggccctgggcaggctgctggtggtctacccttggacccagaggtcgactcggaccgatg

SEQ ID NO: 14692 - DNA, 203 bp, Artificial sequence
  synthetic
ggcgcgccagtcctgtcgtcatgtctgacacaactgtgttcactagcaacccggcgggtacaccatggccggcgggtctcctgaggccggcgggtccgttactgccggcgggtgcaaggtgaacgtggatgaagttggtggtgaggccctgggcaggcccggcgggttctacccttggacccagaggtcgactcggaccgatg

SEQ ID NO: 14693 - DNA, 203 bp, Artificial sequence
  synthetic
ggcgcgccagtcctacagttgattctgacacaactgtgttcactagcaacccggcgggtacaccatggccggcgggtctcctgaggccggcgggtccgttactgccggcgggtgcaaggtgaccggcgggtaagttggtgccggcgggttgggcaggcccggcgggttctacccttccggcgggtggtcgactcggaccgatg

SEQ ID NO: 14694 - DNA, 203 bp, Artificial sequence
  synthetic
ggcgcgccagtccttaggatcgtcctgacacaactgtgttcactagcaacccggcgggtacaccatggccggcgggtctcctgaggccggcgggtccgttactgccggcgggtgcaaggtgaccggcgggtaagttggtggtgaggccctgggcaggcccggcgggttctacccttccggcgggtggtcgactcggaccgatg

SEQ ID NO: 14695 - DNA, 203 bp, Artificial sequence
  synthetic
ggcgcgccagtccttgcttgggtcctgacacaactgtgttcactagcaacccggcgggtacaccatggccggcgggtctcctgaggccggcgggtccgttactgccggcgggtgcaaggtgaccggcgggtaagttggtggtgaggccctgggcaggctgctggtggtctacccttccggcgggtggtcgactcggaccgatg

SEQ ID NO: 14696 - DNA, 203 bp, Artificial sequence
  synthetic
ggcgcgccagtcctctagacaggactgacacaactgtgttcactagcaacccggcgggtacaccatggtgcatctgactcctgaggagaagtctgccgttactgccctgtggggcaaggtgaacgtggatgaagttggtggtgaggccctgggcaggcccggcgggttctacccttccggcgggtggtcgactcggaccgatg

SEQ ID NO: 14697 - DNA, 203 bp, Artificial sequence
  synthetic
ggcgcgccagtcctggtacggtgactgacacaactgtgttcactagcaacccggcgggtacaccatggtgcatctgactcctgaggagaagtctgccgttactgccctgtggggcaaggtgaccggcgggtaagttggtgccggcgggttgggcaggcccggcgggttctacccttggacccagaggtcgactcggaccgatg

SEQ ID NO: 14698 - DNA, 203 bp, Artificial sequence
  synthetic
ggcgcgccagtccttacactgcctctgacacaactgtgttcactagcaacccggcgggtacaccatggtgcatctgactcctgaggagaagtctgccgttactgccggcgggtgcaaggtgaacgtggatgaagttggtgccggcgggttgggcaggcccggcgggttctacccttggacccagaggtcgactcggaccgatg

SEQ ID NO: 14699 - DNA, 203 bp, Artificial sequence
  synthetic
ggcgcgccagtcctcaggctgttcctgacacaactgtgttcactagcaacccggcgggtacaccatggtgcatctgactcctgaggagaagtctgccgttactgccggcgggtgcaaggtgaacgtggatgaagttggtgccggcgggttgggcaggctgctggtggtctacccttccggcgggtggtcgactcggaccgatg

SEQ ID NO: 14700 - DNA, 203 bp, Artificial sequence
  synthetic
ggcgcgccagtcctaggcagtcttctgacacaactgtgttcactagcaacccggcgggtacaccatggtgcatctgactcctgaggagaagtctgccgttactgccggcgggtgcaaggtgaacgtggatgaagttggtgccggcgggttgggcaggctgctggtggtctacccttggacccagaggtcgactcggaccgatg

SEQ ID NO: 14701 - DNA, 203 bp, Artificial sequence
  synthetic
ggcgcgccagtccttcatggtggactgacacaactgtgttcactagcaacccggcgggtacaccatggtgcatctgactcctgaggagaagtctgccgttactgccggcgggtgcaaggtgaacgtggatgaagttggtggtgaggccctgggcaggcccggcgggttctacccttggacccagaggtcgactcggaccgatg

SEQ ID NO: 14702 - DNA, 203 bp, Artificial sequence
  synthetic
ggcgcgccagtcctagtagagaacctgacacaactgtgttcactagcaacccggcgggtacaccatggtgcatctgactcctgaggagaagtctgccgttactgccggcgggtgcaaggtgaccggcgggtaagttggtgccggcgggttgggcaggcccggcgggttctacccttggacccagaggtcgactcggaccgatg

SEQ ID NO: 14703 - DNA, 203 bp, Artificial sequence
  synthetic
ggcgcgccagtccttgagtccactctgacacaactgtgttcactagcaacccggcgggtacaccatggtgcatctgactcctgaggagaagtctgccgttactgccggcgggtgcaaggtgaccggcgggtaagttggtgccggcgggttgggcaggctgctggtggtctacccttccggcgggtggtcgactcggaccgatg

SEQ ID NO: 14704 - DNA, 203 bp, Artificial sequence
  synthetic
ggcgcgccagtccttttgtgacctctgacacaactgtgttcactagcaacccggcgggtacaccatggtgcatctgactcctgaggagaagtctgccgttactgccggcgggtgcaaggtgaccggcgggtaagttggtggtgaggccctgggcaggcccggcgggttctacccttccggcgggtggtcgactcggaccgatg

SEQ ID NO: 14705 - DNA, 203 bp, Artificial sequence
  synthetic
ggcgcgccagtcctacaggcttacctgacacaactgtgttcactagcaacccggcgggtacaccatggtgcatctgactcctgaggccggcgggtccgttactgccctgtggggcaaggtgaacgtggatgaagttggtgccggcgggttgggcaggctgctggtggtctacccttggacccagaggtcgactcggaccgatg

SEQ ID NO: 14706 - DNA, 203 bp, Artificial sequence
  synthetic
ggcgcgccagtccttaagcctgacctgacacaactgtgttcactagcaacccggcgggtacaccatggtgcatctgactcctgaggccggcgggtccgttactgccctgtggggcaaggtgaacgtggatgaagttggtggtgaggccctgggcaggcccggcgggttctacccttccggcgggtggtcgactcggaccgatg

SEQ ID NO: 14707 - DNA, 203 bp, Artificial sequence
  synthetic
ggcgcgccagtccttacagacaacctgacacaactgtgttcactagcaacccggcgggtacaccatggtgcatctgactcctgaggccggcgggtccgttactgccggcgggtgcaaggtgaacgtggatgaagttggtgccggcgggttgggcaggctgctggtggtctacccttggacccagaggtcgactcggaccgatg

SEQ ID NO: 14708 - DNA, 203 bp, Artificial sequence
  synthetic
ggcgcgccagtcctcttgtctgaactgacacaactgtgttcactagcaacccggcgggtacaccatggtgcatctgactcctgaggccggcgggtccgttactgccggcgggtgcaaggtgaacgtggatgaagttggtggtgaggccctgggcaggcccggcgggttctacccttggacccagaggtcgactcggaccgatg

SEQ ID NO: 14709 - DNA, 203 bp, Artificial sequence
  synthetic
ggcgcgccagtcctaacccatgatctgacacaactgtgttcactagcaacccggcgggtacaccatggtgcatctgactcctgaggccggcgggtccgttactgccggcgggtgcaaggtgaccggcgggtaagttggtgccggcgggttgggcaggcccggcgggttctacccttccggcgggtggtcgactcggaccgatg

SEQ ID NO: 14710 - DNA, 203 bp, Artificial sequence
  synthetic
ggcgcgccagtcctaccgagcctgctgacacaactgtgttcactagcaacccggcgggtacaccatggtgcatctgactcctgaggccggcgggtccgttactgccggcgggtgcaaggtgaccggcgggtaagttggtgccggcgggttgggcaggctgctggtggtctacccttccggcgggtggtcgactcggaccgatg

SEQ ID NO: 14711 - DNA, 203 bp, Artificial sequence
  synthetic
ggcgcgccagtcctacctaagcagctgacacaactgtgttcactagcaacccggcgggtacaccatggtgcatctgactcctgaggccggcgggtccgttactgccggcgggtgcaaggtgaccggcgggtaagttggtgccggcgggttgggcaggctgctggtggtctacccttggacccagaggtcgactcggaccgatg

SEQ ID NO: 14712 - DNA, 203 bp, Artificial sequence
  synthetic
ggcgcgccagtcctgtgagaagttctgacacaactgtgttcactagcaacccgtcaattcctttatggtgcatctgactcctgaggagaagtctgccgttactgccctgtggggcaaggtgaacgtggatgaagttggtggtgaggccctgggcaggctgctggtggtctacccttgttcttggcaaacgactcggaccgatg

SEQ ID NO: 14713 - DNA, 203 bp, Artificial sequence
  synthetic
ggcgcgccagtcctcttagaccacctgacacaactgtgttcactagcaaccgtcaattcctttaatggcgtcaattcctttagaggagaagtctgccgttactgccctgtggggcaaggtgaacgtggatgaagttggtggtgaggccctgggcaggccgtcaattcctttaccttggacccagaggtcgactcggaccgatg

SEQ ID NO: 14714 - DNA, 203 bp, Artificial sequence
  synthetic
ggcgcgccagtccttcagcttagactgacacaactgtgttcactagcaaccgtcaattcctttaatggcgtcaattcctttagaggagaagtctgccgttactgccctgtggggcaaggtgacgtcaattcctttaggtggtgaggccctgggcaggctgctggtggtctacccttggacccagaggtcgactcggaccgatg

SEQ ID NO: 14715 - DNA, 203 bp, Artificial sequence
  synthetic
ggcgcgccagtcctccacttctagctgacacaactgtgttcactagcaaccgtcaattcctttaatggcgtcaattcctttagaggagaagtctgccgttactgcgtcaattcctttagtgaacgtggatgaagttggtggtgaggccctgggcaggctgctggtggtctacccttggacccagaggtcgactcggaccgatg

SEQ ID NO: 14716 - DNA, 203 bp, Artificial sequence
  synthetic
ggcgcgccagtcctagtttgggtactgacacaactgtgttcactagcaaccgtcaattcctttaatggcgtcaattcctttagaggagaagtctgccgttactgcgtcaattcctttagtgacgtcaattcctttaggtggtgaggccctgggcaggctgctggtggtctacccttggacccagaggtcgactcggaccgatg

SEQ ID NO: 14717 - DNA, 203 bp, Artificial sequence
  synthetic
ggcgcgccagtcctcaacagtgacctgacacaactgtgttcactagcaaccgtcaattcctttaatggcgtcaattcctttagaggcgtcaattcctttaactgccctgtggggcaaggtgaacgtggatgaagttggtgcgtcaattcctttaaggctgctggtggtctacccttggacccagaggtcgactcggaccgatg

SEQ ID NO: 14718 - DNA, 203 bp, Artificial sequence
  synthetic
ggcgcgccagtcctccacttcggtctgacacaactgtgttcactagcaaccgtcaattcctttaatggcgtcaattcctttagaggcgtcaattcctttaactgccctgtggggcaaggtgacgtcaattcctttaggtgcgtcaattcctttaaggccgtcaattcctttaccttggacccagaggtcgactcggaccgatg

SEQ ID NO: 14719 - DNA, 203 bp, Artificial sequence
  synthetic
ggcgcgccagtcctttgtagcgttctgacacaactgtgttcactagcaaccgtcaattcctttaatggcgtcaattcctttagaggcgtcaattcctttaactgccctgtggggcaaggtgacgtcaattcctttaggtggtgaggccctgggcaggccgtcaattcctttaccttggacccagaggtcgactcggaccgatg

SEQ ID NO: 14720 - DNA, 203 bp, Artificial sequence
  synthetic
ggcgcgccagtcctaacgctactcctgacacaactgtgttcactagcaaccgtcaattcctttaatggcgtcaattcctttagaggcgtcaattcctttaactgccctgtggggcaaggtgacgtcaattcctttaggtggtgaggccctgggcaggctgctggtggtctacccttggacccagaggtcgactcggaccgatg

SEQ ID NO: 14721 - DNA, 203 bp, Artificial sequence
  synthetic
ggcgcgccagtcctcagatcagtgctgacacaactgtgttcactagcaaccgtcaattcctttaatggcgtcaattcctttagaggcgtcaattcctttaactgcgtcaattcctttagtgaacgtggatgaagttggtggtgaggccctgggcaggccgtcaattcctttaccttggacccagaggtcgactcggaccgatg

SEQ ID NO: 14722 - DNA, 203 bp, Artificial sequence
  synthetic
ggcgcgccagtccttcttgacgatctgacacaactgtgttcactagcaaccgtcaattcctttaatggcgtcaattcctttagaggcgtcaattcctttaactgcgtcaattcctttagtgacgtcaattcctttaggtggtgaggccctgggcaggctgctggtggtctacccttggacccagaggtcgactcggaccgatg

SEQ ID NO: 14723 - DNA, 203 bp, Artificial sequence
  synthetic
ggcgcgccagtcctctgatcaagactgacacaactgtgttcactagcaaccgtcaattcctttaatggtgcatctgactcctgaggagaagtctgccgttactgccctgtggggcaaggtgaacgtggatgaagttggtgcgtcaattcctttaaggctgctggtggtctacccttggacccagaggtcgactcggaccgatg

SEQ ID NO: 14724 - DNA, 203 bp, Artificial sequence
  synthetic
ggcgcgccagtccttgaacaacgactgacacaactgtgttcactagcaaccgtcaattcctttaatggtgcatctgactcctgaggagaagtctgccgttactgccctgtggggcaaggtgacgtcaattcctttaggtgcgtcaattcctttaaggccgtcaattcctttaccttggacccagaggtcgactcggaccgatg

SEQ ID NO: 14725 - DNA, 203 bp, Artificial sequence
  synthetic
ggcgcgccagtccttactgggtctctgacacaactgtgttcactagcaaccgtcaattcctttaatggtgcatctgactcctgaggagaagtctgccgttactgccctgtggggcaaggtgacgtcaattcctttaggtgcgtcaattcctttaaggctgctggtggtctacccttggacccagaggtcgactcggaccgatg

SEQ ID NO: 14726 - DNA, 203 bp, Artificial sequence
  synthetic
ggcgcgccagtcctggtaactgggctgacacaactgtgttcactagcaaccgtcaattcctttaatggtgcatctgactcctgaggagaagtctgccgttactgccctgtggggcaaggtgacgtcaattcctttaggtggtgaggccctgggcaggccgtcaattcctttaccttggacccagaggtcgactcggaccgatg

SEQ ID NO: 14727 - DNA, 203 bp, Artificial sequence
  synthetic
ggcgcgccagtcctcactgggttcctgacacaactgtgttcactagcaaccgtcaattcctttaatggtgcatctgactcctgaggagaagtctgccgttactgccctgtggggcaaggtgacgtcaattcctttaggtggtgaggccctgggcaggctgctggtggtctacccttggacccagaggtcgactcggaccgatg

SEQ ID NO: 14728 - DNA, 203 bp, Artificial sequence
  synthetic
ggcgcgccagtcctcccagtttgcctgacacaactgtgttcactagcaaccgtcaattcctttaatggtgcatctgactcctgaggagaagtctgccgttactgcgtcaattcctttagtgacgtcaattcctttaggtgcgtcaattcctttaaggccgtcaattcctttaccttggacccagaggtcgactcggaccgatg

SEQ ID NO: 14729 - DNA, 203 bp, Artificial sequence
  synthetic
ggcgcgccagtcctgaccgtttctctgacacaactgtgttcactagcaaccgtcaattcctttaatggtgcatctgactcctgaggcgtcaattcctttaactgccctgtggggcaaggtgaacgtggatgaagttggtgcgtcaattcctttaaggccgtcaattcctttaccttggacccagaggtcgactcggaccgatg

SEQ ID NO: 14730 - DNA, 203 bp, Artificial sequence
  synthetic
ggcgcgccagtccttgtgaactagctgacacaactgtgttcactagcaaccgtcaattcctttaatggtgcatctgactcctgaggcgtcaattcctttaactgccctgtggggcaaggtgacgtcaattcctttaggtgcgtcaattcctttaaggccgtcaattcctttaccttggacccagaggtcgactcggaccgatg

SEQ ID NO: 14731 - DNA, 203 bp, Artificial sequence
  synthetic
ggcgcgccagtcctctgaactaggctgacacaactgtgttcactagcaaccgtcaattcctttaatggtgcatctgactcctgaggcgtcaattcctttaactgccctgtggggcaaggtgacgtcaattcctttaggtgcgtcaattcctttaaggctgctggtggtctacccttggacccagaggtcgactcggaccgatg

SEQ ID NO: 14732 - DNA, 203 bp, Artificial sequence
  synthetic
ggcgcgccagtcctacgctcaccactgacacaactgtgttcactagcaaccgtcaattcctttaatggtgcatctgactcctgaggcgtcaattcctttaactgcgtcaattcctttagtgaacgtggatgaagttggtgcgtcaattcctttaaggccgtcaattcctttaccttggacccagaggtcgactcggaccgatg

SEQ ID NO: 14733 - DNA, 203 bp, Artificial sequence
  synthetic
ggcgcgccagtcctatgggttaaactgacacaactgtgttcactagcaaccgtcaattcctttaatggtgcatctgactcctgaggcgtcaattcctttaactgcgtcaattcctttagtgaacgtggatgaagttggtgcgtcaattcctttaaggctgctggtggtctacccttggacccagaggtcgactcggaccgatg

SEQ ID NO: 14734 - DNA, 203 bp, Artificial sequence
  synthetic
ggcgcgccagtcctagttaaaggactgacacaactgtgttcactagcaaccgtcaattcctttaatggtgcatctgactcctgaggcgtcaattcctttaactgcgtcaattcctttagtgaacgtggatgaagttggtggtgaggccctgggcaggccgtcaattcctttaccttggacccagaggtcgactcggaccgatg

SEQ ID NO: 14735 - DNA, 203 bp, Artificial sequence
  synthetic
ggcgcgccagtcctacgtaactcgctgacacaactgtgttcactagcaaccgtcaattcctttaatggtgcatctgactcctgaggcgtcaattcctttaactgcgtcaattcctttagtgacgtcaattcctttaggtggtgaggccctgggcaggctgctggtggtctacccttggacccagaggtcgactcggaccgatg

SEQ ID NO: 14736 - DNA, 203 bp, Artificial sequence
  synthetic
ggcgcgccagtcctggtagtctcgctgacacaactgtgttcactagcaacctacgacggtatctgatcgtcttcgaacctccgactttcgttcttgattaatgaaaacattcttggcaaatgctttcgctctggtccgtcttgcgccggtccaagaatttcacctctagcggcgcaagacccagaggtcgactcggaccgatg

SEQ ID NO: 14737 - DNA, 203 bp, Artificial sequence
  synthetic
ggcgcgccagtcctttcaagctcgctgacacaactgtgttcactagcaacctacgacggtatctgatcgtcttcgaacctccgactttcgttcttgattaatgaaaacattcttggcaaatgctttcgctctggtccgtcttgcgccggtccaagaatttcacctctagcggcgcaggacccagaggtcgactcggaccgatg

SEQ ID NO: 14738 - DNA, 203 bp, Artificial sequence
  synthetic
ggcgcgccagtcctgaacttgtcgctgacacaactgtgttcactagcaacctcaaacaaccggccgtgtgcatctgactcctgaggagaagtctgccgttactgccctgtggggcaaggtgaacgtggatgaagttggtggtgaggccctgggcaggctgctggtggtctacccttggaaccggccgtcgactcggaccgatg

SEQ ID NO: 14739 - DNA, 203 bp, Artificial sequence
  synthetic
ggcgcgccagtcctttgagtatcgctgacacaactgtgttcactagcaacctcaaacaaccggccgtgtgcatctgactcctgaggagaagtctgccgttactgccctgtggggcaaggtgaacgtggatgaagttggtggtgaggccctgggcaggctgctggtggtctacccttggaccggcgggtcgactcggaccgatg

SEQ ID NO: 14740 - DNA, 203 bp, Artificial sequence
  synthetic
ggcgcgccagtcctcgaggttgtcctgacacaactgtgttcactagcaacctcaaacaagcgaccaaaggaaccataactgatttaatgagccattcgcagtttcactgtaccggccgtgcgtactcagacatgcatggcttaatctttgagacaagcatatgctactggacccttggacccagaggtcgactcggaccgatg

SEQ ID NO: 14741 - DNA, 203 bp, Artificial sequence
  synthetic
ggcgcgccagtcctcgacgagcctctgacacaactgtgttcactagcaacctcaaacacacggaatcgagaatctgactcctgaggagaagtctgccgttactgccctgtggggcaaggtgaacgtggatgaagttggtggtgaggccctgggcaggctgctggtggtctacccttgttcttggcaaacgactcggaccgatg

SEQ ID NO: 14742 - DNA, 203 bp, Artificial sequence
  synthetic
ggcgcgccagtcctgtagctgtcgctgacacaactgtgttcactagcaacctcaaacacactcctggtggtgcccttccgtcaattcctttaagtttcagctttgcaaccatactccccccggaacccaaagactttggtttcccggaagctgcccggcgggtcatgggaacccttggacccagaggtcgactcggaccgatg

SEQ ID NO: 14743 - DNA, 203 bp, Artificial sequence
  synthetic
ggcgcgccagtcctcgagctctcactgacacaactgtgttcactagcaacctcaaacacgtgttgagtcaaattaagccgcaggctccactcctggtggtgcccttccgtcaattcctttaagtttcagctttgcaaccatactccccccggaacccaaagactttggttacccttggacccagaggtcgactcggaccgatg

SEQ ID NO: 14744 - DNA, 203 bp, Artificial sequence
  synthetic
ggcgcgccagtcctcgagttttcgctgacacaactgtgttcactagcaacctcaaacagaaccggccgtgcatctgactcctgaggagaagtctgccgttactgccctgtggggcaaggtgaacgtggatgaagttggtggtgaggccctgggcaggctgctggtggtctacccttggacctactccccgactcggaccgatg

SEQ ID NO: 14745 - DNA, 203 bp, Artificial sequence
  synthetic
ggcgcgccagtcctcgactcttacctgacacaactgtgttcactagcaacctcaaacagacaaccaaaggaaccataactgatttaatgagccattcgcagtttcactgtaccggccgtgcgtactcagacatgcatggcttaatctttgagacaagcatatgctagtctacccttggacccagaggtcgactcggaccgatg

SEQ ID NO: 14746 - DNA, 203 bp, Artificial sequence
  synthetic
ggcgcgccagtcctcgacaacgttctgacacaactgtgttcactagcaacctcaaacagacacaccatactccccccggaacccaaagactttggtttcccggaagctgcccggcgggtcatgggaataacgccgccgcatcgccggtcggcatcgtttatggtcggtctacccttggacccagaggtcgactcggaccgatg

SEQ ID NO: 14747 - DNA, 203 bp, Artificial sequence
  synthetic
ggcgcgccagtcctgagcctctcgctgacacaactgtgttcactagcaacctcaaacagacacacggaatcgagaaactcctgaggagaagtctgccgttactgccctgtggggcaaggtgaacgtggatgaagttggtggtgaggccctgggcaggctgctggtggtctaccccacggaatcgagaacgactcggaccgatg

SEQ ID NO: 14748 - DNA, 203 bp, Artificial sequence
  synthetic
ggcgcgccagtcctcgaatcctggctgacacaactgtgttcactagcaacctcaaacagacaccaatcgtcttcgaacctccgactttcgttcttgattaatgaaaacattcttggcaaatgctttcgctctggtccgtcttgcgccggtccaagaatttcacgtggtctacccttggacccagaggtcgactcggaccgatg

SEQ ID NO: 14749 - DNA, 203 bp, Artificial sequence
  synthetic
ggcgcgccagtccttcgctcgtcgctgacacaactgtgttcactagcaacctcaaacagacaccacacggaatcgagaacctgaggagaagtctgccgttactgccctgtggggcaaggtgaacgtggatgaagttggtggtgaggccctgggcaggctgctggtggtctacccttgttcttggcaaacgactcggaccgatg

SEQ ID NO: 14750 - DNA, 203 bp, Artificial sequence
  synthetic
ggcgcgccagtcctcgatcggtcactgacacaactgtgttcactagcaacctcaaacagacaccacatactccccccggaacccaaagactttggtttcccggaagctgcccggcgggtcatgggaataacgccgccgcatcgccggtcggcatcgtttatgggtggtctacccttggacccagaggtcgactcggaccgatg

SEQ ID NO: 14751 - DNA, 203 bp, Artificial sequence
  synthetic
ggcgcgccagtcctcgaagcttagctgacacaactgtgttcactagcaacctcaaacagacaccaccggcgggttgactcctgaggagaagtctgccgttactgccctgtggggcaaggtgaacgtggatgaagttggtggtgaggccctgggcaggctgctggtggtctacccttggaaccggccgtcgactcggaccgatg

SEQ ID NO: 14752 - DNA, 203 bp, Artificial sequence
  synthetic
ggcgcgccagtcctcgacttgtatctgacacaactgtgttcactagcaacctcaaacagacaccaggtggtgcccttccgtcaattcctttaagtttcagctttgcaaccatactccccccggaacccaaagactttggtttcccggaagctgcccggcgggtgtggtctacccttggacccagaggtcgactcggaccgatg

SEQ ID NO: 14753 - DNA, 203 bp, Artificial sequence
  synthetic
ggcgcgccagtcctcgacgaactactgacacaactgtgttcactagcaacctcaaacagacaccatgaccggccgtactcctgaggagaagtctgccgttactgccctgtggggcaaggtgaacgtggatgaagttggtggtgaggccctgggcaggctgctggtggtctacccttggacccagaggtcgactcggaccgatg

SEQ ID NO: 14754 - DNA, 203 bp, Artificial sequence
  synthetic
ggcgcgccagtcctggcaacttcgctgacacaactgtgttcactagcaacctcaaacagacaccatgaggaaccataactgatttaatgagccattcgcagtttcactgtaccggccgtgcgtactcagacatgcatggcttaatctttgagacaagcatatggtggtctacccttggacccagaggtcgactcggaccgatg

SEQ ID NO: 14755 - DNA, 203 bp, Artificial sequence
  synthetic
ggcgcgccagtcctcgactggacactgacacaactgtgttcactagcaacctcaaacagacaccatgcgtcaattcctttatgaggagaagtctgccgttactgccctgtggggcaaggtgaacgtggatgaagttggtggtgaggccctgggcaggctgctggtggtctacccttggaaccggccgtcgactcggaccgatg

SEQ ID NO: 14756 - DNA, 203 bp, Artificial sequence
  synthetic
ggcgcgccagtcctcgacttcattctgacacaactgtgttcactagcaacctcaaacagacaccatggaccggccgtctcctgaggaccggccgtccgttactgaccggccgtgcaaggtgaaccggccgtaagttggtgaccggccgttgggcaggcaccggccgttctacccttggacccagaggtcgactcggaccgatg

SEQ ID NO: 14757 - DNA, 203 bp, Artificial sequence
  synthetic
ggcgcgccagtcctccactttcttctgacacaactgtgttcactagcaacctcaaacagacaccatggaccggccgtctcctgaggaccggccgtccgttactgaccggccgtgcaaggtgaaccggccgtaagttggtggtgaggccctgggcaggctgctggtggtctacccttaccggccgtggtcgactcggaccgatg

SEQ ID NO: 14758 - DNA, 203 bp, Artificial sequence
  synthetic
ggcgcgccagtcctaaatcacagcctgacacaactgtgttcactagcaacctcaaacagacaccatggaccggccgtctcctgaggaccggccgtccgttactgaccggccgtgcaaggtgaacgtggatgaagttggtgaccggccgttgggcaggcaccggccgttctacccttaccggccgtggtcgactcggaccgatg

SEQ ID NO: 14759 - DNA, 203 bp, Artificial sequence
  synthetic
ggcgcgccagtcctcagcaaatgactgacacaactgtgttcactagcaacctcaaacagacaccatggaccggccgtctcctgaggaccggccgtccgttactgaccggccgtgcaaggtgaacgtggatgaagttggtgaccggccgttgggcaggcaccggccgttctacccttggacccagaggtcgactcggaccgatg

SEQ ID NO: 14760 - DNA, 203 bp, Artificial sequence
  synthetic
ggcgcgccagtcctagcaaaatgcctgacacaactgtgttcactagcaacctcaaacagacaccatggaccggccgtctcctgaggaccggccgtccgttactgaccggccgtgcaaggtgaacgtggatgaagttggtggtgaggccctgggcaggcaccggccgttctacccttggacccagaggtcgactcggaccgatg

SEQ ID NO: 14761 - DNA, 203 bp, Artificial sequence
  synthetic
ggcgcgccagtcctacagaaatcactgacacaactgtgttcactagcaacctcaaacagacaccatggaccggccgtctcctgaggaccggccgtccgttactgccctgtggggcaaggtgaaccggccgtaagttggtgaccggccgttgggcaggcaccggccgttctacccttaccggccgtggtcgactcggaccgatg

SEQ ID NO: 14762 - DNA, 203 bp, Artificial sequence
  synthetic
ggcgcgccagtcctatgaaaatcgctgacacaactgtgttcactagcaacctcaaacagacaccatggaccggccgtctcctgaggaccggccgtccgttactgccctgtggggcaaggtgaaccggccgtaagttggtggtgaggccctgggcaggctgctggtggtctacccttggacccagaggtcgactcggaccgatg

SEQ ID NO: 14763 - DNA, 203 bp, Artificial sequence
  synthetic
ggcgcgccagtccttctcacaaatctgacacaactgtgttcactagcaacctcaaacagacaccatggaccggccgtctcctgaggaccggccgtccgttactgccctgtggggcaaggtgaacgtggatgaagttggtggtgaggccctgggcaggcaccggccgttctacccttaccggccgtggtcgactcggaccgatg

SEQ ID NO: 14764 - DNA, 203 bp, Artificial sequence
  synthetic
ggcgcgccagtcctaaatcgattcctgacacaactgtgttcactagcaacctcaaacagacaccatggaccggccgtctcctgaggagaagtctgccgttactgaccggccgtgcaaggtgaaccggccgtaagttggtgaccggccgttgggcaggctgctggtggtctacccttaccggccgtggtcgactcggaccgatg

SEQ ID NO: 14765 - DNA, 203 bp, Artificial sequence
  synthetic
ggcgcgccagtcctcaacaaatcgctgacacaactgtgttcactagcaacctcaaacagacaccatggaccggccgtctcctgaggagaagtctgccgttactgaccggccgtgcaaggtgaaccggccgtaagttggtgaccggccgttgggcaggctgctggtggtctacccttggacccagaggtcgactcggaccgatg

SEQ ID NO: 14766 - DNA, 203 bp, Artificial sequence
  synthetic
ggcgcgccagtcctctcaaatggtctgacacaactgtgttcactagcaacctcaaacagacaccatggaccggccgtctcctgaggagaagtctgccgttactgaccggccgtgcaaggtgaacgtggatgaagttggtgaccggccgttgggcaggcaccggccgttctacccttaccggccgtggtcgactcggaccgatg

SEQ ID NO: 14767 - DNA, 203 bp, Artificial sequence
  synthetic
ggcgcgccagtcctagctcattttctgacacaactgtgttcactagcaacctcaaacagacaccatggaccggccgtctcctgaggagaagtctgccgttactgaccggccgtgcaaggtgaacgtggatgaagttggtgaccggccgttgggcaggctgctggtggtctacccttaccggccgtggtcgactcggaccgatg

SEQ ID NO: 14768 - DNA, 203 bp, Artificial sequence
  synthetic
ggcgcgccagtcctcctcagatttctgacacaactgtgttcactagcaacctcaaacagacaccatggaccggccgtctcctgaggagaagtctgccgttactgaccggccgtgcaaggtgaacgtggatgaagttggtggtgaggccctgggcaggcaccggccgttctacccttaccggccgtggtcgactcggaccgatg

SEQ ID NO: 14769 - DNA, 203 bp, Artificial sequence
  synthetic
ggcgcgccagtccttacttgatttctgacacaactgtgttcactagcaacctcaaacagacaccatggaccggccgtctcctgaggagaagtctgccgttactgccctgtggggcaaggtgaaccggccgtaagttggtgaccggccgttgggcaggctgctggtggtctacccttggacccagaggtcgactcggaccgatg

SEQ ID NO: 14770 - DNA, 203 bp, Artificial sequence
  synthetic
ggcgcgccagtcctaacatttgaactgacacaactgtgttcactagcaacctcaaacagacaccatggaccggccgtctcctgaggagaagtctgccgttactgccctgtggggcaaggtgaaccggccgtaagttggtggtgaggccctgggcaggcaccggccgttctacccttaccggccgtggtcgactcggaccgatg

SEQ ID NO: 14771 - DNA, 203 bp, Artificial sequence
  synthetic
ggcgcgccagtcctcatttctttgctgacacaactgtgttcactagcaacctcaaacagacaccatggaccggccgtctcctgaggagaagtctgccgttactgccctgtggggcaaggtgaacgtggatgaagttggtgaccggccgttgggcaggctgctggtggtctacccttggacccagaggtcgactcggaccgatg

SEQ ID NO: 14772 - DNA, 203 bp, Artificial sequence
  synthetic
ggcgcgccagtcctgtgatttcacctgacacaactgtgttcactagcaacctcaaacagacaccatggaccggccgtctcctgaggagaagtctgccgttactgccctgtggggcaaggtgaacgtggatgaagttggtggtgaggccctgggcaggcaccggccgttctacccttggacccagaggtcgactcggaccgatg

SEQ ID NO: 14773 - DNA, 203 bp, Artificial sequence
  synthetic
ggcgcgccagtcctcatttcacttctgacacaactgtgttcactagcaacctcaaacagacaccatggaccggccgtctcctgaggagaagtctgccgttactgccctgtggggcaaggtgaacgtggatgaagttggtggtgaggccctgggcaggctgctggtggtctacccttaccggccgtggtcgactcggaccgatg

SEQ ID NO: 14774 - DNA, 203 bp, Artificial sequence
  synthetic
ggcgcgccagtccttgcaacatttctgacacaactgtgttcactagcaacctcaaacagacaccatggcacggaatcgagaagaggagaagtctgccgttactgcacggaatcgagaagtgaacgtggatgaagttggtgcacggaatcgagaaaggctgctggtggtctacccttggacccagaggtcgactcggaccgatg

SEQ ID NO: 14775 - DNA, 203 bp, Artificial sequence
  synthetic
ggcgcgccagtcctagattttcgtctgacacaactgtgttcactagcaacctcaaacagacaccatggcacggaatcgagaagaggagaagtctgccgttactgcacggaatcgagaagtgaacgtggatgaagttggtggtgaggccctgggcaggccacggaatcgagaaccttggacccagaggtcgactcggaccgatg

SEQ ID NO: 14776 - DNA, 203 bp, Artificial sequence
  synthetic
ggcgcgccagtcctccaagatttcctgacacaactgtgttcactagcaacctcaaacagacaccatggcacggaatcgagaagaggagaagtctgccgttactgcacggaatcgagaagtgacacggaatcgagaaggtggtgaggccctgggcaggctgctggtggtctacccttggacccagaggtcgactcggaccgatg

SEQ ID NO: 14777 - DNA, 203 bp, Artificial sequence
  synthetic
ggcgcgccagtcctcgacctacaactgacacaactgtgttcactagcaacctcaaacagacaccatggcacggaatcgagaagaggagaagtctgccgttactgccctgtggggcaaggtgacacggaatcgagaaggtgcacggaatcgagaaaggctgctggtggtctacccttggacccagaggtcgactcggaccgatg

SEQ ID NO: 14778 - DNA, 203 bp, Artificial sequence
  synthetic
ggcgcgccagtcctccaaccagtgctgacacaactgtgttcactagcaacctcaaacagacaccatggcacggaatcgagaagaggagaagtctgccgttactgccctgtggggcaaggtgacacggaatcgagaaggtggtgaggccctgggcaggctgctggtggtctacccttggacccagaggtcgactcggaccgatg

SEQ ID NO: 14779 - DNA, 203 bp, Artificial sequence
  synthetic
ggcgcgccagtcctggctacatggctgacacaactgtgttcactagcaacctcaaacagacaccatggcacggaatcgagaagaggcacggaatcgagaaactgcacggaatcgagaagtgacacggaatcgagaaggtgcacggaatcgagaaaggctgctggtggtctacccttggacccagaggtcgactcggaccgatg

SEQ ID NO: 14780 - DNA, 203 bp, Artificial sequence
  synthetic
ggcgcgccagtcctactacatgagctgacacaactgtgttcactagcaacctcaaacagacaccatggcacggaatcgagaagaggcacggaatcgagaaactgcacggaatcgagaagtgacacggaatcgagaaggtggtgaggccctgggcaggctgctggtggtctacccttggacccagaggtcgactcggaccgatg

SEQ ID NO: 14781 - DNA, 203 bp, Artificial sequence
  synthetic
ggcgcgccagtccttggtatgcgactgacacaactgtgttcactagcaacctcaaacagacaccatggcacggaatcgagaagaggcacggaatcgagaaactgccctgtggggcaaggtgaacgtggatgaagttggtggtgaggccctgggcaggctgctggtggtctacccttggacccagaggtcgactcggaccgatg

SEQ ID NO: 14782 - DNA, 203 bp, Artificial sequence
  synthetic
ggcgcgccagtcctacgagcagcactgacacaactgtgttcactagcaacctcaaacagacaccatggccggcgggtctcctgaggagaagtctgccgttactgccctgtggggcaaggtgaacgtggatgaagttggtgccggcgggttgggcaggctgctggtggtctacccttggacccagaggtcgactcggaccgatg

SEQ ID NO: 14783 - DNA, 203 bp, Artificial sequence
  synthetic
ggcgcgccagtcctgtgcagcatactgacacaactgtgttcactagcaacctcaaacagacaccatggccggcgggtctcctgaggagaagtctgccgttactgccctgtggggcaaggtgaacgtggatgaagttggtggtgaggccctgggcaggctgctggtggtctacccttccggcgggtggtcgactcggaccgatg

SEQ ID NO: 14784 - DNA, 203 bp, Artificial sequence
  synthetic
ggcgcgccagtccttcttcgttggctgacacaactgtgttcactagcaacctcaaacagacaccatggccggcgggtctcctgaggagaagtctgccgttactgccctgtggggcaaggtgaccggcgggtaagttggtggtgaggccctgggcaggcccggcgggttctacccttccggcgggtggtcgactcggaccgatg

SEQ ID NO: 14785 - DNA, 203 bp, Artificial sequence
  synthetic
ggcgcgccagtcctatccaacagtctgacacaactgtgttcactagcaacctcaaacagacaccatggccggcgggtctcctgaggagaagtctgccgttactgccctgtggggcaaggtgaccggcgggtaagttggtggtgaggccctgggcaggcccggcgggttctacccttggacccagaggtcgactcggaccgatg

SEQ ID NO: 14786 - DNA, 203 bp, Artificial sequence
  synthetic
ggcgcgccagtcctcacacttaacctgacacaactgtgttcactagcaacctcaaacagacaccatggccggcgggtctcctgaggagaagtctgccgttactgccctgtggggcaaggtgaccggcgggtaagttggtggtgaggccctgggcaggctgctggtggtctacccttccggcgggtggtcgactcggaccgatg

SEQ ID NO: 14787 - DNA, 203 bp, Artificial sequence
  synthetic
ggcgcgccagtcctttaggcctcgctgacacaactgtgttcactagcaacctcaaacagacaccatggccggcgggtctcctgaggagaagtctgccgttactgccggcgggtgcaaggtgaacgtggatgaagttggtgccggcgggttgggcaggcccggcgggttctacccttccggcgggtggtcgactcggaccgatg

SEQ ID NO: 14788 - DNA, 203 bp, Artificial sequence
  synthetic
ggcgcgccagtcctgttaggcctcctgacacaactgtgttcactagcaacctcaaacagacaccatggccggcgggtctcctgaggagaagtctgccgttactgccggcgggtgcaaggtgaacgtggatgaagttggtgccggcgggttgggcaggcccggcgggttctacccttggacccagaggtcgactcggaccgatg

SEQ ID NO: 14789 - DNA, 203 bp, Artificial sequence
  synthetic
ggcgcgccagtcctggcctagtggctgacacaactgtgttcactagcaacctcaaacagacaccatggccggcgggtctcctgaggagaagtctgccgttactgccggcgggtgcaaggtgaacgtggatgaagttggtgccggcgggttgggcaggctgctggtggtctacccttggacccagaggtcgactcggaccgatg

SEQ ID NO: 14790 - DNA, 203 bp, Artificial sequence
  synthetic
ggcgcgccagtcctttaagcacttctgacacaactgtgttcactagcaacctcaaacagacaccatggccggcgggtctcctgaggagaagtctgccgttactgccggcgggtgcaaggtgaacgtggatgaagttggtggtgaggccctgggcaggctgctggtggtctacccttccggcgggtggtcgactcggaccgatg

SEQ ID NO: 14791 - DNA, 203 bp, Artificial sequence
  synthetic
ggcgcgccagtccttgtgcttgtactgacacaactgtgttcactagcaacctcaaacagacaccatggccggcgggtctcctgaggagaagtctgccgttactgccggcgggtgcaaggtgaccggcgggtaagttggtgccggcgggttgggcaggcccggcgggttctacccttccggcgggtggtcgactcggaccgatg

SEQ ID NO: 14792 - DNA, 203 bp, Artificial sequence
  synthetic
ggcgcgccagtcctatgtgcttacctgacacaactgtgttcactagcaacctcaaacagacaccatggccggcgggtctcctgaggagaagtctgccgttactgccggcgggtgcaaggtgaccggcgggtaagttggtgccggcgggttgggcaggctgctggtggtctacccttggacccagaggtcgactcggaccgatg

SEQ ID NO: 14793 - DNA, 203 bp, Artificial sequence
  synthetic
ggcgcgccagtcctgtgcttgtaactgacacaactgtgttcactagcaacctcaaacagacaccatggccggcgggtctcctgaggagaagtctgccgttactgccggcgggtgcaaggtgaccggcgggtaagttggtggtgaggccctgggcaggcccggcgggttctacccttccggcgggtggtcgactcggaccgatg

SEQ ID NO: 14794 - DNA, 203 bp, Artificial sequence
  synthetic
ggcgcgccagtcctagtgcttttcctgacacaactgtgttcactagcaacctcaaacagacaccatggccggcgggtctcctgaggccggcgggtccgttactgccctgtggggcaaggtgaacgtggatgaagttggtgccggcgggttgggcaggcccggcgggttctacccttccggcgggtggtcgactcggaccgatg

SEQ ID NO: 14795 - DNA, 203 bp, Artificial sequence
  synthetic
ggcgcgccagtcctgtaagcaccactgacacaactgtgttcactagcaacctcaaacagacaccatggccggcgggtctcctgaggccggcgggtccgttactgccctgtggggcaaggtgaacgtggatgaagttggtgccggcgggttgggcaggcccggcgggttctacccttggacccagaggtcgactcggaccgatg

SEQ ID NO: 14796 - DNA, 203 bp, Artificial sequence
  synthetic
ggcgcgccagtccttaggttagttctgacacaactgtgttcactagcaacctcaaacagacaccatggccggcgggtctcctgaggccggcgggtccgttactgccctgtggggcaaggtgaccggcgggtaagttggtgccggcgggttgggcaggctgctggtggtctacccttccggcgggtggtcgactcggaccgatg

SEQ ID NO: 14797 - DNA, 203 bp, Artificial sequence
  synthetic
ggcgcgccagtcctatactgaggactgacacaactgtgttcactagcaacctcaaacagacaccatggccggcgggtctcctgaggccggcgggtccgttactgccctgtggggcaaggtgaccggcgggtaagttggtgccggcgggttgggcaggctgctggtggtctacccttggacccagaggtcgactcggaccgatg

SEQ ID NO: 14798 - DNA, 203 bp, Artificial sequence
  synthetic
ggcgcgccagtcctaatcacttagctgacacaactgtgttcactagcaacctcaaacagacaccatggccggcgggtctcctgaggccggcgggtccgttactgccggcgggtgcaaggtgaacgtggatgaagttggtgccggcgggttgggcaggcccggcgggttctacccttggacccagaggtcgactcggaccgatg

SEQ ID NO: 14799 - DNA, 203 bp, Artificial sequence
  synthetic
ggcgcgccagtcctcacgcctagcctgacacaactgtgttcactagcaacctcaaacagacaccatggccggcgggtctcctgaggccggcgggtccgttactgccggcgggtgcaaggtgaacgtggatgaagttggtggtgaggccctgggcaggctgctggtggtctacccttccggcgggtggtcgactcggaccgatg

SEQ ID NO: 14800 - DNA, 203 bp, Artificial sequence
  synthetic
ggcgcgccagtccttactgagcgactgacacaactgtgttcactagcaacctcaaacagacaccatggccggcgggtctcctgaggccggcgggtccgttactgccggcgggtgcaaggtgaccggcgggtaagttggtgccggcgggttgggcaggcccggcgggttctacccttccggcgggtggtcgactcggaccgatg

SEQ ID NO: 14801 - DNA, 203 bp, Artificial sequence
  synthetic
ggcgcgccagtcctgatcaaccgtctgacacaactgtgttcactagcaacctcaaacagacaccatggccggcgggtctcctgaggccggcgggtccgttactgccggcgggtgcaaggtgaccggcgggtaagttggtgccggcgggttgggcaggcccggcgggttctacccttccggcgggtggtcgactcggaccgatg

SEQ ID NO: 14802 - DNA, 203 bp, Artificial sequence
  synthetic
ggcgcgccagtccttctgcaacacctgacacaactgtgttcactagcaacctcaaacagacaccatggccggcgggtctcctgaggccggcgggtccgttactgccggcgggtgcaaggtgaccggcgggtaagttggtgccggcgggttgggcaggcccggcgggttctacccttccggcgggtggtcgactcggaccgatg

SEQ ID NO: 14803 - DNA, 203 bp, Artificial sequence
  synthetic
ggcgcgccagtcctcctgtaaaccctgacacaactgtgttcactagcaacctcaaacagacaccatggccggcgggtctcctgaggccggcgggtccgttactgccggcgggtgcaaggtgaccggcgggtaagttggtgccggcgggttgggcaggcccggcgggttctacccttccggcgggtggtcgactcggaccgatg

SEQ ID NO: 14804 - DNA, 203 bp, Artificial sequence
  synthetic
ggcgcgccagtcctcaagtgaaccctgacacaactgtgttcactagcaacctcaaacagacaccatggccggcgggtctcctgaggccggcgggtccgttactgccggcgggtgcaaggtgaccggcgggtaagttggtggtgaggccctgggcaggcccggcgggttctacccttccggcgggtggtcgactcggaccgatg

SEQ ID NO: 14805 - DNA, 203 bp, Artificial sequence
  synthetic
ggcgcgccagtcctggctaaccttctgacacaactgtgttcactagcaacctcaaacagacaccatggcgtcaattcctttagaggagaagtctgccgttactgccctgtggggcaaggtgaacgtggatgaagttggtgcgtcaattcctttaaggctgctggtggtctacccttggacccagaggtcgactcggaccgatg

SEQ ID NO: 14806 - DNA, 203 bp, Artificial sequence
  synthetic
ggcgcgccagtcctaagagtgtccctgacacaactgtgttcactagcaacctcaaacagacaccatggcgtcaattcctttagaggagaagtctgccgttactgcgtcaattcctttagtgaacgtggatgaagttggtgcgtcaattcctttaaggctgctggtggtctacccttggacccagaggtcgactcggaccgatg

SEQ ID NO: 14807 - DNA, 203 bp, Artificial sequence
  synthetic
ggcgcgccagtccttgaggtaaccctgacacaactgtgttcactagcaacctcaaacagacaccatggcgtcaattcctttagaggagaagtctgccgttactgcgtcaattcctttagtgacgtcaattcctttaggtgcgtcaattcctttaaggctgctggtggtctacccttggacccagaggtcgactcggaccgatg

SEQ ID NO: 14808 - DNA, 203 bp, Artificial sequence
  synthetic
ggcgcgccagtcctggcaacagatctgacacaactgtgttcactagcaacctcaaacagacaccatggcgtcaattcctttagaggagaagtctgccgttactgcgtcaattcctttagtgacgtcaattcctttaggtggtgaggccctgggcaggctgctggtggtctacccttggacccagaggtcgactcggaccgatg

SEQ ID NO: 14809 - DNA, 203 bp, Artificial sequence
  synthetic
ggcgcgccagtcctggtcaaagctctgacacaactgtgttcactagcaacctcaaacagacaccatggcgtcaattcctttagaggcgtcaattcctttaactgccctgtggggcaaggtgacgtcaattcctttaggtgcgtcaattcctttaaggccgtcaattcctttaccttggacccagaggtcgactcggaccgatg

SEQ ID NO: 14810 - DNA, 203 bp, Artificial sequence
  synthetic
ggcgcgccagtcctggttcttgacctgacacaactgtgttcactagcaacctcaaacagacaccatggcgtcaattcctttagaggcgtcaattcctttaactgccctgtggggcaaggtgacgtcaattcctttaggtggtgaggccctgggcaggccgtcaattcctttaccttggacccagaggtcgactcggaccgatg

SEQ ID NO: 14811 - DNA, 203 bp, Artificial sequence
  synthetic
ggcgcgccagtcctggtttgcagtctgacacaactgtgttcactagcaacctcaaacagacaccatggcgtcaattcctttagaggcgtcaattcctttaactgcgtcaattcctttagtgacgtcaattcctttaggtgcgtcaattcctttaaggccgtcaattcctttaccttggacccagaggtcgactcggaccgatg

SEQ ID NO: 14812 - DNA, 203 bp, Artificial sequence
  synthetic
ggcgcgccagtcctggttaaccagctgacacaactgtgttcactagcaacctcaaacagacaccatggggaaccataactgatttaatgagccattcgcagtttcactgtaccggccgtgcgtactcagacatgcatggcttaatctttgagacaagcatctggtggtctacccttggacccagaggtcgactcggaccgatg

SEQ ID NO: 14813 - DNA, 203 bp, Artificial sequence
  synthetic
ggcgcgccagtcctggctaaaggtctgacacaactgtgttcactagcaacctcaaacagacaccatggggtgcccttccgtcaattcctttaagtttcagctttgcaaccatactccccccggaacccaaagactttggtttcccggaagctgcccggcgctggtggtctacccttggacccagaggtcgactcggaccgatg

SEQ ID NO: 14814 - DNA, 203 bp, Artificial sequence
  synthetic
ggcgcgccagtcctggtttctgagctgacacaactgtgttcactagcaacctcaaacagacaccatggtaaattaagccgcaggctccactcctggtggtgcccttccgtcaattcctttaagtttcagctttgcaaccatactccccccggaacccaagctggtggtctacccttggacccagaggtcgactcggaccgatg

SEQ ID NO: 14815 - DNA, 203 bp, Artificial sequence
  synthetic
ggcgcgccagtcctggacaaactgctgacacaactgtgttcactagcaacctcaaacagacaccatggtactcccgactcctgaggagaagtctgccgttactgccctgtggggcaaggtgaacgtggatgaagttggtggtgaggccctgggcaggctactcccggtctaccctttactcccgaggtcgactcggaccgatg

SEQ ID NO: 14816 - DNA, 203 bp, Artificial sequence
  synthetic
ggcgcgccagtcctggactgtcttctgacacaactgtgttcactagcaacctcaaacagacaccatggtactcccgactcctgaggagaagtctgccgttactgccctgtggggcaaggtgaacgtggatgaagttggtgtactccccctgggcaggctactcccggtctacccttggacccagaggtcgactcggaccgatg

SEQ ID NO: 14817 - DNA, 203 bp, Artificial sequence
  synthetic
ggcgcgccagtcctagtcgataccctgacacaactgtgttcactagcaacctcaaacagacaccatggtactcccgactcctgaggagaagtctgccgttactgccctgtggggcaaggtgatactccctgaagttggtggtgaggccctgggcaggctgctggtggtctaccctttactcccgaggtcgactcggaccgatg

SEQ ID NO: 14818 - DNA, 203 bp, Artificial sequence
  synthetic
ggcgcgccagtcctgtagtcgatactgacacaactgtgttcactagcaacctcaaacagacaccatggtactcccgactcctgaggagaagtctgccgttactgccctgtggggcaaggtgatactccctgaagttggtgtactccccctgggcaggctgctggtggtctacccttggacccagaggtcgactcggaccgatg

SEQ ID NO: 14819 - DNA, 203 bp, Artificial sequence
  synthetic
ggcgcgccagtccttcgactgtcactgacacaactgtgttcactagcaacctcaaacagacaccatggtactcccgactcctgaggagaagtctgccgttactgtactcccgggcaaggtgaacgtggatgaagttggtggtgaggccctgggcaggctactcccggtctacccttggacccagaggtcgactcggaccgatg

SEQ ID NO: 14820 - DNA, 203 bp, Artificial sequence
  synthetic
ggcgcgccagtcctagcgttttgcctgacacaactgtgttcactagcaacctcaaacagacaccatggtactcccgactcctgaggagaagtctgccgttactgtactcccgggcaaggtgaacgtggatgaagttggtgtactccccctgggcaggctactcccggtctaccctttactcccgaggtcgactcggaccgatg

SEQ ID NO: 14821 - DNA, 203 bp, Artificial sequence
  synthetic
ggcgcgccagtcctaacagcgtttctgacacaactgtgttcactagcaacctcaaacagacaccatggtactcccgactcctgaggagaagtctgccgttactgtactcccgggcaaggtgaacgtggatgaagttggtgtactccccctgggcaggctgctggtggtctaccctttactcccgaggtcgactcggaccgatg

SEQ ID NO: 14822 - DNA, 203 bp, Artificial sequence
  synthetic
ggcgcgccagtcctaaacgctcgtctgacacaactgtgttcactagcaacctcaaacagacaccatggtactcccgactcctgaggagaagtctgccgttactgtactcccgggcaaggtgatactccctgaagttggtggtgaggccctgggcaggctgctggtggtctaccctttactcccgaggtcgactcggaccgatg

SEQ ID NO: 14823 - DNA, 203 bp, Artificial sequence
  synthetic
ggcgcgccagtcctgtgggtctacctgacacaactgtgttcactagcaacctcaaacagacaccatggtactcccgactcctgaggagaagtctgccgttactgtactcccgggcaaggtgatactccctgaagttggtgtactccccctgggcaggctactcccggtctacccttggacccagaggtcgactcggaccgatg

SEQ ID NO: 14824 - DNA, 203 bp, Artificial sequence
  synthetic
ggcgcgccagtcctggttgcaccactgacacaactgtgttcactagcaacctcaaacagacaccatggtactcccgactcctgaggtactccctgccgttactgccctgtggggcaaggtgaacgtggatgaagttggtggtgaggccctgggcaggctactcccggtctaccctttactcccgaggtcgactcggaccgatg

SEQ ID NO: 14825 - DNA, 203 bp, Artificial sequence
  synthetic
ggcgcgccagtcctgaggtacacactgacacaactgtgttcactagcaacctcaaacagacaccatggtactcccgactcctgaggtactccctgccgttactgccctgtggggcaaggtgaacgtggatgaagttggtgtactccccctgggcaggctgctggtggtctacccttggacccagaggtcgactcggaccgatg

SEQ ID NO: 14826 - DNA, 203 bp, Artificial sequence
  synthetic
ggcgcgccagtcctgctcaaaattctgacacaactgtgttcactagcaacctcaaacagacaccatggtactcccgactcctgaggtactccctgccgttactgccctgtggggcaaggtgatactccctgaagttggtggtgaggccctgggcaggctactcccggtctaccctttactcccgaggtcgactcggaccgatg

SEQ ID NO: 14827 - DNA, 203 bp, Artificial sequence
  synthetic
ggcgcgccagtcctccaccaaattctgacacaactgtgttcactagcaacctcaaacagacaccatggtactcccgactcctgaggtactccctgccgttactgccctgtggggcaaggtgatactccctgaagttggtggtgaggccctgggcaggctgctggtggtctaccctttactcccgaggtcgactcggaccgatg

SEQ ID NO: 14828 - DNA, 203 bp, Artificial sequence
  synthetic
ggcgcgccagtccttgtagaaattctgacacaactgtgttcactagcaacctcaaacagacaccatggtactcccgactcctgaggtactccctgccgttactgccctgtggggcaaggtgatactccctgaagttggtgtactccccctgggcaggctactcccggtctaccctttactcccgaggtcgactcggaccgatg

SEQ ID NO: 14829 - DNA, 203 bp, Artificial sequence
  synthetic
ggcgcgccagtccttagaacttgcctgacacaactgtgttcactagcaacctcaaacagacaccatggtactcccgactcctgaggtactccctgccgttactgtactcccgggcaaggtgatactccctgaagttggtgtactccccctgggcaggctgctggtggtctaccctttactcccgaggtcgactcggaccgatg

SEQ ID NO: 14830 - DNA, 203 bp, Artificial sequence
  synthetic
ggcgcgccagtcctctagaacttcctgacacaactgtgttcactagcaacctcaaacagacaccatggtatcgctccaccaactaagaacggccatgcaccaccacccacggaatcgagaaagagctatcaatctgtcaatcctgtccgtgtccgggccgctggtggtctacccttggacccagaggtcgactcggaccgatg

SEQ ID NO: 14831 - DNA, 203 bp, Artificial sequence
  synthetic
ggcgcgccagtcctaatctgacgtctgacacaactgtgttcactagcaacctcaaacagacaccatggtcacggaatcgagaaaggagaagtctgccgttactgccctgtggggcaaggtgaacgtggatgaagttggtggtgaggccctgggcaggctgctggtggtctacccttggacctactccccgactcggaccgatg

SEQ ID NO: 14832 - DNA, 203 bp, Artificial sequence
  synthetic
ggcgcgccagtccttgctcggtgactgacacaactgtgttcactagcaacctcaaacagacaccatggtcgtcaattcctttaaggagaagtctgccgttactgccctgtggggcaaggtgaacgtggatgaagttggtggtgaggccctgggcaggctgctggtggtctacccttggacccagaggtcgactcggaccgatg

SEQ ID NO: 14833 - DNA, 203 bp, Artificial sequence
  synthetic
ggcgcgccagtcctgacaacattcctgacacaactgtgttcactagcaacctcaaacagacaccatggtgcacacggaatcgagaaagaagtctgccgttactgccctgtggggcaaggtgaacgtggatgaagttggtggtgaggccctgggcaggctgctggtggtctacccttgttcttggcaaacgactcggaccgatg

SEQ ID NO: 14834 - DNA, 203 bp, Artificial sequence
  synthetic
ggcgcgccagtcctgtgtaccatgctgacacaactgtgttcactagcaacctcaaacagacaccatggtgcacgtcaattcctttaagaagtctgccgttactgccctgtggggcaaggtgaacgtggatgaagttggtggtgaggccctgggcaggctgctggtggtctacccttgttcttggcaaacgactcggaccgatg

SEQ ID NO: 14835 - DNA, 203 bp, Artificial sequence
  synthetic
ggcgcgccagtcctgcacgatcgtctgacacaactgtgttcactagcaacctcaaacagacaccatggtgcatcaccggccgtaggagaagtctgccgttactgccctgtggggcaaggtgaacgtggatgaagttggtggtgaggccctgggcaggctgctggtggtctacccttggacccagaggtcgactcggaccgatg

SEQ ID NO: 14836 - DNA, 203 bp, Artificial sequence
  synthetic
ggcgcgccagtcctatcacgatacctgacacaactgtgttcactagcaacctcaaacagacaccatggtgcatcaccggccgtaggagaagtctgccgttactgccctgtggggcaaggtgaacgtggatgaagttggtggtgaggccctgggcaggctgctggtggtctacccttggacctactccccgactcggaccgatg

SEQ ID NO: 14837 - DNA, 203 bp, Artificial sequence
  synthetic
ggcgcgccagtcctgacgtcactactgacacaactgtgttcactagcaacctcaaacagacaccatggtgcatcataactgatttaatgagccattcgcagtttcactgtaccggccgtgcgtactcagacatgcatggcttaatctttgagacaggctgctggtggtctacccttggacccagaggtcgactcggaccgatg

SEQ ID NO: 14838 - DNA, 203 bp, Artificial sequence
  synthetic
ggcgcgccagtcctactctcgtgtctgacacaactgtgttcactagcaacctcaaacagacaccatggtgcatcccggcgggtaggagaagtctgccgttactgccctgtggggcaaggtgaacgtggatgaagttggtggtgaggccctgggcaggctgctggtggtctaccccacggaatcgagaacgactcggaccgatg

SEQ ID NO: 14839 - DNA, 203 bp, Artificial sequence
  synthetic
ggcgcgccagtcctcaactcgtgactgacacaactgtgttcactagcaacctcaaacagacaccatggtgcatcccggcgggtaggagaagtctgccgttactgccctgtggggcaaggtgaacgtggatgaagttggtggtgaggccctgggcaggctgctggtggtctaccccgtcaattcctttacgactcggaccgatg

SEQ ID NO: 14840 - DNA, 203 bp, Artificial sequence
  synthetic
ggcgcgccagtccttgagctcgtgctgacacaactgtgttcactagcaacctcaaacagacaccatggtgcatccgtcaattcctttaaagtctgccgttactgccctgtggggcaaggtgaacgtggatgaagttggtggtgaggccctgggcaggctgctggtggtctacccttggaaccggccgtcgactcggaccgatg

SEQ ID NO: 14841 - DNA, 203 bp, Artificial sequence
  synthetic
ggcgcgccagtcctcacgagctagctgacacaactgtgttcactagcaacctcaaacagacaccatggtgcatccgtcaattcctttaaagtctgccgttactgccctgtggggcaaggtgaacgtggatgaagttggtggtgaggccctgggcaggctgctggtggtctacccttggaccggcgggtcgactcggaccgatg

SEQ ID NO: 14842 - DNA, 203 bp, Artificial sequence
  synthetic
ggcgcgccagtccttaagcacgagctgacacaactgtgttcactagcaacctcaaacagacaccatggtgcatccttccgtcaattcctttaagtttcagctttgcaaccatactccccccggaacccaaagactttggtttcccggaagctgcaggctgctggtggtctacccttggacccagaggtcgactcggaccgatg

SEQ ID NO: 14843 - DNA, 203 bp, Artificial sequence
  synthetic
ggcgcgccagtcctcacgagtttcctgacacaactgtgttcactagcaacctcaaacagacaccatggtgcatccttccgtcaattcctttaagtttcagctttgcaaccatactccccccggaacccaaagactttggtttcccggaagctgccggctgctggtggtctacccttggacccagaggtcgactcggaccgatg

SEQ ID NO: 14844 - DNA, 203 bp, Artificial sequence
  synthetic
ggcgcgccagtccttcacgagtatctgacacaactgtgttcactagcaacctcaaacagacaccatggtgcatctaacctccgactttcgttcttgattaatgaaaacattcttggcaaatgctttcgctctggtccgtcttgcgccggtccacaggctgctggtggtctacccttggacccagaggtcgactcggaccgatg

SEQ ID NO: 14845 - DNA, 203 bp, Artificial sequence
  synthetic
ggcgcgccagtccttctgttgagcctgacacaactgtgttcactagcaacctcaaacagacaccatggtgcatctagccgcaggctccactcctggtggtgcccttccgtcaattcctttaagtttcagctttgcaaccatactccccccggacaggctgctggtggtctacccttggacccagaggtcgactcggaccgatg

SEQ ID NO: 14846 - DNA, 203 bp, Artificial sequence
  synthetic
ggcgcgccagtccttatgcacggtctgacacaactgtgttcactagcaacctcaaacagacaccatggtgcatctccaccaactaagaacggccatgcaccaccacccacggaatcgagaaagagctatcaatctgtcaatcctgtccgtgtccgggctgctggtggtctacccttggacccagaggtcgactcggaccgatg

SEQ ID NO: 14847 - DNA, 203 bp, Artificial sequence
  synthetic
ggcgcgccagtcctaaggctcggtctgacacaactgtgttcactagcaacctcaaacagacaccatggtgcatctgacccaactaagaacggccatgcaccaccacccacggaatcgagaaagagctatcaatctgtcaatcctgtccgtgggcaggctgctggtggtctacccttggacccagaggtcgactcggaccgatg

SEQ ID NO: 14848 - DNA, 203 bp, Artificial sequence
  synthetic
ggcgcgccagtcctacggtctaaactgacacaactgtgttcactagcaacctcaaacagacaccatggtgcatctgaccggcgggtagaagtctgccgttactgccctgtggggcaaggtgaacgtggatgaagttggtggtgaggccctgggcaggctgctggtggtctacccttgttcttggcaaacgactcggaccgatg

SEQ ID NO: 14849 - DNA, 203 bp, Artificial sequence
  synthetic
ggcgcgccagtcctctttagagtactgacacaactgtgttcactagcaacctcaaacagacaccatggtgcatctgacctccgactttcgttcttgattaatgaaaacattcttggcaaatgctttcgctctggtccgtcttgcgccggtcggcaggctgctggtggtctacccttggacccagaggtcgactcggaccgatg

SEQ ID NO: 14850 - DNA, 203 bp, Artificial sequence
  synthetic
ggcgcgccagtcctagtctaaaggctgacacaactgtgttcactagcaacctcaaacagacaccatggtgcatctgacctgatttaatgagccattcgcagtttcactgtaccggccgtgcgtactcagacatgcatggcttaatctttggggcaggctgctggtggtctacccttggacccagaggtcgactcggaccgatg

SEQ ID NO: 14851 - DNA, 203 bp, Artificial sequence
  synthetic
ggcgcgccagtcctataccatgttctgacacaactgtgttcactagcaacctcaaacagacaccatggtgcatctgactaacccaaagactttggtttcccggaagctgcccggcgggtcatgggaataacgccgccgcatcgccggtctgggcaggctgctggtggtctacccttggacccagaggtcgactcggaccgatg

SEQ ID NO: 14852 - DNA, 203 bp, Artificial sequence
  synthetic
ggcgcgccagtccttccagaaacgctgacacaactgtgttcactagcaacctcaaacagacaccatggtgcatctgactaccggccgtaagtctgccgttactgccctgtggggcaaggtgaacgtggatgaagttggtggtgaggccctgggcaggctgctggtggtctacccttggaaccggccgtcgactcggaccgatg

SEQ ID NO: 14853 - DNA, 203 bp, Artificial sequence
  synthetic
ggcgcgccagtcctccagtgcacgctgacacaactgtgttcactagcaacctcaaacagacaccatggtgcatctgactccaccggccgtgtctgccgttactgccctgtggggcaaggtgaacgtggatgaagttggtggtgaggccctgggcaggctgctggtggtctaccccgtcaattcctttacgactcggaccgatg

SEQ ID NO: 14854 - DNA, 203 bp, Artificial sequence
  synthetic
ggcgcgccagtcctctcagagacgctgacacaactgtgttcactagcaacctcaaacagacaccatggtgcatctgactccaccggccgtgtctgccgttactgccctgtggggcaaggtgaacgtggatgaagttggtggtgaggccctgggcaggctgctggtggtctacccttggacctactccccgactcggaccgatg

SEQ ID NO: 14855 - DNA, 203 bp, Artificial sequence
  synthetic
ggcgcgccagtcctcgttagtttactgacacaactgtgttcactagcaacctcaaacagacaccatggtgcatctgactccatttaatgagccattcgcagtttcactgtaccggccgtgcgtactcagacatgcatggcttaatctcctgggcaggctgctggtggtctacccttggacccagaggtcgactcggaccgatg

SEQ ID NO: 14856 - DNA, 203 bp, Artificial sequence
  synthetic
ggcgcgccagtcctcgtcgtctacctgacacaactgtgttcactagcaacctcaaacagacaccatggtgcatctgactcccacggaatcgagaaccgttactgccctgtggggcaaggtgaacgtggatgaagttggtggtgaggccctgggcaggctgctggtggtctacccttggaaccggccgtcgactcggaccgatg

SEQ ID NO: 14857 - DNA, 203 bp, Artificial sequence
  synthetic
ggcgcgccagtcctcgacaagacgctgacacaactgtgttcactagcaacctcaaacagacaccatggtgcatctgactcccacggaatcgagaaccgttactgccctgtggggcaaggtgaacgtggatgaagttggtggtgaggccctgggcaggctgctggtggtctacccttggaccggcgggtcgactcggaccgatg

SEQ ID NO: 14858 - DNA, 203 bp, Artificial sequence
  synthetic
ggcgcgccagtcctacgcctgacgctgacacaactgtgttcactagcaacctcaaacagacaccatggtgcatctgactcccccaaagactttggtttcccggaagctgcccggcgggtcatgggaataacgccgccgcatcgccggcctgggcaggctgctggtggtctacccttggacccagaggtcgactcggaccgatg

SEQ ID NO: 14859 - DNA, 203 bp, Artificial sequence
  synthetic
ggcgcgccagtcctaatcttaacgctgacacaactgtgttcactagcaacctcaaacagacaccatggtgcatctgactcccgactttcgttcttgattaatgaaaacattcttggcaaatgctttcgctctggtccgtcttgcgcccctgggcaggctgctggtggtctacccttggacccagaggtcgactcggaccgatg

SEQ ID NO: 14860 - DNA, 203 bp, Artificial sequence
  synthetic
ggcgcgccagtcctgagctttacgctgacacaactgtgttcactagcaacctcaaacagacaccatggtgcatctgactcctactcccaagtctgccgttactgccctgtggggcaaggtgaacgtggatgaagttggtggtgaggccctgggcaggctgctggtggtctacccttggaccggcgggtcgactcggaccgatg

SEQ ID NO: 14861 - DNA, 203 bp, Artificial sequence
  synthetic
ggcgcgccagtcctcgtgctcacgctgacacaactgtgttcactagcaacctcaaacagacaccatggtgcatctgactcctgaccggcgggttgccgttactgccctgtggggcaaggtgaacgtggatgaagttggtggtgaggccctgggcaggctgctggtggtctacccttgttcttggcaaacgactcggaccgatg

SEQ ID NO: 14862 - DNA, 203 bp, Artificial sequence
  synthetic
ggcgcgccagtcctcgtcagcacgctgacacaactgtgttcactagcaacctcaaacagacaccatggtgcatctgactcctgactccactcctggtggtgcccttccgtcaattcctttaagtttcagctttgcaaccatactggccctgggcaggctgctggtggtctacccttggacccagaggtcgactcggaccgatg

SEQ ID NO: 14863 - DNA, 203 bp, Artificial sequence
  synthetic
ggcgcgccagtcctgaatcagacgctgacacaactgtgttcactagcaacctcaaacagacaccatggtgcatctgactcctgagaatgagccattcgcagtttcactgtaccggccgtgcgtactcagacatgcatggcttaaggccctgggcaggctgctggtggtctacccttggacccagaggtcgactcggaccgatg

SEQ ID NO: 14864 - DNA, 203 bp, Artificial sequence
  synthetic
ggcgcgccagtcctcactctaacgctgacacaactgtgttcactagcaacctcaaacagacaccatggtgcatctgactcctgagagaacggccatgcaccaccacccacggaatcgagaaagagctatcaatctgtcaatccaggccctgggcaggctgctggtggtctacccttggacccagaggtcgactcggaccgatg

SEQ ID NO: 14865 - DNA, 203 bp, Artificial sequence
  synthetic
ggcgcgccagtcctcgtacacattctgacacaactgtgttcactagcaacctcaaacagacaccatggtgcatctgactcctgaggaaacggccatgcaccaccacccacggaatcgagaaagagctatcaatctgtcaattgaggccctgggcaggctgctggtggtctacccttggacccagaggtcgactcggaccgatg

SEQ ID NO: 14866 - DNA, 203 bp, Artificial sequence
  synthetic
ggcgcgccagtcctgttgtgaacgctgacacaactgtgttcactagcaacctcaaacagacaccatggtgcatctgactcctgaggaacggaatcgagaaactgaacggaatcgagaagtgaaacggaatcgagaaggtgaacggaatcgagaaaggcaacggaatcgagaaccttggacccagaggtcgactcggaccgatg

SEQ ID NO: 14867 - DNA, 203 bp, Artificial sequence
  synthetic
ggcgcgccagtcctcgtcttctggctgacacaactgtgttcactagcaacctcaaacagacaccatggtgcatctgactcctgaggaactccctgccgttactgaactcccgggcaaggtgaaactccctgaagttggtgaactccccctgggcaggcaactcccggtctacccttggacccagaggtcgactcggaccgatg

SEQ ID NO: 14868 - DNA, 203 bp, Artificial sequence
  synthetic
ggcgcgccagtcctcgtcaccttcctgacacaactgtgttcactagcaacctcaaacagacaccatggtgcatctgactcctgaggaccgagcgtccgttactgaccgagcgtgcaaggtgaaccgagcgtaagttggtgaccgagcgttgggcaggcaccgagcgttctacccttggacccagaggtcgactcggaccgatg

SEQ ID NO: 14869 - DNA, 203 bp, Artificial sequence
  synthetic
ggcgcgccagtcctggttagtacgctgacacaactgtgttcactagcaacctcaaacagacaccatggtgcatctgactcctgaggaccgatcgtccgttactgaccgatcgtgcaaggtgaaccgatcgtaagttggtgaccgatcgttgggcaggcaccgatcgttctacccttggacccagaggtcgactcggaccgatg

SEQ ID NO: 14870 - DNA, 203 bp, Artificial sequence
  synthetic
ggcgcgccagtcctcgttaactcgctgacacaactgtgttcactagcaacctcaaacagacaccatggtgcatctgactcctgaggaccgcacgtccgttactgaccgcacgtgcaaggtgaaccgcacgtaagttggtgaccgcacgttgggcaggcaccgcacgttctacccttggacccagaggtcgactcggaccgatg

SEQ ID NO: 14871 - DNA, 203 bp, Artificial sequence
  synthetic
ggcgcgccagtccttacccaaacgctgacacaactgtgttcactagcaacctcaaacagacaccatggtgcatctgactcctgaggaccgcccgtccgttactgaccgcccgtgcaaggtgaaccgcccgtaagttggtgaccgcccgttgggcaggcaccgcccgttctacccttggacccagaggtcgactcggaccgatg

SEQ ID NO: 14872 - DNA, 203 bp, Artificial sequence
  synthetic
ggcgcgccagtcctcgtttgaacactgacacaactgtgttcactagcaacctcaaacagacaccatggtgcatctgactcctgaggaccgctcgtccgttactgaccgctcgtgcaaggtgaaccgctcgtaagttggtgaccgctcgttgggcaggcaccgctcgttctacccttggacccagaggtcgactcggaccgatg

SEQ ID NO: 14873 - DNA, 203 bp, Artificial sequence
  synthetic
ggcgcgccagtcctcgtagtcgagctgacacaactgtgttcactagcaacctcaaacagacaccatggtgcatctgactcctgaggaccggacgtccgttactgaccggacgtgcaaggtgaaccggacgtaagttggtgaccggacgttgggcaggcaccggacgttctacccttggacccagaggtcgactcggaccgatg

SEQ ID NO: 14874 - DNA, 203 bp, Artificial sequence
  synthetic
ggcgcgccagtccttggtagaaccctgacacaactgtgttcactagcaacctcaaacagacaccatggtgcatctgactcctgaggaccggccaaccgttactgaccggccaagcaaggtgaaccggccaaaagttggtgaccggccaatgggcaggcaccggccaatctacccttggacccagaggtcgactcggaccgatg

SEQ ID NO: 14875 - DNA, 203 bp, Artificial sequence
  synthetic
ggcgcgccagtcctgaatacagcgctgacacaactgtgttcactagcaacctcaaacagacaccatggtgcatctgactcctgaggaccggccacccgttactgaccggccacgcaaggtgaaccggccacaagttggtgaccggccactgggcaggcaccggccactctacccttggacccagaggtcgactcggaccgatg

SEQ ID NO: 14876 - DNA, 203 bp, Artificial sequence
  synthetic
ggcgcgccagtccttcttacagcgctgacacaactgtgttcactagcaacctcaaacagacaccatggtgcatctgactcctgaggaccggccagccgttactgaccggccaggcaaggtgaaccggccagaagttggtgaccggccagtgggcaggcaccggccagtctacccttggacccagaggtcgactcggaccgatg

SEQ ID NO: 14877 - DNA, 203 bp, Artificial sequence
  synthetic
ggcgcgccagtcctgcaccaagcgctgacacaactgtgttcactagcaacctcaaacagacaccatggtgcatctgactcctgaggaccggccatccgttactgaccggccatgcaaggtgaaccggccataagttggtgaccggccattgggcaggcaccggccattctacccttggacccagaggtcgactcggaccgatg

SEQ ID NO: 14878 - DNA, 203 bp, Artificial sequence
  synthetic
ggcgcgccagtccttgggtctgcgctgacacaactgtgttcactagcaacctcaaacagacaccatggtgcatctgactcctgaggaccggccccccgttactgaccggccccgcaaggtgaaccggccccaagttggtgaccggcccctgggcaggcaccggcccctctacccttggacccagaggtcgactcggaccgatg

SEQ ID NO: 14879 - DNA, 203 bp, Artificial sequence
  synthetic
ggcgcgccagtcctcctacaagcgctgacacaactgtgttcactagcaacctcaaacagacaccatggtgcatctgactcctgaggaccggccctccgttactgaccggccctgcaaggtgaaccggccctaagttggtgaccggcccttgggcaggcaccggcccttctacccttggacccagaggtcgactcggaccgatg

SEQ ID NO: 14880 - DNA, 203 bp, Artificial sequence
  synthetic
ggcgcgccagtcctctgtgaggcgctgacacaactgtgttcactagcaacctcaaacagacaccatggtgcatctgactcctgaggaccggccggccgttactgaccggccgggcaaggtgaaccggccggaagttggtgaccggccggtgggcaggcaccggccggtctacccttggacccagaggtcgactcggaccgatg

SEQ ID NO: 14881 - DNA, 203 bp, Artificial sequence
  synthetic
ggcgcgccagtcctacggtaagcgctgacacaactgtgttcactagcaacctcaaacagacaccatggtgcatctgactcctgaggaccggccgtccgttactgaccggccgtgcaaggtgaaccggccgtaagttggtgaccggccgttgggcaggcaccggccgttctacccttaccggccgtggtcgactcggaccgatg

SEQ ID NO: 14882 - DNA, 203 bp, Artificial sequence
  synthetic
ggcgcgccagtccttaaactagcgctgacacaactgtgttcactagcaacctcaaacagacaccatggtgcatctgactcctgaggaccggccgtccgttactgaccggccgtgcaaggtgaaccggccgtaagttggtggtgaggccctgggcaggcaccggccgttctacccttggacccagaggtcgactcggaccgatg

SEQ ID NO: 14883 - DNA, 203 bp, Artificial sequence
  synthetic
ggcgcgccagtcctactttaggcgctgacacaactgtgttcactagcaacctcaaacagacaccatggtgcatctgactcctgaggaccggccgtccgttactgaccggccgtgcaaggtgaacgtggatgaagttggtgaccggccgttgggcaggcaccggccgttctacccttaccggccgtggtcgactcggaccgatg

SEQ ID NO: 14884 - DNA, 203 bp, Artificial sequence
  synthetic
ggcgcgccagtcctcaacgttgcgctgacacaactgtgttcactagcaacctcaaacagacaccatggtgcatctgactcctgaggaccggccgtccgttactgaccggccgtgcaaggtgaacgtggatgaagttggtggtgaggccctgggcaggcaccggccgttctacccttaccggccgtggtcgactcggaccgatg

SEQ ID NO: 14885 - DNA, 203 bp, Artificial sequence
  synthetic
ggcgcgccagtcctgtatgctgcgctgacacaactgtgttcactagcaacctcaaacagacaccatggtgcatctgactcctgaggaccggccgtccgttactgaccggccgtgcaaggtgaacgtggatgaagttggtggtgaggccctgggcaggctgctggtggtctacccttggacccagaggtcgactcggaccgatg

SEQ ID NO: 14886 - DNA, 203 bp, Artificial sequence
  synthetic
ggcgcgccagtcctgcttgaagcgctgacacaactgtgttcactagcaacctcaaacagacaccatggtgcatctgactcctgaggaccggccgtccgttactgccctgtggggcaaggtgaaccggccgtaagttggtgaccggccgttgggcaggcaccggccgttctacccttaccggccgtggtcgactcggaccgatg

SEQ ID NO: 14887 - DNA, 203 bp, Artificial sequence
  synthetic
ggcgcgccagtccttggtctagcgctgacacaactgtgttcactagcaacctcaaacagacaccatggtgcatctgactcctgaggaccggccgtccgttactgccctgtggggcaaggtgaaccggccgtaagttggtgaccggccgttgggcaggcaccggccgttctacccttggacccagaggtcgactcggaccgatg

SEQ ID NO: 14888 - DNA, 203 bp, Artificial sequence
  synthetic
ggcgcgccagtcctcgcattcaggctgacacaactgtgttcactagcaacctcaaacagacaccatggtgcatctgactcctgaggaccggccgtccgttactgccctgtggggcaaggtgaaccggccgtaagttggtgaccggccgttgggcaggctgctggtggtctacccttaccggccgtggtcgactcggaccgatg

SEQ ID NO: 14889 - DNA, 203 bp, Artificial sequence
  synthetic
ggcgcgccagtcctcgctaggatcctgacacaactgtgttcactagcaacctcaaacagacaccatggtgcatctgactcctgaggaccggccgtccgttactgccctgtggggcaaggtgaacgtggatgaagttggtgaccggccgttgggcaggcaccggccgttctacccttggacccagaggtcgactcggaccgatg

SEQ ID NO: 14890 - DNA, 203 bp, Artificial sequence
  synthetic
ggcgcgccagtcctcgctgagtatctgacacaactgtgttcactagcaacctcaaacagacaccatggtgcatctgactcctgaggaccggccgtccgttactgccctgtggggcaaggtgaacgtggatgaagttggtgaccggccgttgggcaggctgctggtggtctacccttggacccagaggtcgactcggaccgatg

SEQ ID NO: 14891 - DNA, 203 bp, Artificial sequence
  synthetic
ggcgcgccagtcctcgcaaagtaactgacacaactgtgttcactagcaacctcaaacagacaccatggtgcatctgactcctgaggaccggccgtccgttactgccctgtggggcaaggtgaacgtggatgaagttggtggtgaggccctgggcaggcaccggccgttctacccttaccggccgtggtcgactcggaccgatg

SEQ ID NO: 14892 - DNA, 203 bp, Artificial sequence
  synthetic
ggcgcgccagtcctcgcaaagcctctgacacaactgtgttcactagcaacctcaaacagacaccatggtgcatctgactcctgaggaccggccgtccgttactgccctgtggggcaaggtgaacgtggatgaagttggtggtgaggccctgggcaggctgctggtggtctacccttggaccggcgggtcgactcggaccgatg

SEQ ID NO: 14893 - DNA, 203 bp, Artificial sequence
  synthetic
ggcgcgccagtcctcgcttcatttctgacacaactgtgttcactagcaacctcaaacagacaccatggtgcatctgactcctgaggaccggcctcccgttactgaccggcctcgcaaggtgaaccggcctcaagttggtgaccggcctctgggcaggcaccggcctctctacccttggacccagaggtcgactcggaccgatg

SEQ ID NO: 14894 - DNA, 203 bp, Artificial sequence
  synthetic
ggcgcgccagtcctcgctacacagctgacacaactgtgttcactagcaacctcaaacagacaccatggtgcatctgactcctgaggaccggcctgccgttactgaccggcctggcaaggtgaaccggcctgaagttggtgaccggcctgtgggcaggcaccggcctgtctacccttggacccagaggtcgactcggaccgatg

SEQ ID NO: 14895 - DNA, 203 bp, Artificial sequence
  synthetic
ggcgcgccagtcctcgctgaaaggctgacacaactgtgttcactagcaacctcaaacagacaccatggtgcatctgactcctgaggaccggcgatccgttactgaccggcgatgcaaggtgaaccggcgataagttggtgaccggcgattgggcaggcaccggcgattctacccttggacccagaggtcgactcggaccgatg

SEQ ID NO: 14896 - DNA, 203 bp, Artificial sequence
  synthetic
ggcgcgccagtcctcgcctagtccctgacacaactgtgttcactagcaacctcaaacagacaccatggtgcatctgactcctgaggaccggcgctccgttactgaccggcgctgcaaggtgaaccggcgctaagttggtgaccggcgcttgggcaggcaccggcgcttctacccttggacccagaggtcgactcggaccgatg

SEQ ID NO: 14897 - DNA, 203 bp, Artificial sequence
  synthetic
ggcgcgccagtcctcgcagtaagtctgacacaactgtgttcactagcaacctcaaacagacaccatggtgcatctgactcctgaggaccggctatccgttactgaccggctatgcaaggtgaaccggctataagttggtgaccggctattgggcaggcaccggctattctacccttggacccagaggtcgactcggaccgatg

SEQ ID NO: 14898 - DNA, 203 bp, Artificial sequence
  synthetic
ggcgcgccagtcctcgctttgagtctgacacaactgtgttcactagcaacctcaaacagacaccatggtgcatctgactcctgaggaccggctctccgttactgaccggctctgcaaggtgaaccggctctaagttggtgaccggctcttgggcaggcaccggctcttctacccttggacccagaggtcgactcggaccgatg

SEQ ID NO: 14899 - DNA, 203 bp, Artificial sequence
  synthetic
ggcgcgccagtcctcgcactgaatctgacacaactgtgttcactagcaacctcaaacagacaccatggtgcatctgactcctgaggaccggctgtccgttactgaccggctgtgcaaggtgaaccggctgtaagttggtgaccggctgttgggcaggcaccggctgttctacccttggacccagaggtcgactcggaccgatg

SEQ ID NO: 14900 - DNA, 203 bp, Artificial sequence
  synthetic
ggcgcgccagtcctcgctgacaaactgacacaactgtgttcactagcaacctcaaacagacaccatggtgcatctgactcctgaggaccggctttccgttactgaccggctttgcaaggtgaaccggctttaagttggtgaccggcttttgggcaggcaccggcttttctacccttggacccagaggtcgactcggaccgatg

SEQ ID NO: 14901 - DNA, 203 bp, Artificial sequence
  synthetic
ggcgcgccagtcctcgctaccgttctgacacaactgtgttcactagcaacctcaaacagacaccatggtgcatctgactcctgaggaccgtccgtccgttactgaccgtccgtgcaaggtgaaccgtccgtaagttggtgaccgtccgttgggcaggcaccgtccgttctacccttggacccagaggtcgactcggaccgatg

SEQ ID NO: 14902 - DNA, 203 bp, Artificial sequence
  synthetic
ggcgcgccagtcctgttagttcaactgacacaactgtgttcactagcaacctcaaacagacaccatggtgcatctgactcctgaggaccgttcgtccgttactgaccgttcgtgcaaggtgaaccgttcgtaagttggtgaccgttcgttgggcaggcaccgttcgttctacccttggacccagaggtcgactcggaccgatg

SEQ ID NO: 14903 - DNA, 203 bp, Artificial sequence
  synthetic
ggcgcgccagtccttaacgaggcactgacacaactgtgttcactagcaacctcaaacagacaccatggtgcatctgactcctgaggacctccctgccgttactgacctcccgggcaaggtgaacctccctgaagttggtgacctccccctgggcaggcacctcccggtctacccttggacccagaggtcgactcggaccgatg

SEQ ID NO: 14904 - DNA, 203 bp, Artificial sequence
  synthetic
ggcgcgccagtcctagcttcgttactgacacaactgtgttcactagcaacctcaaacagacaccatggtgcatctgactcctgaggaccttggcaaagttactgaccttggcaaaaaggtgaaccttggcaaagttggtgaccttggcaaaggcaggcaccttggcaaatacccttggacccagaggtcgactcggaccgatg

SEQ ID NO: 14905 - DNA, 203 bp, Artificial sequence
  synthetic
ggcgcgccagtccttcgttagttcctgacacaactgtgttcactagcaacctcaaacagacaccatggtgcatctgactcctgaggacggcgggtccgttactgacggcgggtgcaaggtgaacggcgggtaagttggtgacggcgggttgggcaggcacggcgggttctacccttggacccagaggtcgactcggaccgatg

SEQ ID NO: 14906 - DNA, 203 bp, Artificial sequence
  synthetic
ggcgcgccagtcctgtttaacgatctgacacaactgtgttcactagcaacctcaaacagacaccatggtgcatctgactcctgaggacgggccgtccgttactgacgggccgtgcaaggtgaacgggccgtaagttggtgacgggccgttgggcaggcacgggccgttctacccttggacccagaggtcgactcggaccgatg

SEQ ID NO: 14907 - DNA, 203 bp, Artificial sequence
  synthetic
ggcgcgccagtcctcttctcgttactgacacaactgtgttcactagcaacctcaaacagacaccatggtgcatctgactcctgaggactagccgtccgttactgactagccgtgcaaggtgaactagccgtaagttggtgactagccgttgggcaggcactagccgttctacccttggacccagaggtcgactcggaccgatg

SEQ ID NO: 14908 - DNA, 203 bp, Artificial sequence
  synthetic
ggcgcgccagtcctgttcgttacgctgacacaactgtgttcactagcaacctcaaacagacaccatggtgcatctgactcctgaggactcgccgtccgttactgactcgccgtgcaaggtgaactcgccgtaagttggtgactcgccgttgggcaggcactcgccgttctacccttggacccagaggtcgactcggaccgatg

SEQ ID NO: 14909 - DNA, 203 bp, Artificial sequence
  synthetic
ggcgcgccagtccttaacgagtggctgacacaactgtgttcactagcaacctcaaacagacaccatggtgcatctgactcctgaggactttaagtttcagctttgcaaccatactccccccggaacccaaagactttggtttgaggccctgggcaggctgctggtggtctacccttggacccagaggtcgactcggaccgatg

SEQ ID NO: 14910 - DNA, 203 bp, Artificial sequence
  synthetic
ggcgcgccagtcctaaatgcagaactgacacaactgtgttcactagcaacctcaaacagacaccatggtgcatctgactcctgaggagaacgtcaattcctttaccctgtggggcaaggtgaacgtggatgaagttggtggtgaggccctgggcaggctgctggtggtctaccccacggaatcgagaacgactcggaccgatg

SEQ ID NO: 14911 - DNA, 203 bp, Artificial sequence
  synthetic
ggcgcgccagtcctaatgcgtttgctgacacaactgtgttcactagcaacctcaaacagacaccatggtgcatctgactcctgaggagaacgtcaattcctttaccctgtggggcaaggtgaacgtggatgaagttggtggtgaggccctgggcaggctgctggtggtctaccccgtcaattcctttacgactcggaccgatg

SEQ ID NO: 14912 - DNA, 203 bp, Artificial sequence
  synthetic
ggcgcgccagtcctcgacctagtcctgacacaactgtgttcactagcaacctcaaacagacaccatggtgcatctgactcctgaggagaagaccggccgtactgccctgtggggcaaggtgaacgtggatgaagttggtggtgaggccctgggcaggctgctggtggtctacccttgttcttggcaaacgactcggaccgatg

SEQ ID NO: 14913 - DNA, 203 bp, Artificial sequence
  synthetic
ggcgcgccagtcctagacctagcactgacacaactgtgttcactagcaacctcaaacagacaccatggtgcatctgactcctgaggagaagccattcgcagtttcactgtaccggccgtgcgtactcagacatgcatggggtgaggccctgggcaggctgctggtggtctacccttggacccagaggtcgactcggaccgatg

SEQ ID NO: 14914 - DNA, 203 bp, Artificial sequence
  synthetic
ggcgcgccagtccttgattttcagctgacacaactgtgttcactagcaacctcaaacagacaccatggtgcatctgactcctgaggagaagcctggtggtgcccttccgtcaattcctttaagtttcagctttgcaagtggtgaggccctgggcaggctgctggtggtctacccttggacccagaggtcgactcggaccgatg

SEQ ID NO: 14915 - DNA, 203 bp, Artificial sequence
  synthetic
ggcgcgccagtccttatgattttcctgacacaactgtgttcactagcaacctcaaacagacaccatggtgcatctgactcctgaggagaaggccatgcaccaccacccacggaatcgagaaagagctatcaatctgtctggtgaggccctgggcaggctgctggtggtctacccttggacccagaggtcgactcggaccgatg

SEQ ID NO: 14916 - DNA, 203 bp, Artificial sequence
  synthetic
ggcgcgccagtcctcacgttaacactgacacaactgtgttcactagcaacctcaaacagacaccatggtgcatctgactcctgaggagaaggccatgcaccaccacccacggaatcgagaaagagctatcaatctgtgtggtgaggccctgggcaggctgctggtggtctacccttggacccagaggtcgactcggaccgatg

SEQ ID NO: 14917 - DNA, 203 bp, Artificial sequence
  synthetic
ggcgcgccagtcctcacgtttgccctgacacaactgtgttcactagcaacctcaaacagacaccatggtgcatctgactcctgaggagaagtcaccggccgttgccctgtggggcaaggtgaacgtggatgaagttggtggtgaggccctgggcaggctgctggtggtctacccttggaaccggccgtcgactcggaccgatg

SEQ ID NO: 14918 - DNA, 203 bp, Artificial sequence
  synthetic
ggcgcgccagtcctacaaatgccactgacacaactgtgttcactagcaacctcaaacagacaccatggtgcatctgactcctgaggagaagtcattcgcagtttcactgtaccggccgtgcgtactcagacatgcaggtggtgaggccctgggcaggctgctggtggtctacccttggacccagaggtcgactcggaccgatg

SEQ ID NO: 14919 - DNA, 203 bp, Artificial sequence
  synthetic
ggcgcgccagtcctaacatgcaagctgacacaactgtgttcactagcaacctcaaacagacaccatggtgcatctgactcctgaggagaagtccacggaatcgagaatgtggggcaaggtgaacgtggatgaagttggtggtgaggccctgggcaggctgctggtggtctacccttgttcttggcaaacgactcggaccgatg

SEQ ID NO: 14920 - DNA, 203 bp, Artificial sequence
  synthetic
ggcgcgccagtcctcgacatgcagctgacacaactgtgttcactagcaacctcaaacagacaccatggtgcatctgactcctgaggagaagtccatgcaccaccacccacggaatcgagaaagagctatcaatctgggtggtgaggccctgggcaggctgctggtggtctacccttggacccagaggtcgactcggaccgatg

SEQ ID NO: 14921 - DNA, 203 bp, Artificial sequence
  synthetic
ggcgcgccagtcctaacaccacgtctgacacaactgtgttcactagcaacctcaaacagacaccatggtgcatctgactcctgaggagaagtccgtcaattcctttatgtggggcaaggtgaacgtggatgaagttggtggtgaggccctgggcaggctgctggtggtctacccttgttcttggcaaacgactcggaccgatg

SEQ ID NO: 14922 - DNA, 203 bp, Artificial sequence
  synthetic
ggcgcgccagtcctttgcacgttcctgacacaactgtgttcactagcaacctcaaacagacaccatggtgcatctgactcctgaggagaagtctactcccactgccctgtggggcaaggtgaacgtggatgaagttggtggtgaggccctgggcaggctgctggtggtctacccttgttcttggcaaacgactcggaccgatg

SEQ ID NO: 14923 - DNA, 203 bp, Artificial sequence
  synthetic
ggcgcgccagtcctaacgtgcattctgacacaactgtgttcactagcaacctcaaacagacaccatggtgcatctgactcctgaggagaagtctgaccggccgtccctgtggggcaaggtgaacgtggatgaagttggtggtgaggccctgggcaggctgctggtggtctaccccacggaatcgagaacgactcggaccgatg

SEQ ID NO: 14924 - DNA, 203 bp, Artificial sequence
  synthetic
ggcgcgccagtccttgtctaacgcctgacacaactgtgttcactagcaacctcaaacagacaccatggtgcatctgactcctgaggagaagtctgcattaatgaaaacattcttggcaaatgctttcgctctagttggtggtgaggccctgggcaggctgctggtggtctacccttggacccagaggtcgactcggaccgatg

SEQ ID NO: 14925 - DNA, 203 bp, Artificial sequence
  synthetic
ggcgcgccagtcctacggttaaacctgacacaactgtgttcactagcaacctcaaacagacaccatggtgcatctgactcctgaggagaagtctgcccgtcaattcctttagggcaaggtgaacgtggatgaagttggtggtgaggccctgggcaggctgctggtggtctaccccacggaatcgagaacgactcggaccgatg

SEQ ID NO: 14926 - DNA, 203 bp, Artificial sequence
  synthetic
ggcgcgccagtcctcaggctttagctgacacaactgtgttcactagcaacctcaaacagacaccatggtgcatctgactcctgaggagaagtctgcccgtcaattcctttagggcaaggtgaacgtggatgaagttggtggtgaggccctgggcaggctgctggtggtctaccccgtcaattcctttacgactcggaccgatg

SEQ ID NO: 14927 - DNA, 203 bp, Artificial sequence
  synthetic
ggcgcgccagtcctacgtaaagccctgacacaactgtgttcactagcaacctcaaacagacaccatggtgcatctgactcctgaggagaagtctgcccgtcaattcctttagggcaaggtgaacgtggatgaagttggtggtgaggccctgggcaggctgctggtggtctacccttggacccagaggtcgactcggaccgatg

SEQ ID NO: 14928 - DNA, 203 bp, Artificial sequence
  synthetic
ggcgcgccagtcctaacgcagctgctgacacaactgtgttcactagcaacctcaaacagacaccatggtgcatctgactcctgaggagaagtctgcccgtcaattcctttagggcaaggtgaacgtggatgaagttggtggtgaggccctgggcaggctgctggtggtctacccttggacctactccccgactcggaccgatg

SEQ ID NO: 14929 - DNA, 203 bp, Artificial sequence
  synthetic
ggcgcgccagtcctcgtcctgcgtctgacacaactgtgttcactagcaacctcaaacagacaccatggtgcatctgactcctgaggagaagtctgccgaccaccacccacggaatcgagaaagagctatcgaagttggtggtgaggccctgggcaggctgctggtggtctacccttggacccagaggtcgactcggaccgatg

SEQ ID NO: 14930 - DNA, 203 bp, Artificial sequence
  synthetic
ggcgcgccagtccttgacatactcctgacacaactgtgttcactagcaacctcaaacagacaccatggtgcatctgactcctgaggagaagtctgccgagctttgcaaccatactccccccggaacccaagaagttggtggtgaggccctgggcaggctgctggtggtctacccttggacccagaggtcgactcggaccgatg

SEQ ID NO: 14931 - DNA, 203 bp, Artificial sequence
  synthetic
ggcgcgccagtccttagaggctagctgacacaactgtgttcactagcaacctcaaacagacaccatggtgcatctgactcctgaggagaagtctgccgcccggaagctgcccggcgggtcatgggaataagaagttggtggtgaggccctgggcaggctgctggtggtctacccttggacccagaggtcgactcggaccgatg

SEQ ID NO: 14932 - DNA, 203 bp, Artificial sequence
  synthetic
ggcgcgccagtcctgaccagtacactgacacaactgtgttcactagcaacctcaaacagacaccatggtgcatctgactcctgaggagaagtctgccgccggcgggttgtggggcaaggtgaacgtggatgaagttggtggtgaggccctgggcaggctgctggtggtctacccttgttcttggcaaacgactcggaccgatg

SEQ ID NO: 14933 - DNA, 203 bp, Artificial sequence
  synthetic
ggcgcgccagtcctattttgcagcctgacacaactgtgttcactagcaacctcaaacagacaccatggtgcatctgactcctgaggagaagtctgccggtgcccttccgtcaattcctttaagtttcagctaagttggtggtgaggccctgggcaggctgctggtggtctacccttggacccagaggtcgactcggaccgatg

SEQ ID NO: 14934 - DNA, 203 bp, Artificial sequence
  synthetic
ggcgcgccagtcctttaagcgtatctgacacaactgtgttcactagcaacctcaaacagacaccatggtgcatctgactcctgaggagaagtctgccgtagtttcactgtaccggccgtgcgtactcagtgaagttggtggtgaggccctgggcaggctgctggtggtctacccttggacccagaggtcgactcggaccgatg

SEQ ID NO: 14935 - DNA, 203 bp, Artificial sequence
  synthetic
ggcgcgccagtcctgcctgtgacactgacacaactgtgttcactagcaacctcaaacagacaccatggtgcatctgactcctgaggagaagtctgccgttacaccggccgtgggcaaggtgaacgtggatgaagttggtggtgaggccctgggcaggctgctggtggtctacccttggacctactccccgactcggaccgatg

SEQ ID NO: 14936 - DNA, 203 bp, Artificial sequence
  synthetic
ggcgcgccagtcctaatgtcacatctgacacaactgtgttcactagcaacctcaaacagacaccatggtgcatctgactcctgaggagaagtctgccgttacccggcgggtgggcaaggtgaacgtggatgaagttggtggtgaggccctgggcaggctgctggtggtctaccccacggaatcgagaacgactcggaccgatg

SEQ ID NO: 14937 - DNA, 203 bp, Artificial sequence
  synthetic
ggcgcgccagtcctcacacaggtcctgacacaactgtgttcactagcaacctcaaacagacaccatggtgcatctgactcctgaggagaagtctgccgttacccggcgggtgggcaaggtgaacgtggatgaagttggtggtgaggccctgggcaggctgctggtggtctacccttggacctactccccgactcggaccgatg

SEQ ID NO: 14938 - DNA, 203 bp, Artificial sequence
  synthetic
ggcgcgccagtcctccacacagctctgacacaactgtgttcactagcaacctcaaacagacaccatggtgcatctgactcctgaggagaagtctgccgttacccttccgtcaattcctttaagtttcgatgaagttggtggtgaggccctgggcaggctgctggtggtctacccttggacccagaggtcgactcggaccgatg

SEQ ID NO: 14939 - DNA, 203 bp, Artificial sequence
  synthetic
ggcgcgccagtcctaccttgtgtgctgacacaactgtgttcactagcaacctcaaacagacaccatggtgcatctgactcctgaggagaagtctgccgttaccggccgttggggcaaggtgaacgtggatgaagttggtggtgaggccctgggcaggctgctggtggtctacccttggaaccggccgtcgactcggaccgatg

SEQ ID NO: 14940 - DNA, 203 bp, Artificial sequence
  synthetic
ggcgcgccagtcctactgtgtgacctgacacaactgtgttcactagcaacctcaaacagacaccatggtgcatctgactcctgaggagaagtctgccgttaccgtcaattcctttaaggtgaacgtggatgaagttggtggtgaggccctgggcaggctgctggtggtctacccttggaaccggccgtcgactcggaccgatg

SEQ ID NO: 14941 - DNA, 203 bp, Artificial sequence
  synthetic
ggcgcgccagtccttatgtgtgatctgacacaactgtgttcactagcaacctcaaacagacaccatggtgcatctgactcctgaggagaagtctgccgttaccgtcaattcctttaaggtgaacgtggatgaagttggtggtgaggccctgggcaggctgctggtggtctacccttggaccggcgggtcgactcggaccgatg

SEQ ID NO: 14942 - DNA, 203 bp, Artificial sequence
  synthetic
ggcgcgccagtcctcagacgtacactgacacaactgtgttcactagcaacctcaaacagacaccatggtgcatctgactcctgaggagaagtctgccgttactactccctggggcaaggtgaacgtggatgaagttggtggtgaggccctgggcaggctgctggtggtctacccttggaaccggccgtcgactcggaccgatg

SEQ ID NO: 14943 - DNA, 203 bp, Artificial sequence
  synthetic
ggcgcgccagtcctagtagacgtactgacacaactgtgttcactagcaacctcaaacagacaccatggtgcatctgactcctgaggagaagtctgccgttactcacccacggaatcgagaaagagtggatgaagttggtggtgaggccctgggcaggctgctggtggtctacccttggacccagaggtcgactcggaccgatg

SEQ ID NO: 14944 - DNA, 203 bp, Artificial sequence
  synthetic
ggcgcgccagtcctacgtctacgtctgacacaactgtgttcactagcaacctcaaacagacaccatggtgcatctgactcctgaggagaagtctgccgttactcttccgtcaattcctttaagtttggatgaagttggtggtgaggccctgggcaggctgctggtggtctacccttggacccagaggtcgactcggaccgatg

SEQ ID NO: 14945 - DNA, 203 bp, Artificial sequence
  synthetic
ggcgcgccagtcctcgctacgtctctgacacaactgtgttcactagcaacctcaaacagacaccatggtgcatctgactcctgaggagaagtctgccgttactgaccggccgtgcaaggtgaaccggccgtaagttggtgaccggccgttgggcaggcaccggccgttctacccttaccggccgtggtcgactcggaccgatg

SEQ ID NO: 14946 - DNA, 203 bp, Artificial sequence
  synthetic
ggcgcgccagtccttcacagacgtctgacacaactgtgttcactagcaacctcaaacagacaccatggtgcatctgactcctgaggagaagtctgccgttactgaccggccgtgcaaggtgaaccggccgtaagttggtgaccggccgttgggcaggcaccggccgttctacccttggacccagaggtcgactcggaccgatg

SEQ ID NO: 14947 - DNA, 203 bp, Artificial sequence
  synthetic
ggcgcgccagtcctctaagacgtactgacacaactgtgttcactagcaacctcaaacagacaccatggtgcatctgactcctgaggagaagtctgccgttactgaccggccgtgcaaggtgaaccggccgtaagttggtgaccggccgttgggcaggctgctggtggtctacccttaccggccgtggtcgactcggaccgatg

SEQ ID NO: 14948 - DNA, 203 bp, Artificial sequence
  synthetic
ggcgcgccagtcctagacgttgttctgacacaactgtgttcactagcaacctcaaacagacaccatggtgcatctgactcctgaggagaagtctgccgttactgaccggccgtgcaaggtgaaccggccgtaagttggtgaccggccgttgggcaggctgctggtggtctacccttggacccagaggtcgactcggaccgatg

SEQ ID NO: 14949 - DNA, 203 bp, Artificial sequence
  synthetic
ggcgcgccagtcctaagagacgttctgacacaactgtgttcactagcaacctcaaacagacaccatggtgcatctgactcctgaggagaagtctgccgttactgaccggccgtgcaaggtgaaccggccgtaagttggtggtgaggccctgggcaggcaccggccgttctacccttaccggccgtggtcgactcggaccgatg

SEQ ID NO: 14950 - DNA, 203 bp, Artificial sequence
  synthetic
ggcgcgccagtccttgaacgtcttctgacacaactgtgttcactagcaacctcaaacagacaccatggtgcatctgactcctgaggagaagtctgccgttactgaccggccgtgcaaggtgaaccggccgtaagttggtggtgaggccctgggcaggcaccggccgttctacccttggacccagaggtcgactcggaccgatg

SEQ ID NO: 14951 - DNA, 203 bp, Artificial sequence
  synthetic
ggcgcgccagtcctaacgtctggactgacacaactgtgttcactagcaacctcaaacagacaccatggtgcatctgactcctgaggagaagtctgccgttactgaccggccgtgcaaggtgaaccggccgtaagttggtggtgaggccctgggcaggctgctggtggtctacccttggacccagaggtcgactcggaccgatg

SEQ ID NO: 14952 - DNA, 203 bp, Artificial sequence
  synthetic
ggcgcgccagtcctgacacagtccctgacacaactgtgttcactagcaacctcaaacagacaccatggtgcatctgactcctgaggagaagtctgccgttactgaccggccgtgcaaggtgaacgtggatgaagttggtgaccggccgttgggcaggcaccggccgttctacccttaccggccgtggtcgactcggaccgatg

SEQ ID NO: 14953 - DNA, 203 bp, Artificial sequence
  synthetic
ggcgcgccagtcctagttttgaaactgacacaactgtgttcactagcaacctcaaacagacaccatggtgcatctgactcctgaggagaagtctgccgttactgaccggccgtgcaaggtgaacgtggatgaagttggtgaccggccgttgggcaggcaccggccgttctacccttggacccagaggtcgactcggaccgatg

SEQ ID NO: 14954 - DNA, 203 bp, Artificial sequence
  synthetic
ggcgcgccagtcctttgaagcgacctgacacaactgtgttcactagcaacctcaaacagacaccatggtgcatctgactcctgaggagaagtctgccgttactgaccggccgtgcaaggtgaacgtggatgaagttggtggtgaggccctgggcaggcaccggccgttctacccttggacccagaggtcgactcggaccgatg

SEQ ID NO: 14955 - DNA, 203 bp, Artificial sequence
  synthetic
ggcgcgccagtcctactgtcgccactgacacaactgtgttcactagcaacctcaaacagacaccatggtgcatctgactcctgaggagaagtctgccgttactgacggccggtgcaaggtgaacggccggtaagttggtgacggccggttgggcaggcacggccggttctacccttggacccagaggtcgactcggaccgatg

SEQ ID NO: 14956 - DNA, 203 bp, Artificial sequence
  synthetic
ggcgcgccagtcctgcgacttggtctgacacaactgtgttcactagcaacctcaaacagacaccatggtgcatctgactcctgaggagaagtctgccgttactgcacggaatcgagaagtgaacgtggatgaagttggtgcacggaatcgagaaaggccacggaatcgagaaccttggacccagaggtcgactcggaccgatg

SEQ ID NO: 14957 - DNA, 203 bp, Artificial sequence
  synthetic
ggcgcgccagtcctagagtcgcctctgacacaactgtgttcactagcaacctcaaacagacaccatggtgcatctgactcctgaggagaagtctgccgttactgcacggaatcgagaagtgaacgtggatgaagttggtgcacggaatcgagaaaggctgctggtggtctacccttggacccagaggtcgactcggaccgatg

SEQ ID NO: 14958 - DNA, 203 bp, Artificial sequence
  synthetic
ggcgcgccagtccttaagtcgctactgacacaactgtgttcactagcaacctcaaacagacaccatggtgcatctgactcctgaggagaagtctgccgttactgcacggaatcgagaagtgacacggaatcgagaaggtgcacggaatcgagaaaggccacggaatcgagaaccttggacccagaggtcgactcggaccgatg

SEQ ID NO: 14959 - DNA, 203 bp, Artificial sequence
  synthetic
ggcgcgccagtcctaaggcgactactgacacaactgtgttcactagcaacctcaaacagacaccatggtgcatctgactcctgaggagaagtctgccgttactgcacggaatcgagaagtgacacggaatcgagaaggtggtgaggccctgggcaggctgctggtggtctacccttggacccagaggtcgactcggaccgatg

SEQ ID NO: 14960 - DNA, 203 bp, Artificial sequence
  synthetic
ggcgcgccagtcctatgaagtcgcctgacacaactgtgttcactagcaacctcaaacagacaccatggtgcatctgactcctgaggagaagtctgccgttactgcactgtaccggccgtgcgtcgtggatgaagttggtggtgaggccctgggcaggctgctggtggtctacccttggacccagaggtcgactcggaccgatg

SEQ ID NO: 14961 - DNA, 203 bp, Artificial sequence
  synthetic
ggcgcgccagtcctcgagcgacagctgacacaactgtgttcactagcaacctcaaacagacaccatggtgcatctgactcctgaggagaagtctgccgttactgccccacggaatcgagaaaacgtggatgaagttggtggtgaggccctgggcaggctgctggtggtctacccttgttcttggcaaacgactcggaccgatg

SEQ ID NO: 14962 - DNA, 203 bp, Artificial sequence
  synthetic
ggcgcgccagtccttgaatgtcgcctgacacaactgtgttcactagcaacctcaaacagacaccatggtgcatctgactcctgaggagaagtctgccgttactgccccattcttggcaaataacgtggatgaagttggtggtgaggccctgggcaggctgctggtggtctacccttggacccagaggtcgactcggaccgatg

SEQ ID NO: 14963 - DNA, 203 bp, Artificial sequence
  synthetic
ggcgcgccagtcctggcgaccatactgacacaactgtgttcactagcaacctcaaacagacaccatggtgcatctgactcctgaggagaagtctgccgttactgccccgtcaattcctttaaacgtggatgaagttggtggtgaggccctgggcaggctgctggtggtctacccttgttcttggcaaacgactcggaccgatg

SEQ ID NO: 14964 - DNA, 203 bp, Artificial sequence
  synthetic
ggcgcgccagtcctgtgtcgctcactgacacaactgtgttcactagcaacctcaaacagacaccatggtgcatctgactcctgaggagaagtctgccgttactgccctgaccggccgtgtgaacgtggatgaagttggtggtgaggccctgggcaggctgctggtggtctaccccacggaatcgagaacgactcggaccgatg

SEQ ID NO: 14965 - DNA, 203 bp, Artificial sequence
  synthetic
ggcgcgccagtcctaggcgaccacctgacacaactgtgttcactagcaacctcaaacagacaccatggtgcatctgactcctgaggagaagtctgccgttactgccctgaccggccgtgtgaacgtggatgaagttggtggtgaggccctgggcaggctgctggtggtctaccccgtcaattcctttacgactcggaccgatg

SEQ ID NO: 14966 - DNA, 203 bp, Artificial sequence
  synthetic
ggcgcgccagtcctatcgaccaccctgacacaactgtgttcactagcaacctcaaacagacaccatggtgcatctgactcctgaggagaagtctgccgttactgccctgcatactcccctgaacgtggatgaagttggtggtgaggccctgggcaggctgctggtggtctacccttggacccagaggtcgactcggaccgatg

SEQ ID NO: 14967 - DNA, 203 bp, Artificial sequence
  synthetic
ggcgcgccagtcctaagtggtcgactgacacaactgtgttcactagcaacctcaaacagacaccatggtgcatctgactcctgaggagaagtctgccgttactgccctgcccggcgggtcatacgtggatgaagttggtggtgaggccctgggcaggctgctggtggtctacccttggacccagaggtcgactcggaccgatg

SEQ ID NO: 14968 - DNA, 203 bp, Artificial sequence
  synthetic
ggcgcgccagtcctggtcgactaactgacacaactgtgttcactagcaacctcaaacagacaccatggtgcatctgactcctgaggagaagtctgccgttactgccctgcccggcgggtcgaacgtggatgaagttggtggtgaggccctgggcaggctgctggtggtctacccttggacccagaggtcgactcggaccgatg

SEQ ID NO: 14969 - DNA, 203 bp, Artificial sequence
  synthetic
ggcgcgccagtcctctggtcgatcctgacacaactgtgttcactagcaacctcaaacagacaccatggtgcatctgactcctgaggagaagtctgccgttactgccctgcccggcgggttgaacgtggatgaagttggtggtgaggccctgggcaggctgctggtggtctacccttggacccagaggtcgactcggaccgatg

SEQ ID NO: 14970 - DNA, 203 bp, Artificial sequence
  synthetic
ggcgcgccagtccttcacctagagctgacacaactgtgttcactagcaacctcaaacagacaccatggtgcatctgactcctgaggagaagtctgccgttactgccctgcggaatcgagtgaacgtggatgaagttggtggtgaggccctgggcaggctgctggtggtctacccttggacccagaggtcgactcggaccgatg

SEQ ID NO: 14971 - DNA, 203 bp, Artificial sequence
  synthetic
ggcgcgccagtcctaactagaaaactgacacaactgtgttcactagcaacctcaaacagacaccatggtgcatctgactcctgaggagaagtctgccgttactgccctgcgtcaattcctttacgtggatgaagttggtggtgaggccctgggcaggctgctggtggtctacccttggaccggcgggtcgactcggaccgatg

SEQ ID NO: 14972 - DNA, 203 bp, Artificial sequence
  synthetic
ggcgcgccagtcctgtactagaatctgacacaactgtgttcactagcaacctcaaacagacaccatggtgcatctgactcctgaggagaagtctgccgttactgccctgtaccggccgtgcgacgtggatgaagttggtggtgaggccctgggcaggctgctggtggtctacccttggacccagaggtcgactcggaccgatg

SEQ ID NO: 14973 - DNA, 203 bp, Artificial sequence
  synthetic
ggcgcgccagtcctagcgactagactgacacaactgtgttcactagcaacctcaaacagacaccatggtgcatctgactcctgaggagaagtctgccgttactgccctgtactcccaggtgaacgtggatgaagttggtggtgaggccctgggcaggctgctggtggtctacccttggaaccggccgtcgactcggaccgatg

SEQ ID NO: 14974 - DNA, 203 bp, Artificial sequence
  synthetic
ggcgcgccagtccttacttctagtctgacacaactgtgttcactagcaacctcaaacagacaccatggtgcatctgactcctgaggagaagtctgccgttactgccctgtgcgtcaattcctttatggatgaagttggtggtgaggccctgggcaggctgctggtggtctaccccgtcaattcctttacgactcggaccgatg

SEQ ID NO: 14975 - DNA, 203 bp, Artificial sequence
  synthetic
ggcgcgccagtccttactctaggcctgacacaactgtgttcactagcaacctcaaacagacaccatggtgcatctgactcctgaggagaagtctgccgttactgccctgtgcgtcaattcctttatggatgaagttggtggtgaggccctgggcaggctgctggtggtctacccttggacccagaggtcgactcggaccgatg

SEQ ID NO: 14976 - DNA, 203 bp, Artificial sequence
  synthetic
ggcgcgccagtccttctagttacgctgacacaactgtgttcactagcaacctcaaacagacaccatggtgcatctgactcctgaggagaagtctgccgttactgccctgtgcttggcggtgaacgtggatgaagttggtggtgaggccctgggcaggctgctggtggtctacccttggacccagaggtcgactcggaccgatg

SEQ ID NO: 14977 - DNA, 203 bp, Artificial sequence
  synthetic
ggcgcgccagtccttctaggtcaactgacacaactgtgttcactagcaacctcaaacagacaccatggtgcatctgactcctgaggagaagtctgccgttactgccctgtggaccggccgtaacgtggatgaagttggtggtgaggccctgggcaggctgctggtggtctacccttgttcttggcaaacgactcggaccgatg

SEQ ID NO: 14978 - DNA, 203 bp, Artificial sequence
  synthetic
ggcgcgccagtccttcaggtgagtctgacacaactgtgttcactagcaacctcaaacagacaccatggtgcatctgactcctgaggagaagtctgccgttactgccctgtggggaccggccgtcgtggatgaagttggtggtgaggccctgggcaggctgctggtggtctacccttggaccggcgggtcgactcggaccgatg

SEQ ID NO: 14979 - DNA, 203 bp, Artificial sequence
  synthetic
ggcgcgccagtcctatcaggtctactgacacaactgtgttcactagcaacctcaaacagacaccatggtgcatctgactcctgaggagaagtctgccgttactgccctgtggggcaaccggccgttggatgaagttggtggtgaggccctgggcaggctgctggtggtctaccccgtcaattcctttacgactcggaccgatg

SEQ ID NO: 14980 - DNA, 203 bp, Artificial sequence
  synthetic
ggcgcgccagtcctaaacctgatcctgacacaactgtgttcactagcaacctcaaacagacaccatggtgcatctgactcctgaggagaagtctgccgttactgccctgtggggcaaccggccgttggatgaagttggtggtgaggccctgggcaggctgctggtggtctacccttggacccagaggtcgactcggaccgatg

SEQ ID NO: 14981 - DNA, 203 bp, Artificial sequence
  synthetic
ggcgcgccagtcctacctgaagaactgacacaactgtgttcactagcaacctcaaacagacaccatggtgcatctgactcctgaggagaagtctgccgttactgccctgtggggcaaccggccgttggatgaagttggtggtgaggccctgggcaggctgctggtggtctacccttggacctactccccgactcggaccgatg

SEQ ID NO: 14982 - DNA, 203 bp, Artificial sequence
  synthetic
ggcgcgccagtcctggtagaacgtctgacacaactgtgttcactagcaacctcaaacagacaccatggtgcatctgactcctgaggagaagtctgccgttactgccctgtggggcaaggaccggccgtatgaagttggtggtgaggccctgggcaggctgctggtggtctacccttgttcttggcaaacgactcggaccgatg

SEQ ID NO: 14983 - DNA, 203 bp, Artificial sequence
  synthetic
ggcgcgccagtcctcgttctagcactgacacaactgtgttcactagcaacctcaaacagacaccatggtgcatctgactcctgaggagaagtctgccgttactgccctgtggggcaaggccggcgggtatgaagttggtggtgaggccctgggcaggctgctggtggtctacccttgttcttggcaaacgactcggaccgatg

SEQ ID NO: 14984 - DNA, 203 bp, Artificial sequence
  synthetic
ggcgcgccagtccttaaagcgttcctgacacaactgtgttcactagcaacctcaaacagacaccatggtgcatctgactcctgaggagaagtctgccgttactgccctgtggggcaaggtgaaaccggccgtagttggtggtgaggccctgggcaggctgctggtggtctaccccacggaatcgagaacgactcggaccgatg

SEQ ID NO: 14985 - DNA, 203 bp, Artificial sequence
  synthetic
ggcgcgccagtcctactgcagaacctgacacaactgtgttcactagcaacctcaaacagacaccatggtgcatctgactcctgaggagaagtctgccgttactgccctgtggggcaaggtgaacacggaatcgagaagtggtgaggccctgggcaggctgctggtggtctacccttggaaccggccgtcgactcggaccgatg

SEQ ID NO: 14986 - DNA, 203 bp, Artificial sequence
  synthetic
ggcgcgccagtcctcccgaccgtgctgacacaactgtgttcactagcaacctcaaacagacaccatggtgcatctgactcctgaggagaagtctgccgttactgccctgtggggcaaggtgaaccggccgtaagttggtgaccggccgttgggcaggctgctggtggtctacccttaccggccgtggtcgactcggaccgatg

SEQ ID NO: 14987 - DNA, 203 bp, Artificial sequence
  synthetic
ggcgcgccagtccttcgtctcgggctgacacaactgtgttcactagcaacctcaaacagacaccatggtgcatctgactcctgaggagaagtctgccgttactgccctgtggggcaaggtgaaccggccgtaagttggtgaccggccgttgggcaggctgctggtggtctacccttggacccagaggtcgactcggaccgatg

SEQ ID NO: 14988 - DNA, 203 bp, Artificial sequence
  synthetic
ggcgcgccagtcctcccgaggtgactgacacaactgtgttcactagcaacctcaaacagacaccatggtgcatctgactcctgaggagaagtctgccgttactgccctgtggggcaaggtgaaccggccgtaagttggtggtgaggccctgggcaggcaccggccgttctacccttggacccagaggtcgactcggaccgatg

SEQ ID NO: 14989 - DNA, 203 bp, Artificial sequence
  synthetic
ggcgcgccagtcctcccgattcgtctgacacaactgtgttcactagcaacctcaaacagacaccatggtgcatctgactcctgaggagaagtctgccgttactgccctgtggggcaaggtgaaccggccgtaagttggtggtgaggccctgggcaggctgctggtggtctacccttaccggccgtggtcgactcggaccgatg

SEQ ID NO: 14990 - DNA, 203 bp, Artificial sequence
  synthetic
ggcgcgccagtccttagtcatttcctgacacaactgtgttcactagcaacctcaaacagacaccatggtgcatctgactcctgaggagaagtctgccgttactgccctgtggggcaaggtgaaccggcgggtagttggtggtgaggccctgggcaggctgctggtggtctacccttggacccagaggtcgactcggaccgatg

SEQ ID NO: 14991 - DNA, 203 bp, Artificial sequence
  synthetic
ggcgcgccagtcctaatgttgactctgacacaactgtgttcactagcaacctcaaacagacaccatggtgcatctgactcctgaggagaagtctgccgttactgccctgtggggcaaggtgaaccggcgggtagttggtggtgaggccctgggcaggctgctggtggtctacccttggacctactccccgactcggaccgatg

SEQ ID NO: 14992 - DNA, 203 bp, Artificial sequence
  synthetic
ggcgcgccagtcctgtgagttaagctgacacaactgtgttcactagcaacctcaaacagacaccatggtgcatctgactcctgaggagaagtctgccgttactgccctgtggggcaaggtgaacgcacggaatcgagaaggtgaggccctgggcaggctgctggtggtctacccttggacctactccccgactcggaccgatg

SEQ ID NO: 14993 - DNA, 203 bp, Artificial sequence
  synthetic
ggcgcgccagtcctctctgtcacgctgacacaactgtgttcactagcaacctcaaacagacaccatggtgcatctgactcctgaggagaagtctgccgttactgccctgtggggcaaggtgaacgcgtcaattcctttaggtgaggccctgggcaggctgctggtggtctaccccacggaatcgagaacgactcggaccgatg

SEQ ID NO: 14994 - DNA, 203 bp, Artificial sequence
  synthetic
ggcgcgccagtcctagagtgacccctgacacaactgtgttcactagcaacctcaaacagacaccatggtgcatctgactcctgaggagaagtctgccgttactgccctgtggggcaaggtgaacgtaccggccgttggtggtgaggccctgggcaggctgctggtggtctacccttgttcttggcaaacgactcggaccgatg

SEQ ID NO: 14995 - DNA, 203 bp, Artificial sequence
  synthetic
ggcgcgccagtcctgcctagacccctgacacaactgtgttcactagcaacctcaaacagacaccatggtgcatctgactcctgaggagaagtctgccgttactgccctgtggggcaaggtgaacgtactcccagttggtggtgaggccctgggcaggctgctggtggtctacccttggacccagaggtcgactcggaccgatg

SEQ ID NO: 14996 - DNA, 203 bp, Artificial sequence
  synthetic
ggcgcgccagtcctggcaggacccctgacacaactgtgttcactagcaacctcaaacagacaccatggtgcatctgactcctgaggagaagtctgccgttactgccctgtggggcaaggtgaacgtggaccggccgtgtggtgaggccctgggcaggctgctggtggtctacccttggaccggcgggtcgactcggaccgatg

SEQ ID NO: 14997 - DNA, 203 bp, Artificial sequence
  synthetic
ggcgcgccagtcctgggtccactactgacacaactgtgttcactagcaacctcaaacagacaccatggtgcatctgactcctgaggagaagtctgccgttactgccctgtggggcaaggtgaacgtggataccggccgtggtgaggccctgggcaggctgctggtggtctacccttggacctactccccgactcggaccgatg

SEQ ID NO: 14998 - DNA, 203 bp, Artificial sequence
  synthetic
ggcgcgccagtcctgggtctcgttctgacacaactgtgttcactagcaacctcaaacagacaccatggtgcatctgactcctgaggagaagtctgccgttactgccctgtggggcaaggtgaacgtggatccggcgggtggtgaggccctgggcaggctgctggtggtctaccccgtcaattcctttacgactcggaccgatg

SEQ ID NO: 14999 - DNA, 203 bp, Artificial sequence
  synthetic
ggcgcgccagtcctttgacttgcgctgacacaactgtgttcactagcaacctcaaacagacaccatggtgcatctgactcctgaggagaagtctgccgttactgccctgtggggcaaggtgaacgtggatgaagtccggcgggtggccctgggcaggctgctggtggtctacccttggaccggcgggtcgactcggaccgatg

SEQ ID NO: 15000 - DNA, 203 bp, Artificial sequence
  synthetic
ggcgcgccagtccttaagtcagagctgacacaactgtgttcactagcaacctcaaacagacaccatggtgcatctgactcctgaggagaagtctgccgttactgccctgtggggcaaggtgaacgtggatgaagttactcccgaggccctgggcaggctgctggtggtctacccttgttcttggcaaacgactcggaccgatg

SEQ ID NO: 15001 - DNA, 203 bp, Artificial sequence
  synthetic
ggcgcgccagtcctcgtgacttagctgacacaactgtgttcactagcaacctcaaacagacaccatggtgcatctgactcctgaggagaagtctgccgttactgccctgtggggcaaggtgaacgtggatgaagttgcacggaatcgagaaggcaggctgctggtggtctacccttggaaccggccgtcgactcggaccgatg

SEQ ID NO: 15002 - DNA, 203 bp, Artificial sequence
  synthetic
ggcgcgccagtcctaagtcaggccctgacacaactgtgttcactagcaacctcaaacagacaccatggtgcatctgactcctgaggagaagtctgccgttactgccctgtggggcaaggtgaacgtggatgaagttgcacggaatcgagaaggcaggctgctggtggtctacccttggaccggcgggtcgactcggaccgatg

SEQ ID NO: 15003 - DNA, 203 bp, Artificial sequence
  synthetic
ggcgcgccagtccttatgacttctctgacacaactgtgttcactagcaacctcaaacagacaccatggtgcatctgactcctgaggagaagtctgccgttactgccctgtggggcaaggtgaacgtggatgaagttgccggcgggtccctgggcaggctgctggtggtctaccccgtcaattcctttacgactcggaccgatg

SEQ ID NO: 15004 - DNA, 203 bp, Artificial sequence
  synthetic
ggcgcgccagtcctcttaagtcaactgacacaactgtgttcactagcaacctcaaacagacaccatggtgcatctgactcctgaggagaagtctgccgttactgccctgtggggcaaggtgaacgtggatgaagttgccggcgggtccctgggcaggctgctggtggtctacccttggacccagaggtcgactcggaccgatg

SEQ ID NO: 15005 - DNA, 203 bp, Artificial sequence
  synthetic
ggcgcgccagtcctcagaatcttcctgacacaactgtgttcactagcaacctcaaacagacaccatggtgcatctgactcctgaggagaagtctgccgttactgccctgtggggcaaggtgaacgtggatgaagttgcgtcaattcctttaggcaggctgctggtggtctacccttggaccggcgggtcgactcggaccgatg

SEQ ID NO: 15006 - DNA, 203 bp, Artificial sequence
  synthetic
ggcgcgccagtcctctgctgactactgacacaactgtgttcactagcaacctcaaacagacaccatggtgcatctgactcctgaggagaagtctgccgttactgccctgtggggcaaggtgaacgtggatgaagttggtcgtcaattcctttacaggctgctggtggtctaccccacggaatcgagaacgactcggaccgatg

SEQ ID NO: 15007 - DNA, 203 bp, Artificial sequence
  synthetic
ggcgcgccagtcctcaagtattctctgacacaactgtgttcactagcaacctcaaacagacaccatggtgcatctgactcctgaggagaagtctgccgttactgccctgtggggcaaggtgaacgtggatgaagttggtgaccggccgttgggcaggcaccggccgttctacccttaccggccgtggtcgactcggaccgatg

SEQ ID NO: 15008 - DNA, 203 bp, Artificial sequence
  synthetic
ggcgcgccagtcctgctaagtatgctgacacaactgtgttcactagcaacctcaaacagacaccatggtgcatctgactcctgaggagaagtctgccgttactgccctgtggggcaaggtgaacgtggatgaagttggtgaccggccgttgggcaggcaccggccgttctacccttggacccagaggtcgactcggaccgatg

SEQ ID NO: 15009 - DNA, 203 bp, Artificial sequence
  synthetic
ggcgcgccagtcctcatactttcgctgacacaactgtgttcactagcaacctcaaacagacaccatggtgcatctgactcctgaggagaagtctgccgttactgccctgtggggcaaggtgaacgtggatgaagttggtgaccggccgttgggcaggctgctggtggtctacccttgttcttggcaaacgactcggaccgatg

SEQ ID NO: 15010 - DNA, 203 bp, Artificial sequence
  synthetic
ggcgcgccagtcctcatacttggtctgacacaactgtgttcactagcaacctcaaacagacaccatggtgcatctgactcctgaggagaagtctgccgttactgccctgtggggcaaggtgaacgtggatgaagttggtgcacggaatcgagaaaggccacggaatcgagaaccttggacccagaggtcgactcggaccgatg

SEQ ID NO: 15011 - DNA, 203 bp, Artificial sequence
  synthetic
ggcgcgccagtcctacgatactttctgacacaactgtgttcactagcaacctcaaacagacaccatggtgcatctgactcctgaggagaagtctgccgttactgccctgtggggcaaggtgaacgtggatgaagttggtgcacggaatcgagaaaggctgctggtggtctacccttggacccagaggtcgactcggaccgatg

SEQ ID NO: 15012 - DNA, 203 bp, Artificial sequence
  synthetic
ggcgcgccagtcctgtttgtatccctgacacaactgtgttcactagcaacctcaaacagacaccatggtgcatctgactcctgaggagaagtctgccgttactgccctgtggggcaaggtgaacgtggatgaagttggtgccggcgggttgggcaggcccggcgggttctacccttccggcgggtggtcgactcggaccgatg

SEQ ID NO: 15013 - DNA, 203 bp, Artificial sequence
  synthetic
ggcgcgccagtcctatctgaaaccctgacacaactgtgttcactagcaacctcaaacagacaccatggtgcatctgactcctgaggagaagtctgccgttactgccctgtggggcaaggtgaacgtggatgaagttggtgccggcgggttgggcaggcccggcgggttctacccttccggcgggtggtcgactcggaccgatg

SEQ ID NO: 15014 - DNA, 203 bp, Artificial sequence
  synthetic
ggcgcgccagtcctgatacttaccctgacacaactgtgttcactagcaacctcaaacagacaccatggtgcatctgactcctgaggagaagtctgccgttactgccctgtggggcaaggtgaacgtggatgaagttggtgccggcgggttgggcaggcccggcgggttctacccttccggcgggtggtcgactcggaccgatg

SEQ ID NO: 15015 - DNA, 203 bp, Artificial sequence
  synthetic
ggcgcgccagtcctaacagttaccctgacacaactgtgttcactagcaacctcaaacagacaccatggtgcatctgactcctgaggagaagtctgccgttactgccctgtggggcaaggtgaacgtggatgaagttggtgccggcgggttgggcaggcccggcgggttctacccttccggcgggtggtcgactcggaccgatg

SEQ ID NO: 15016 - DNA, 203 bp, Artificial sequence
  synthetic
ggcgcgccagtcctttactagaccctgacacaactgtgttcactagcaacctcaaacagacaccatggtgcatctgactcctgaggagaagtctgccgttactgccctgtggggcaaggtgaacgtggatgaagttggtgccggcgggttgggcaggcccggcgggttctacccttccggcgggtggtcgactcggaccgatg

SEQ ID NO: 15017 - DNA, 203 bp, Artificial sequence
  synthetic
ggcgcgccagtcctaattctgtccctgacacaactgtgttcactagcaacctcaaacagacaccatggtgcatctgactcctgaggagaagtctgccgttactgccctgtggggcaaggtgaacgtggatgaagttggtgccggcgggttgggcaggcccggcgggttctacccttccggcgggtggtcgactcggaccgatg

SEQ ID NO: 15018 - DNA, 203 bp, Artificial sequence
  synthetic
ggcgcgccagtcctggtcaagtatctgacacaactgtgttcactagcaacctcaaacagacaccatggtgcatctgactcctgaggagaagtctgccgttactgccctgtggggcaaggtgaacgtggatgaagttggtggggagtacctgggcaggcgggagtaggtctacccttggacccagaggtcgactcggaccgatg

SEQ ID NO: 15019 - DNA, 203 bp, Artificial sequence
  synthetic
ggcgcgccagtcctggttgtaagactgacacaactgtgttcactagcaacctcaaacagacaccatggtgcatctgactcctgaggagaagtctgccgttactgccctgtggggcaaggtgaacgtggatgaagttggtggtcacggaatcgagaagctgctggtggtctacccttgttcttggcaaacgactcggaccgatg

SEQ ID NO: 15020 - DNA, 203 bp, Artificial sequence
  synthetic
ggcgcgccagtcctggtgaagattctgacacaactgtgttcactagcaacctcaaacagacaccatggtgcatctgactcctgaggagaagtctgccgttactgccctgtggggcaaggtgaacgtggatgaagttggtggtcgtcaattcctttagctgctggtggtctacccttgttcttggcaaacgactcggaccgatg

SEQ ID NO: 15021 - DNA, 203 bp, Artificial sequence
  synthetic
ggcgcgccagtccttcttgatctactgacacaactgtgttcactagcaacctcaaacagacaccatggtgcatctgactcctgaggagaagtctgccgttactgccctgtggggcaaggtgaacgtggatgaagttggtggtgaaccggccgtcaggctgctggtggtctaccccacggaatcgagaacgactcggaccgatg

SEQ ID NO: 15022 - DNA, 203 bp, Artificial sequence
  synthetic
ggcgcgccagtcctatgtgatctactgacacaactgtgttcactagcaacctcaaacagacaccatggtgcatctgactcctgaggagaagtctgccgttactgccctgtggggcaaggtgaacgtggatgaagttggtggtgaaccggccgtcaggctgctggtggtctacccttggacctactccccgactcggaccgatg

SEQ ID NO: 15023 - DNA, 203 bp, Artificial sequence
  synthetic
ggcgcgccagtcctggcttcacccctgacacaactgtgttcactagcaacctcaaacagacaccatggtgcatctgactcctgaggagaagtctgccgttactgccctgtggggcaaggtgaacgtggatgaagttggtggtgacacggaatcgagaatgctggtggtctacccttggaaccggccgtcgactcggaccgatg

SEQ ID NO: 15024 - DNA, 203 bp, Artificial sequence
  synthetic
ggcgcgccagtcctgttcacccacctgacacaactgtgttcactagcaacctcaaacagacaccatggtgcatctgactcctgaggagaagtctgccgttactgccctgtggggcaaggtgaacgtggatgaagttggtggtgacacggaatcgagaatgctggtggtctacccttggaccggcgggtcgactcggaccgatg

SEQ ID NO: 15025 - DNA, 203 bp, Artificial sequence
  synthetic
ggcgcgccagtcctaacctagcagctgacacaactgtgttcactagcaacctcaaacagacaccatggtgcatctgactcctgaggagaagtctgccgttactgccctgtggggcaaggtgaacgtggatgaagttggtggtgaccggcgggtcaggctgctggtggtctacccttggacccagaggtcgactcggaccgatg

SEQ ID NO: 15026 - DNA, 203 bp, Artificial sequence
  synthetic
ggcgcgccagtccttaaccgagccctgacacaactgtgttcactagcaacctcaaacagacaccatggtgcatctgactcctgaggagaagtctgccgttactgccctgtggggcaaggtgaacgtggatgaagttggtggtgacgtcaattcctttatgctggtggtctacccttggaccggcgggtcgactcggaccgatg

SEQ ID NO: 15027 - DNA, 203 bp, Artificial sequence
  synthetic
ggcgcgccagtcctcgacgtcctgctgacacaactgtgttcactagcaacctcaaacagacaccatggtgcatctgactcctgaggagaagtctgccgttactgccctgtggggcaaggtgaacgtggatgaagttggtggtgaggcccccggcgggttgctggtggtctacccttggaaccggccgtcgactcggaccgatg

SEQ ID NO: 15028 - DNA, 203 bp, Artificial sequence
  synthetic
ggcgcgccagtcctggacgtttcgctgacacaactgtgttcactagcaacctcaaacagacaccatggtgcatctgactcctgaggagaagtctgccgttactgccctgtggggcaaggtgaacgtggatgaagttggtggtgaggccctactcccgctgctggtggtctacccttgttcttggcaaacgactcggaccgatg

SEQ ID NO: 15029 - DNA, 203 bp, Artificial sequence
  synthetic
ggcgcgccagtcctggacgttctactgacacaactgtgttcactagcaacctcaaacagacaccatggtgcatctgactcctgaggagaagtctgccgttactgccctgtggggcaaggtgaacgtggatgaagttggtggtgaggccctgaccggccgtctggtggtctaccccgtcaattcctttacgactcggaccgatg

SEQ ID NO: 15030 - DNA, 203 bp, Artificial sequence
  synthetic
ggcgcgccagtcctctggtagtaactgacacaactgtgttcactagcaacctcaaacagacaccatggtgcatctgactcctgaggagaagtctgccgttactgccctgtggggcaaggtgaacgtggatgaagttggtggtgaggccctgcacggaatcgagaaggtctacccttggaaccggccgtcgactcggaccgatg

SEQ ID NO: 15031 - DNA, 203 bp, Artificial sequence
  synthetic
ggcgcgccagtcctagaggtagtactgacacaactgtgttcactagcaacctcaaacagacaccatggtgcatctgactcctgaggagaagtctgccgttactgccctgtggggcaaggtgaacgtggatgaagttggtggtgaggccctgcacggaatcgagaaggtctacccttggaccggcgggtcgactcggaccgatg

SEQ ID NO: 15032 - DNA, 203 bp, Artificial sequence
  synthetic
ggcgcgccagtcctcgtgaatgaactgacacaactgtgttcactagcaacctcaaacagacaccatggtgcatctgactcctgaggagaagtctgccgttactgccctgtggggcaaggtgaacgtggatgaagttggtggtgaggccctgccggcgggtctggtggtctacccttggacctactccccgactcggaccgatg

SEQ ID NO: 15033 - DNA, 203 bp, Artificial sequence
  synthetic
ggcgcgccagtccttgtctcgtgcctgacacaactgtgttcactagcaacctcaaacagacaccatggtgcatctgactcctgaggagaagtctgccgttactgccctgtggggcaaggtgaacgtggatgaagttggtggtgaggccctgggcaccggccgtgtggtctacccttgttcttggcaaacgactcggaccgatg

SEQ ID NO: 15034 - DNA, 203 bp, Artificial sequence
  synthetic
ggcgcgccagtcctaggctgcgaactgacacaactgtgttcactagcaacctcaaacagacaccatggtgcatctgactcctgaggagaagtctgccgttactgccctgtggggcaaggtgaacgtggatgaagttggtggtgaggccctgggcaggcacccgccggtctacccttggacccagaggtcgactcggaccgatg

SEQ ID NO: 15035 - DNA, 203 bp, Artificial sequence
  synthetic
ggcgcgccagtcctaccaagcgaactgacacaactgtgttcactagcaacctcaaacagacaccatggtgcatctgactcctgaggagaagtctgccgttactgccctgtggggcaaggtgaacgtggatgaagttggtggtgaggccctgggcaggcaccggccgttctaccccacggaatcgagaacgactcggaccgatg

SEQ ID NO: 15036 - DNA, 203 bp, Artificial sequence
  synthetic
ggcgcgccagtcctaatgcgaatcctgacacaactgtgttcactagcaacctcaaacagacaccatggtgcatctgactcctgaggagaagtctgccgttactgccctgtggggcaaggtgaacgtggatgaagttggtggtgaggccctgggcaggcaccggccgttctacccttggacccagaggtcgactcggaccgatg

SEQ ID NO: 15037 - DNA, 203 bp, Artificial sequence
  synthetic
ggcgcgccagtcctcaggcgaactctgacacaactgtgttcactagcaacctcaaacagacaccatggtgcatctgactcctgaggagaagtctgccgttactgccctgtggggcaaggtgaacgtggatgaagttggtggtgaggccctgggcaggccacggaatcgagaaccttggaccggcgggtcgactcggaccgatg

SEQ ID NO: 15038 - DNA, 203 bp, Artificial sequence
  synthetic
ggcgcgccagtccttggcgaagtcctgacacaactgtgttcactagcaacctcaaacagacaccatggtgcatctgactcctgaggagaagtctgccgttactgccctgtggggcaaggtgaacgtggatgaagttggtggtgaggccctgggcaggcccggcgggttctaccccacggaatcgagaacgactcggaccgatg

SEQ ID NO: 15039 - DNA, 203 bp, Artificial sequence
  synthetic
ggcgcgccagtcctaaaagcgaagctgacacaactgtgttcactagcaacctcaaacagacaccatggtgcatctgactcctgaggagaagtctgccgttactgccctgtggggcaaggtgaacgtggatgaagttggtggtgaggccctgggcaggcccggcgggttctacccttccggcgggtggtcgactcggaccgatg

SEQ ID NO: 15040 - DNA, 203 bp, Artificial sequence
  synthetic
ggcgcgccagtcctctcttcgccactgacacaactgtgttcactagcaacctcaaacagacaccatggtgcatctgactcctgaggagaagtctgccgttactgccctgtggggcaaggtgaacgtggatgaagttggtggtgaggccctgggcaggcccggcgggttctacccttccggcgggtggtcgactcggaccgatg

SEQ ID NO: 15041 - DNA, 203 bp, Artificial sequence
  synthetic
ggcgcgccagtcctacgctttcgcctgacacaactgtgttcactagcaacctcaaacagacaccatggtgcatctgactcctgaggagaagtctgccgttactgccctgtggggcaaggtgaacgtggatgaagttggtggtgaggccctgggcaggcccggcgggttctacccttccggcgggtggtcgactcggaccgatg

SEQ ID NO: 15042 - DNA, 203 bp, Artificial sequence
  synthetic
ggcgcgccagtcctcttcgctgtgctgacacaactgtgttcactagcaacctcaaacagacaccatggtgcatctgactcctgaggagaagtctgccgttactgccctgtggggcaaggtgaacgtggatgaagttggtggtgaggccctgggcaggcccggcgggttctacccttccggcgggtggtcgactcggaccgatg

SEQ ID NO: 15043 - DNA, 203 bp, Artificial sequence
  synthetic
ggcgcgccagtcctcgttcgctgcctgacacaactgtgttcactagcaacctcaaacagacaccatggtgcatctgactcctgaggagaagtctgccgttactgccctgtggggcaaggtgaacgtggatgaagttggtggtgaggccctgggcaggcccggcgggttctacccttccggcgggtggtcgactcggaccgatg

SEQ ID NO: 15044 - DNA, 203 bp, Artificial sequence
  synthetic
ggcgcgccagtcctaggattcgctctgacacaactgtgttcactagcaacctcaaacagacaccatggtgcatctgactcctgaggagaagtctgccgttactgccctgtggggcaaggtgaacgtggatgaagttggtggtgaggccctgggcaggcccggcgggttctacccttccggcgggtggtcgactcggaccgatg

SEQ ID NO: 15045 - DNA, 203 bp, Artificial sequence
  synthetic
ggcgcgccagtcctatttcgctcgctgacacaactgtgttcactagcaacctcaaacagacaccatggtgcatctgactcctgaggagaagtctgccgttactgccctgtggggcaaggtgaacgtggatgaagttggtggtgaggccctgggcaggccgtcaattcctttaccttggacccagaggtcgactcggaccgatg

SEQ ID NO: 15046 - DNA, 203 bp, Artificial sequence
  synthetic
ggcgcgccagtcctaaattcgcttctgacacaactgtgttcactagcaacctcaaacagacaccatggtgcatctgactcctgaggagaagtctgccgttactgccctgtggggcaaggtgaacgtggatgaagttggtggtgaggccctgggcaggctactcccggtctacccttggacccagaggtcgactcggaccgatg

SEQ ID NO: 15047 - DNA, 203 bp, Artificial sequence
  synthetic
ggcgcgccagtcctggatttcgctctgacacaactgtgttcactagcaacctcaaacagacaccatggtgcatctgactcctgaggagaagtctgccgttactgccctgtggggcaaggtgaacgtggatgaagttggtggtgaggccctgggcaggctactcccggtctacccttggaccggcgggtcgactcggaccgatg

SEQ ID NO: 15048 - DNA, 203 bp, Artificial sequence
  synthetic
ggcgcgccagtcctcttcgctagtctgacacaactgtgttcactagcaacctcaaacagacaccatggtgcatctgactcctgaggagaagtctgccgttactgccctgtggggcaaggtgaacgtggatgaagttggtggtgaggccctgggcaggctactcccggtctaccctttactcccgaggtcgactcggaccgatg

SEQ ID NO: 15049 - DNA, 203 bp, Artificial sequence
  synthetic
ggcgcgccagtcctttgtcatgggctgacacaactgtgttcactagcaacctcaaacagacaccatggtgcatctgactcctgaggagaagtctgccgttactgccctgtggggcaaggtgaacgtggatgaagttggtggtgaggccctgggcaggctgcacggaatcgagaattggacctactccccgactcggaccgatg

SEQ ID NO: 15050 - DNA, 203 bp, Artificial sequence
  synthetic
ggcgcgccagtccttgtaggtgccctgacacaactgtgttcactagcaacctcaaacagacaccatggtgcatctgactcctgaggagaagtctgccgttactgccctgtggggcaaggtgaacgtggatgaagttggtggtgaggccctgggcaggctgcccggcgggtacccttgttcttggcaaacgactcggaccgatg

SEQ ID NO: 15051 - DNA, 203 bp, Artificial sequence
  synthetic
ggcgcgccagtcctgtgacgttctctgacacaactgtgttcactagcaacctcaaacagacaccatggtgcatctgactcctgaggagaagtctgccgttactgccctgtggggcaaggtgaacgtggatgaagttggtggtgaggccctgggcaggctgcgtcaattcctttacacggaatcgagaacgactcggaccgatg

SEQ ID NO: 15052 - DNA, 203 bp, Artificial sequence
  synthetic
ggcgcgccagtcctaccttacgcactgacacaactgtgttcactagcaacctcaaacagacaccatggtgcatctgactcctgaggagaagtctgccgttactgccctgtggggcaaggtgaacgtggatgaagttggtggtgaggccctgggcaggctgctgaccggccgtccttggaaccggccgtcgactcggaccgatg

SEQ ID NO: 15053 - DNA, 203 bp, Artificial sequence
  synthetic
ggcgcgccagtcctcttacgctctctgacacaactgtgttcactagcaacctcaaacagacaccatggtgcatctgactcctgaggagaagtctgccgttactgccctgtggggcaaggtgaacgtggatgaagttggtggtgaggccctgggcaggctgctgcacggaatcgagaattcttggcaaacgactcggaccgatg

SEQ ID NO: 15054 - DNA, 203 bp, Artificial sequence
  synthetic
ggcgcgccagtccttgctgtgttcctgacacaactgtgttcactagcaacctcaaacagacaccatggtgcatctgactcctgaggagaagtctgccgttactgccctgtggggcaaggtgaacgtggatgaagttggtggtgaggccctgggcaggctgctggtcacggaatcgagaaccggcgggtcgactcggaccgatg

SEQ ID NO: 15055 - DNA, 203 bp, Artificial sequence
  synthetic
ggcgcgccagtccttatcgtgttactgacacaactgtgttcactagcaacctcaaacagacaccatggtgcatctgactcctgaggagaagtctgccgttactgccctgtggggcaaggtgaacgtggatgaagttggtggtgaggccctgggcaggctgctggtccggcgggtttggacccagaggtcgactcggaccgatg

SEQ ID NO: 15056 - DNA, 203 bp, Artificial sequence
  synthetic
ggcgcgccagtcctaacacgatcgctgacacaactgtgttcactagcaacctcaaacagacaccatggtgcatctgactcctgaggagaagtctgccgttactgccctgtggggcaaggtgaacgtggatgaagttggtggtgaggccctgggcaggctgctggtcgtcaattcctttaccggcgggtcgactcggaccgatg

SEQ ID NO: 15057 - DNA, 203 bp, Artificial sequence
  synthetic
ggcgcgccagtcctgacctaagaactgacacaactgtgttcactagcaacctcaaacagacaccatggtgcatctgactcctgaggagaagtctgccgttactgccctgtggggcaaggtgaacgtggatgaagttggtggtgaggccctgggcaggctgctggtggcgtcaattcctttatactccccgactcggaccgatg

SEQ ID NO: 15058 - DNA, 203 bp, Artificial sequence
  synthetic
ggcgcgccagtccttcagcctaccctgacacaactgtgttcactagcaacctcaaacagacaccatggtgcatctgactcctgaggagaagtctgccgttactgccctgtggggcaaggtgaacgtggatgaagttggtggtgaggccctgggcaggctgctggtggtactcccttggacctactccccgactcggaccgatg

SEQ ID NO: 15059 - DNA, 203 bp, Artificial sequence
  synthetic
ggcgcgccagtcctctttcagcctctgacacaactgtgttcactagcaacctcaaacagacaccatggtgcatctgactcctgaggagaagtctgccgttactgccctgtggggcaaggtgaacgtggatgaagttggtggtgaggccctgggcaggctgctggtggtctaccccgtcaattcctttacgactcggaccgatg

SEQ ID NO: 15060 - DNA, 203 bp, Artificial sequence
  synthetic
ggcgcgccagtcctgtaagtcatgctgacacaactgtgttcactagcaacctcaaacagacaccatggtgcatctgactcctgaggagaagtctgccgttactgccctgtggggcaaggtgaacgtggatgaagttggtggtgaggccctgggcaggctgctggtggtctaccctactccctactccccgactcggaccgatg

SEQ ID NO: 15061 - DNA, 203 bp, Artificial sequence
  synthetic
ggcgcgccagtcctagaacctgtgctgacacaactgtgttcactagcaacctcaaacagacaccatggtgcatctgactcctgaggagaagtctgccgttactgccctgtggggcaaggtgaacgtggatgaagttggtggtgaggccctgggcaggctgctggtggtctacccttccggcgggtggtcgactcggaccgatg

SEQ ID NO: 15062 - DNA, 203 bp, Artificial sequence
  synthetic
ggcgcgccagtcctttgaggttcactgacacaactgtgttcactagcaacctcaaacagacaccatggtgcatctgactcctgaggagaagtctgccgttactgccctgtggggcaaggtgaacgtggatgaagttggtggtgaggccctgggcaggctgctggtggtctacccttccggcgggtggtcgactcggaccgatg

SEQ ID NO: 15063 - DNA, 203 bp, Artificial sequence
  synthetic
ggcgcgccagtcctgaccgaaacactgacacaactgtgttcactagcaacctcaaacagacaccatggtgcatctgactcctgaggagaagtctgccgttactgccctgtggggcaaggtgaacgtggatgaagttggtggtgaggccctgggcaggctgctggtggtctacccttccggcgggtggtcgactcggaccgatg

SEQ ID NO: 15064 - DNA, 203 bp, Artificial sequence
  synthetic
ggcgcgccagtcctcgtgtacccactgacacaactgtgttcactagcaacctcaaacagacaccatggtgcatctgactcctgaggagaagtctgccgttactgccctgtggggcaaggtgaacgtggatgaagttggtggtgaggccctgggcaggctgctggtggtctacccttccggcgggtggtcgactcggaccgatg

SEQ ID NO: 15065 - DNA, 203 bp, Artificial sequence
  synthetic
ggcgcgccagtcctgtcaacacgtctgacacaactgtgttcactagcaacctcaaacagacaccatggtgcatctgactcctgaggagaagtctgccgttactgccctgtggggcaaggtgaacgtggatgaagttggtggtgaggccctgggcaggctgctggtggtctacccttggacccagaggtcgactcggaccgatg

SEQ ID NO: 15066 - DNA, 203 bp, Artificial sequence
  synthetic
ggcgcgccagtcctccagtgttgactgacacaactgtgttcactagcaacctcaaacagacaccatggtgcatctgactcctgaggagaagtctgccgttactgccctgtggggcaaggtgaacgtggatgaagttggtggtgaggccctgggcaggctgctggtggtctacccttggacccagaggtcgactcggaccgatg

SEQ ID NO: 15067 - DNA, 203 bp, Artificial sequence
  synthetic
ggcgcgccagtccttcaacacttactgacacaactgtgttcactagcaacctcaaacagacaccatggtgcatctgactcctgaggagaagtctgccgttactgccctgtggggcaaggtgaacgtggatgaagttggtggtgaggccctgggcaggctgctggtggtctacccttggacccagaggtcgactcggaccgatg

SEQ ID NO: 15068 - DNA, 203 bp, Artificial sequence
  synthetic
ggcgcgccagtcctttgtaaacccctgacacaactgtgttcactagcaacctcaaacagacaccatggtgcatctgactcctgaggagaagtctgccgttactgccctgtggggcaaggtgaacgtggatgaagttggtggtgaggccctgggcaggctgctggtggtctacccttggacccagaggtcgactcggaccgatg

SEQ ID NO: 15069 - DNA, 203 bp, Artificial sequence
  synthetic
ggcgcgccagtccttgtggtagaactgacacaactgtgttcactagcaacctcaaacagacaccatggtgcatctgactcctgaggagaagtctgccgttactgccctgtggggcaaggtgaacgtggatgaagttggtggtgaggccctgggcaggctgctggtggtctacccttggacccagaggtcgactcggaccgatg

SEQ ID NO: 15070 - DNA, 203 bp, Artificial sequence
  synthetic
ggcgcgccagtcctgctggactttctgacacaactgtgttcactagcaacctcaaacagacaccatggtgcatctgactcctgaggagaagtctgccgttactgccctgtggggcaaggtgaacgtggatgaagttggtggtgaggccctgggcaggctgctggtggtctactactcccaccggccgtcgactcggaccgatg

SEQ ID NO: 15071 - DNA, 203 bp, Artificial sequence
  synthetic
ggcgcgccagtcctagttggtcccctgacacaactgtgttcactagcaacctcaaacagacaccatggtgcatctgactcctgaggagaagtctgccgttactgccctgtggggcaaggtgaacgtggatgaagttggtggtgaggccctgggcaggctgctggtggtctccggcgggtaccggccgtcgactcggaccgatg

SEQ ID NO: 15072 - DNA, 203 bp, Artificial sequence
  synthetic
ggcgcgccagtccttagaagtcccctgacacaactgtgttcactagcaacctcaaacagacaccatggtgcatctgactcctgaggagaagtctgccgttactgccctgtggggcaaggtgaacgtggatgaagttggtggtgaggccctgggcaggctgctggtggtttcttggcaaaaccggccgtcgactcggaccgatg

SEQ ID NO: 15073 - DNA, 203 bp, Artificial sequence
  synthetic
ggcgcgccagtccttcccaaccgtctgacacaactgtgttcactagcaacctcaaacagacaccatggtgcatctgactcctgaggagaagtctgccgttactgccctgtggggcaaggtgaacgtggatgaagttggtggtgaggccctgggcaggctgctggttactcccccttggaaccggccgtcgactcggaccgatg

SEQ ID NO: 15074 - DNA, 203 bp, Artificial sequence
  synthetic
ggcgcgccagtcctatcccaaggactgacacaactgtgttcactagcaacctcaaacagacaccatggtgcatctgactcctgaggagaagtctgccgttactgccctgtggggcaaggtgaacgtggatgaagttggtggtgaggccctgggcaggctgctgttcttggcaaattggacccagaggtcgactcggaccgatg

SEQ ID NO: 15075 - DNA, 203 bp, Artificial sequence
  synthetic
ggcgcgccagtcctgcatgatcccctgacacaactgtgttcactagcaacctcaaacagacaccatggtgcatctgactcctgaggagaagtctgccgttactgccctgtggggcaaggtgaacgtggatgaagttggtggtgaggccctgggcaggctgctgttcttggcaaattggacctactccccgactcggaccgatg

SEQ ID NO: 15076 - DNA, 203 bp, Artificial sequence
  synthetic
ggcgcgccagtcctgggatcctaactgacacaactgtgttcactagcaacctcaaacagacaccatggtgcatctgactcctgaggagaagtctgccgttactgccctgtggggcaaggtgaacgtggatgaagttggtggtgaggccctgggcaggctgtactccctctaccccgtcaattcctttacgactcggaccgatg

SEQ ID NO: 15077 - DNA, 203 bp, Artificial sequence
  synthetic
ggcgcgccagtcctttgggacctcctgacacaactgtgttcactagcaacctcaaacagacaccatggtgcatctgactcctgaggagaagtctgccgttactgccctgtggggcaaggtgaacgtggatgaagttggtggtgaggccctgggcaggcttctcgattccgtgccttggacccagaggtcgactcggaccgatg

SEQ ID NO: 15078 - DNA, 203 bp, Artificial sequence
  synthetic
ggcgcgccagtcctatttgggaccctgacacaactgtgttcactagcaacctcaaacagacaccatggtgcatctgactcctgaggagaagtctgccgttactgccctgtggggcaaggtgaacgtggatgaagttggtggtgaggccctgggcagttcttggcaaatctacccttggacccagaggtcgactcggaccgatg

SEQ ID NO: 15079 - DNA, 203 bp, Artificial sequence
  synthetic
ggcgcgccagtcctgggatactcgctgacacaactgtgttcactagcaacctcaaacagacaccatggtgcatctgactcctgaggagaagtctgccgttactgccctgtggggcaaggtgaacgtggatgaagttggtggtgaggccctgggcccggcgggtgtggtctacccttgttcttggcaaacgactcggaccgatg

SEQ ID NO: 15080 - DNA, 203 bp, Artificial sequence
  synthetic
ggcgcgccagtcctagagcgttgtctgacacaactgtgttcactagcaacctcaaacagacaccatggtgcatctgactcctgaggagaagtctgccgttactgccctgtggggcaaggtgaacgtggatgaagttggtggtgaggccctgggcgtcaattcctttatctacccttggacccagaggtcgactcggaccgatg

SEQ ID NO: 15081 - DNA, 203 bp, Artificial sequence
  synthetic
ggcgcgccagtcctggcgttgaacctgacacaactgtgttcactagcaacctcaaacagacaccatggtgcatctgactcctgaggagaagtctgccgttactgccctgtggggcaaggtgaacgtggatgaagttggtggtgaggccctgggcttcttggcaaaggtctacccttggaaccggccgtcgactcggaccgatg

SEQ ID NO: 15082 - DNA, 203 bp, Artificial sequence
  synthetic
ggcgcgccagtccttgtcgtgagcctgacacaactgtgttcactagcaacctcaaacagacaccatggtgcatctgactcctgaggagaagtctgccgttactgccctgtggggcaaggtgaacgtggatgaagttggtggtgaggccctgggtactcccctggtggtctaccccgtcaattcctttacgactcggaccgatg

SEQ ID NO: 15083 - DNA, 203 bp, Artificial sequence
  synthetic
ggcgcgccagtcctacacgacgaactgacacaactgtgttcactagcaacctcaaacagacaccatggtgcatctgactcctgaggagaagtctgccgttactgccctgtggggcaaggtgaacgtggatgaagttggtggtgaggcccttcttggcaaactggtggtctaccccacggaatcgagaacgactcggaccgatg

SEQ ID NO: 15084 - DNA, 203 bp, Artificial sequence
  synthetic
ggcgcgccagtcctcacgactgggctgacacaactgtgttcactagcaacctcaaacagacaccatggtgcatctgactcctgaggagaagtctgccgttactgccctgtggggcaaggtgaacgtggatgaagttggtggtgaggcccttcttggcaaactggtggtctacccttggacctactccccgactcggaccgatg

SEQ ID NO: 15085 - DNA, 203 bp, Artificial sequence
  synthetic
ggcgcgccagtcctacctgtcgtgctgacacaactgtgttcactagcaacctcaaacagacaccatggtgcatctgactcctgaggagaagtctgccgttactgccctgtggggcaaggtgaacgtggatgaagttggtggtgaggcgtcaattcctttactggtggtctaccccgtcaattcctttacgactcggaccgatg

SEQ ID NO: 15086 - DNA, 203 bp, Artificial sequence
  synthetic
ggcgcgccagtccttgcggtctttctgacacaactgtgttcactagcaacctcaaacagacaccatggtgcatctgactcctgaggagaagtctgccgttactgccctgtggggcaaggtgaacgtggatgaagttggtggtgaggcttcttggcaaatgctggtggtctacccttggaccggcgggtcgactcggaccgatg

SEQ ID NO: 15087 - DNA, 203 bp, Artificial sequence
  synthetic
ggcgcgccagtccttcgcggtctactgacacaactgtgttcactagcaacctcaaacagacaccatggtgcatctgactcctgaggagaagtctgccgttactgccctgtggggcaaggtgaacgtggatgaagttggtggtgaggtactccccaggctgctggtggtctaccccgtcaattcctttacgactcggaccgatg

SEQ ID NO: 15088 - DNA, 203 bp, Artificial sequence
  synthetic
ggcgcgccagtccttgcggttgcactgacacaactgtgttcactagcaacctcaaacagacaccatggtgcatctgactcctgaggagaagtctgccgttactgccctgtggggcaaggtgaacgtggatgaagttggtggtgagttcttggcaaagctgctggtggtctacccttgttcttggcaaacgactcggaccgatg

SEQ ID NO: 15089 - DNA, 203 bp, Artificial sequence
  synthetic
ggcgcgccagtcctgcggttaggtctgacacaactgtgttcactagcaacctcaaacagacaccatggtgcatctgactcctgaggagaagtctgccgttactgccctgtggggcaaggtgaacgtggatgaagttggtggtgatactcccggcaggctgctggtggtctacccttggaaccggccgtcgactcggaccgatg

SEQ ID NO: 15090 - DNA, 203 bp, Artificial sequence
  synthetic
ggcgcgccagtcctgcggtttgccctgacacaactgtgttcactagcaacctcaaacagacaccatggtgcatctgactcctgaggagaagtctgccgttactgccctgtggggcaaggtgaacgtggatgaagttggtggttactccctgggcaggctgctggtggtctacccttgttcttggcaaacgactcggaccgatg

SEQ ID NO: 15091 - DNA, 203 bp, Artificial sequence
  synthetic
ggcgcgccagtcctagttagcggtctgacacaactgtgttcactagcaacctcaaacagacaccatggtgcatctgactcctgaggagaagtctgccgttactgccctgtggggcaaggtgaacgtggatgaagttggtgtactccccctgggcaggctactcccggtctacccttggacccagaggtcgactcggaccgatg

SEQ ID NO: 15092 - DNA, 203 bp, Artificial sequence
  synthetic
ggcgcgccagtcctctgagcggtcctgacacaactgtgttcactagcaacctcaaacagacaccatggtgcatctgactcctgaggagaagtctgccgttactgccctgtggggcaaggtgaacgtggatgaagttggtgttcttggcaaaggcaggctgctggtggtctacccttggaaccggccgtcgactcggaccgatg

SEQ ID NO: 15093 - DNA, 203 bp, Artificial sequence
  synthetic
ggcgcgccagtcctcagcggtttcctgacacaactgtgttcactagcaacctcaaacagacaccatggtgcatctgactcctgaggagaagtctgccgttactgccctgtggggcaaggtgaacgtggatgaagttggtgttcttggcaaaggcaggctgctggtggtctacccttggaccggcgggtcgactcggaccgatg

SEQ ID NO: 15094 - DNA, 203 bp, Artificial sequence
  synthetic
ggcgcgccagtccttagaccgcatctgacacaactgtgttcactagcaacctcaaacagacaccatggtgcatctgactcctgaggagaagtctgccgttactgccctgtggggcaaggtgaacgtggatgaagttggttactcccccctgggcaggctgctggtggtctaccccacggaatcgagaacgactcggaccgatg

SEQ ID NO: 15095 - DNA, 203 bp, Artificial sequence
  synthetic
ggcgcgccagtccttaccgcttgactgacacaactgtgttcactagcaacctcaaacagacaccatggtgcatctgactcctgaggagaagtctgccgttactgccctgtggggcaaggtgaacgtggatgaagttggttactcccccctgggcaggctgctggtggtctacccttggacccagaggtcgactcggaccgatg

SEQ ID NO: 15096 - DNA, 203 bp, Artificial sequence
  synthetic
ggcgcgccagtccttaccgcaactctgacacaactgtgttcactagcaacctcaaacagacaccatggtgcatctgactcctgaggagaagtctgccgttactgccctgtggggcaaggtgaacgtggatgaagttggttcttggcaaatgggcaggctgctggtggtctacccttgttcttggcaaacgactcggaccgatg

SEQ ID NO: 15097 - DNA, 203 bp, Artificial sequence
  synthetic
ggcgcgccagtcctataccgcttcctgacacaactgtgttcactagcaacctcaaacagacaccatggtgcatctgactcctgaggagaagtctgccgttactgccctgtggggcaaggtgaacgtggatgaagttgtactcccggccctgggcaggctgctggtggtctacccttggaccggcgggtcgactcggaccgatg

SEQ ID NO: 15098 - DNA, 203 bp, Artificial sequence
  synthetic
ggcgcgccagtcctcgcaaccgcactgacacaactgtgttcactagcaacctcaaacagacaccatggtgcatctgactcctgaggagaagtctgccgttactgccctgtggggcaaggtgaacgtggatgaagtttcttggcaaaccctgggcaggctgctggtggtctaccccgtcaattcctttacgactcggaccgatg

SEQ ID NO: 15099 - DNA, 203 bp, Artificial sequence
  synthetic
ggcgcgccagtcctagtcaccgcgctgacacaactgtgttcactagcaacctcaaacagacaccatggtgcatctgactcctgaggagaagtctgccgttactgccctgtggggcaaggtgaacgtggatgacacggaatcgagaaccctgggcaggctgctggtggtctaccccgtcaattcctttacgactcggaccgatg

SEQ ID NO: 15100 - DNA, 203 bp, Artificial sequence
  synthetic
ggcgcgccagtcctcgaccgctttctgacacaactgtgttcactagcaacctcaaacagacaccatggtgcatctgactcctgaggagaagtctgccgttactgccctgtggggcaaggtgaacgtggatgacacggaatcgagaaccctgggcaggctgctggtggtctacccttggacctactccccgactcggaccgatg

SEQ ID NO: 15101 - DNA, 203 bp, Artificial sequence
  synthetic
ggcgcgccagtcctgtaccgcacactgacacaactgtgttcactagcaacctcaaacagacaccatggtgcatctgactcctgaggagaagtctgccgttactgccctgtggggcaaggtgaacgtggatgatactcccggtgaggccctgggcaggctgctggtggtctaccccgtcaattcctttacgactcggaccgatg

SEQ ID NO: 15102 - DNA, 203 bp, Artificial sequence
  synthetic
ggcgcgccagtccttagtgaccgcctgacacaactgtgttcactagcaacctcaaacagacaccatggtgcatctgactcctgaggagaagtctgccgttactgccctgtggggcaaggtgaacgtggatgatactcccggtgaggccctgggcaggctgctggtggtctacccttggacctactccccgactcggaccgatg

SEQ ID NO: 15103 - DNA, 203 bp, Artificial sequence
  synthetic
ggcgcgccagtcctccattctgcactgacacaactgtgttcactagcaacctcaaacagacaccatggtgcatctgactcctgaggagaagtctgccgttactgccctgtggggcaaggtgaacgtggccggcgggtgtggtgaggccctgggcaggctgctggtggtctacccttggaccggcgggtcgactcggaccgatg

SEQ ID NO: 15104 - DNA, 203 bp, Artificial sequence
  synthetic
ggcgcgccagtcctccagaatgacctgacacaactgtgttcactagcaacctcaaacagacaccatggtgcatctgactcctgaggagaagtctgccgttactgccctgtggggcaaggtgaacgtggtactccctggtggtgaggccctgggcaggctgctggtggtctacccttgttcttggcaaacgactcggaccgatg

SEQ ID NO: 15105 - DNA, 203 bp, Artificial sequence
  synthetic
ggcgcgccagtcctgtacacacagctgacacaactgtgttcactagcaacctcaaacagacaccatggtgcatctgactcctgaggagaagtctgccgttactgccctgtggggcaaggtgaacgtggttcttggcaaaggtgaggccctgggcaggctgctggtggtctacccttggacctactccccgactcggaccgatg

SEQ ID NO: 15106 - DNA, 203 bp, Artificial sequence
  synthetic
ggcgcgccagtccttttgaattcgctgacacaactgtgttcactagcaacctcaaacagacaccatggtgcatctgactcctgaggagaagtctgccgttactgccctgtggggcaaggtgaacgtttcttggcaaagtggtgaggccctgggcaggctgctggtggtctacccttggaaccggccgtcgactcggaccgatg

SEQ ID NO: 15107 - DNA, 203 bp, Artificial sequence
  synthetic
ggcgcgccagtccttaaagtctacctgacacaactgtgttcactagcaacctcaaacagacaccatggtgcatctgactcctgaggagaagtctgccgttactgccctgtggggcaaggtgacacggaatcgagaaggtgcacggaatcgagaaaggccacggaatcgagaaccttggacccagaggtcgactcggaccgatg

SEQ ID NO: 15108 - DNA, 203 bp, Artificial sequence
  synthetic
ggcgcgccagtcctgtcaaagtctctgacacaactgtgttcactagcaacctcaaacagacaccatggtgcatctgactcctgaggagaagtctgccgttactgccctgtggggcaaggtgacacggaatcgagaaggtgcacggaatcgagaaaggctgctggtggtctacccttggacccagaggtcgactcggaccgatg

SEQ ID NO: 15109 - DNA, 203 bp, Artificial sequence
  synthetic
ggcgcgccagtcctgctgaagtctctgacacaactgtgttcactagcaacctcaaacagacaccatggtgcatctgactcctgaggagaagtctgccgttactgccctgtggggcaaggtgacacggaatcgagaaggtggtgaggccctgggcaggctgctggtggtctacccttggacccagaggtcgactcggaccgatg

SEQ ID NO: 15110 - DNA, 203 bp, Artificial sequence
  synthetic
ggcgcgccagtcctcaagtctacactgacacaactgtgttcactagcaacctcaaacagacaccatggtgcatctgactcctgaggagaagtctgccgttactgccctgtggggcaaggtgaccggccgtgaagttggtggtgaggccctgggcaggctgctggtggtctacccttggaccggcgggtcgactcggaccgatg

SEQ ID NO: 15111 - DNA, 203 bp, Artificial sequence
  synthetic
ggcgcgccagtcctagctagacttctgacacaactgtgttcactagcaacctcaaacagacaccatggtgcatctgactcctgaggagaagtctgccgttactgccctgtggggcaaggtgaccggcgggtaagttggtgccggcgggttgggcaggcccggcgggttctacccttccggcgggtggtcgactcggaccgatg

SEQ ID NO: 15112 - DNA, 203 bp, Artificial sequence
  synthetic
ggcgcgccagtcctgggtacgcttctgacacaactgtgttcactagcaacctcaaacagacaccatggtgcatctgactcctgaggagaagtctgccgttactgccctgtggggcaaggtgaccggcgggtaagttggtgccggcgggttgggcaggcccggcgggttctacccttccggcgggtggtcgactcggaccgatg

SEQ ID NO: 15113 - DNA, 203 bp, Artificial sequence
  synthetic
ggcgcgccagtccttgagtacgccctgacacaactgtgttcactagcaacctcaaacagacaccatggtgcatctgactcctgaggagaagtctgccgttactgccctgtggggcaaggtgaccggcgggtaagttggtgccggcgggttgggcaggctgctggtggtctacccttccggcgggtggtcgactcggaccgatg

SEQ ID NO: 15114 - DNA, 203 bp, Artificial sequence
  synthetic
ggcgcgccagtccttagagtgtgactgacacaactgtgttcactagcaacctcaaacagacaccatggtgcatctgactcctgaggagaagtctgccgttactgccctgtggggcaaggtgaccggcgggtaagttggtggtgaggccctgggcaggcccggcgggttctacccttccggcgggtggtcgactcggaccgatg

SEQ ID NO: 15115 - DNA, 203 bp, Artificial sequence
  synthetic
ggcgcgccagtcctattgcggtggctgacacaactgtgttcactagcaacctcaaacagacaccatggtgcatctgactcctgaggagaagtctgccgttactgccctgtggggcaaggtgatactccctgaagttggtgtactccccctgggcaggctactcccggtctacccttggacccagaggtcgactcggaccgatg

SEQ ID NO: 15116 - DNA, 203 bp, Artificial sequence
  synthetic
ggcgcgccagtcctaattgaacgtctgacacaactgtgttcactagcaacctcaaacagacaccatggtgcatctgactcctgaggagaagtctgccgttactgccctgtggggcaaggtgatactccctgaagttggtgtactccccctgggcaggctgctggtggtctacccttggacccagaggtcgactcggaccgatg

SEQ ID NO: 15117 - DNA, 203 bp, Artificial sequence
  synthetic
ggcgcgccagtcctgctcattgacctgacacaactgtgttcactagcaacctcaaacagacaccatggtgcatctgactcctgaggagaagtctgccgttactgccctgtggggcaaggtgattcttggcaaagttggtggtgaggccctgggcaggctgctggtggtctacccttggacccagaggtcgactcggaccgatg

SEQ ID NO: 15118 - DNA, 203 bp, Artificial sequence
  synthetic
ggcgcgccagtcctcaattctcgtctgacacaactgtgttcactagcaacctcaaacagacaccatggtgcatctgactcctgaggagaagtctgccgttactgccctgtggggcaaggtgcacggaatcgagaatggtggtgaggccctgggcaggctgctggtggtctacccttgttcttggcaaacgactcggaccgatg

SEQ ID NO: 15119 - DNA, 203 bp, Artificial sequence
  synthetic
ggcgcgccagtcctttcattgcagctgacacaactgtgttcactagcaacctcaaacagacaccatggtgcatctgactcctgaggagaagtctgccgttactgccctgtggggcaaggtgcgtcaattcctttatggtggtgaggccctgggcaggctgctggtggtctacccttgttcttggcaaacgactcggaccgatg

SEQ ID NO: 15120 - DNA, 203 bp, Artificial sequence
  synthetic
ggcgcgccagtcctggtgatcaatctgacacaactgtgttcactagcaacctcaaacagacaccatggtgcatctgactcctgaggagaagtctgccgttactgccctgtggggcaaggtgtactcccatgaagttggtggtgaggccctgggcaggctgctggtggtctacccttgttcttggcaaacgactcggaccgatg

SEQ ID NO: 15121 - DNA, 203 bp, Artificial sequence
  synthetic
ggcgcgccagtcctatcagaattgctgacacaactgtgttcactagcaacctcaaacagacaccatggtgcatctgactcctgaggagaagtctgccgttactgccctgtggggcaaggtgttcttggcaaaagttggtggtgaggccctgggcaggctgctggtggtctaccccgtcaattcctttacgactcggaccgatg

SEQ ID NO: 15122 - DNA, 203 bp, Artificial sequence
  synthetic
ggcgcgccagtcctggtcaattcgctgacacaactgtgttcactagcaacctcaaacagacaccatggtgcatctgactcctgaggagaagtctgccgttactgccctgtggggcaagtactccctggatgaagttggtggtgaggccctgggcaggctgctggtggtctaccccgtcaattcctttacgactcggaccgatg

SEQ ID NO: 15123 - DNA, 203 bp, Artificial sequence
  synthetic
ggcgcgccagtcctacttcaattcctgacacaactgtgttcactagcaacctcaaacagacaccatggtgcatctgactcctgaggagaagtctgccgttactgccctgtggggcaagtactccctggatgaagttggtggtgaggccctgggcaggctgctggtggtctacccttggacccagaggtcgactcggaccgatg

SEQ ID NO: 15124 - DNA, 203 bp, Artificial sequence
  synthetic
ggcgcgccagtcctgaggattgatctgacacaactgtgttcactagcaacctcaaacagacaccatggtgcatctgactcctgaggagaagtctgccgttactgccctgtggggcaattcttggcaaaatgaagttggtggtgaggccctgggcaggctgctggtggtctacccttgttcttggcaaacgactcggaccgatg

SEQ ID NO: 15125 - DNA, 203 bp, Artificial sequence
  synthetic
ggcgcgccagtcctacaatctaagctgacacaactgtgttcactagcaacctcaaacagacaccatggtgcatctgactcctgaggagaagtctgccgttactgccctgtggggcacacggaatcgagaagaagttggtggtgaggccctgggcaggctgctggtggtctacccttggaaccggccgtcgactcggaccgatg

SEQ ID NO: 15126 - DNA, 203 bp, Artificial sequence
  synthetic
ggcgcgccagtcctccacattgatctgacacaactgtgttcactagcaacctcaaacagacaccatggtgcatctgactcctgaggagaagtctgccgttactgccctgtggggcacacggaatcgagaagaagttggtggtgaggccctgggcaggctgctggtggtctacccttggaccggcgggtcgactcggaccgatg

SEQ ID NO: 15127 - DNA, 203 bp, Artificial sequence
  synthetic
ggcgcgccagtcctctcagcaatgctgacacaactgtgttcactagcaacctcaaacagacaccatggtgcatctgactcctgaggagaagtctgccgttactgccctgtggggcacgtcaattcctttagaagttggtggtgaggccctgggcaggctgctggtggtctacccttggaccggcgggtcgactcggaccgatg

SEQ ID NO: 15128 - DNA, 203 bp, Artificial sequence
  synthetic
ggcgcgccagtcctaacgatcaatctgacacaactgtgttcactagcaacctcaaacagacaccatggtgcatctgactcctgaggagaagtctgccgttactgccctgtggttcttggcaaacgtggatgaagttggtggtgaggccctgggcaggctgctggtggtctacccttggaccggcgggtcgactcggaccgatg

SEQ ID NO: 15129 - DNA, 203 bp, Artificial sequence
  synthetic
ggcgcgccagtccttctgattgctctgacacaactgtgttcactagcaacctcaaacagacaccatggtgcatctgactcctgaggagaagtctgccgttactgccctgtgtactcccgtgaacgtggatgaagttggtggtgaggccctgggcaggctgctggtggtctaccccacggaatcgagaacgactcggaccgatg

SEQ ID NO: 15130 - DNA, 203 bp, Artificial sequence
  synthetic
ggcgcgccagtccttcgctcaatgctgacacaactgtgttcactagcaacctcaaacagacaccatggtgcatctgactcctgaggagaagtctgccgttactgccctgtgtactcccgtgaacgtggatgaagttggtggtgaggccctgggcaggctgctggtggtctaccccgtcaattcctttacgactcggaccgatg

SEQ ID NO: 15131 - DNA, 203 bp, Artificial sequence
  synthetic
ggcgcgccagtcctttcattgattctgacacaactgtgttcactagcaacctcaaacagacaccatggtgcatctgactcctgaggagaagtctgccgttactgccctgtgtactcccgtgaacgtggatgaagttggtggtgaggccctgggcaggctgctggtggtctacccttggacccagaggtcgactcggaccgatg

SEQ ID NO: 15132 - DNA, 203 bp, Artificial sequence
  synthetic
ggcgcgccagtcctactgtattgcctgacacaactgtgttcactagcaacctcaaacagacaccatggtgcatctgactcctgaggagaagtctgccgttactgccctgtgtactccggtgaacgtggatgaagttggtggtgaggccctgggcaggctgctggtggtctacccttggacccagaggtcgactcggaccgatg

SEQ ID NO: 15133 - DNA, 203 bp, Artificial sequence
  synthetic
ggcgcgccagtcctcagagcaattctgacacaactgtgttcactagcaacctcaaacagacaccatggtgcatctgactcctgaggagaagtctgccgttactgcccttcttggcaaagtgaacgtggatgaagttggtggtgaggccctgggcaggctgctggtggtctaccccacggaatcgagaacgactcggaccgatg

SEQ ID NO: 15134 - DNA, 203 bp, Artificial sequence
  synthetic
ggcgcgccagtcctcgcaatactcctgacacaactgtgttcactagcaacctcaaacagacaccatggtgcatctgactcctgaggagaagtctgccgttactgccggcgggtgcaaggtgaacgtggatgaagttggtggtgaggccctgggcaggcccggcgggttctacccttccggcgggtggtcgactcggaccgatg

SEQ ID NO: 15135 - DNA, 203 bp, Artificial sequence
  synthetic
ggcgcgccagtcctgatcgattgtctgacacaactgtgttcactagcaacctcaaacagacaccatggtgcatctgactcctgaggagaagtctgccgttactgccggcgggtgcaaggtgaccggcgggtaagttggtgccggcgggttgggcaggcccggcgggttctacccttccggcgggtggtcgactcggaccgatg

SEQ ID NO: 15136 - DNA, 203 bp, Artificial sequence
  synthetic
ggcgcgccagtcctacattgaggtctgacacaactgtgttcactagcaacctcaaacagacaccatggtgcatctgactcctgaggagaagtctgccgttactgccggcgggtgcaaggtgaccggcgggtaagttggtgccggcgggttgggcaggcccggcgggttctacccttccggcgggtggtcgactcggaccgatg

SEQ ID NO: 15137 - DNA, 203 bp, Artificial sequence
  synthetic
ggcgcgccagtcctattgatcacactgacacaactgtgttcactagcaacctcaaacagacaccatggtgcatctgactcctgaggagaagtctgccgttactgccggcgggtgcaaggtgaccggcgggtaagttggtgccggcgggttgggcaggcccggcgggttctacccttccggcgggtggtcgactcggaccgatg

SEQ ID NO: 15138 - DNA, 203 bp, Artificial sequence
  synthetic
ggcgcgccagtcctcagcattgttctgacacaactgtgttcactagcaacctcaaacagacaccatggtgcatctgactcctgaggagaagtctgccgttactgccggcgggtgcaaggtgaccggcgggtaagttggtgccggcgggttgggcaggcccggcgggttctacccttccggcgggtggtcgactcggaccgatg

SEQ ID NO: 15139 - DNA, 203 bp, Artificial sequence
  synthetic
ggcgcgccagtccttattgcatttctgacacaactgtgttcactagcaacctcaaacagacaccatggtgcatctgactcctgaggagaagtctgccgttactgccggcgggtgcaaggtgaccggcgggtaagttggtgccggcgggttgggcaggctgctggtggtctacccttggacccagaggtcgactcggaccgatg

SEQ ID NO: 15140 - DNA, 203 bp, Artificial sequence
  synthetic
ggcgcgccagtcctacttgcaatgctgacacaactgtgttcactagcaacctcaaacagacaccatggtgcatctgactcctgaggagaagtctgccgttactgcgtcaattcctttagtgaacgtggatgaagttggtgcgtcaattcctttaaggctgctggtggtctacccttggacccagaggtcgactcggaccgatg

SEQ ID NO: 15141 - DNA, 203 bp, Artificial sequence
  synthetic
ggcgcgccagtcctggtattgccactgacacaactgtgttcactagcaacctcaaacagacaccatggtgcatctgactcctgaggagaagtctgccgttactgcgtcaattcctttagtgaacgtggatgaagttggtggtgaggccctgggcaggctgctggtggtctaccccgtcaattcctttacgactcggaccgatg

SEQ ID NO: 15142 - DNA, 203 bp, Artificial sequence
  synthetic
ggcgcgccagtcctttacacattgctgacacaactgtgttcactagcaacctcaaacagacaccatggtgcatctgactcctgaggagaagtctgccgttactgcgtcaattcctttagtgaacgtggatgaagttggtggtgaggccctgggcaggctgctggtggtctacccttggacccagaggtcgactcggaccgatg

SEQ ID NO: 15143 - DNA, 203 bp, Artificial sequence
  synthetic
ggcgcgccagtcctgggtcaattcctgacacaactgtgttcactagcaacctcaaacagacaccatggtgcatctgactcctgaggagaagtctgccgttactgcgtcaattcctttagtgacgtcaattcctttaggtggtgaggccctgggcaggctgctggtggtctacccttggacccagaggtcgactcggaccgatg

SEQ ID NO: 15144 - DNA, 203 bp, Artificial sequence
  synthetic
ggcgcgccagtccttgcattgagactgacacaactgtgttcactagcaacctcaaacagacaccatggtgcatctgactcctgaggagaagtctgccgttactgtactcccgggcaaggtgaacgtggatgaagttggtggtgaggccctgggcaggctactcccggtctacccttggacccagaggtcgactcggaccgatg

SEQ ID NO: 15145 - DNA, 203 bp, Artificial sequence
  synthetic
ggcgcgccagtccttcaatttgaactgacacaactgtgttcactagcaacctcaaacagacaccatggtgcatctgactcctgaggagaagtctgccgttactgtactcccgggcaaggtgaacgtggatgaagttggtggtgaggccctgggcaggctactcccggtctaccctttactcccgaggtcgactcggaccgatg

SEQ ID NO: 15146 - DNA, 203 bp, Artificial sequence
  synthetic
ggcgcgccagtcctaacagcaatactgacacaactgtgttcactagcaacctcaaacagacaccatggtgcatctgactcctgaggagaagtctgccgttactgtactcccgggcaaggtgaacgtggatgaagttggtggtgaggccctgggcaggctgctggtggtctaccccacggaatcgagaacgactcggaccgatg

SEQ ID NO: 15147 - DNA, 203 bp, Artificial sequence
  synthetic
ggcgcgccagtcctgcaatctcttctgacacaactgtgttcactagcaacctcaaacagacaccatggtgcatctgactcctgaggagaagtctgccgttactgtactcccgggcaaggtgaacgtggatgaagttggtggtgaggccctgggcaggctgctggtggtctacccttggacctactccccgactcggaccgatg

SEQ ID NO: 15148 - DNA, 203 bp, Artificial sequence
  synthetic
ggcgcgccagtcctcaatcgttgcctgacacaactgtgttcactagcaacctcaaacagacaccatggtgcatctgactcctgaggagaagtctgccgttactgtactcccgggcaaggtgaacgtggatgaagttggtgtactccccctgggcaggctactcccggtctaccctttactcccgaggtcgactcggaccgatg

SEQ ID NO: 15149 - DNA, 203 bp, Artificial sequence
  synthetic
ggcgcgccagtcctattgcaacgcctgacacaactgtgttcactagcaacctcaaacagacaccatggtgcatctgactcctgaggagaagtctgccgttactgtactcccgggcaaggtgatactccctgaagttggtggtgaggccctgggcaggctactcccggtctaccctttactcccgaggtcgactcggaccgatg

SEQ ID NO: 15150 - DNA, 203 bp, Artificial sequence
  synthetic
ggcgcgccagtccttagtccattgctgacacaactgtgttcactagcaacctcaaacagacaccatggtgcatctgactcctgaggagaagtctgccgttactgtactcccgggcaaggtgatactccctgaagttggtgtactccccctgggcaggctactcccggtctaccctttactcccgaggtcgactcggaccgatg

SEQ ID NO: 15151 - DNA, 203 bp, Artificial sequence
  synthetic
ggcgcgccagtcctcctgattgtcctgacacaactgtgttcactagcaacctcaaacagacaccatggtgcatctgactcctgaggagaagtctgccgttactgtactcccgggcaaggtgatactccctgaagttggtgtactccccctgggcaggctgctggtggtctaccctttactcccgaggtcgactcggaccgatg

SEQ ID NO: 15152 - DNA, 203 bp, Artificial sequence
  synthetic
ggcgcgccagtcctgtcgtaagagctgacacaactgtgttcactagcaacctcaaacagacaccatggtgcatctgactcctgaggagaagtctgccgttactgttcttggcaaaaaggtgattcttggcaaagttggtgttcttggcaaaggcaggctgctggtggtctacccttggacccagaggtcgactcggaccgatg

SEQ ID NO: 15153 - DNA, 203 bp, Artificial sequence
  synthetic
ggcgcgccagtcctgtattcgtaactgacacaactgtgttcactagcaacctcaaacagacaccatggtgcatctgactcctgaggagaagtctgccgttactgttcttggcaaaaaggtgattcttggcaaagttggtgttcttggcaaaggcaggcttcttggcaaatacccttggacccagaggtcgactcggaccgatg

SEQ ID NO: 15154 - DNA, 203 bp, Artificial sequence
  synthetic
ggcgcgccagtcctttcgtaacccctgacacaactgtgttcactagcaacctcaaacagacaccatggtgcatctgactcctgaggagaagtctgccgttactgtttgccaagaaaaggtgatttgccaagaagttggtgtttgccaagaaggcaggctttgccaagaatacccttggacccagaggtcgactcggaccgatg

SEQ ID NO: 15155 - DNA, 203 bp, Artificial sequence
  synthetic
ggcgcgccagtcctacgttcgtaactgacacaactgtgttcactagcaacctcaaacagacaccatggtgcatctgactcctgaggagaagtctgccgttacttcactgtaccggccgtgcgtactggatgaagttggtggtgaggccctgggcaggctgctggtggtctacccttggacccagaggtcgactcggaccgatg

SEQ ID NO: 15156 - DNA, 203 bp, Artificial sequence
  synthetic
ggcgcgccagtcctgggtcgtaaactgacacaactgtgttcactagcaacctcaaacagacaccatggtgcatctgactcctgaggagaagtctgccgttacttgcaaccatactccccccggaatggatgaagttggtggtgaggccctgggcaggctgctggtggtctacccttggacccagaggtcgactcggaccgatg

SEQ ID NO: 15157 - DNA, 203 bp, Artificial sequence
  synthetic
ggcgcgccagtcctcttacgacgactgacacaactgtgttcactagcaacctcaaacagacaccatggtgcatctgactcctgaggagaagtctgccgttcgtcaattcctttacaaggtgaacgtggatgaagttggtggtgaggccctgggcaggctgctggtggtctacccttgttcttggcaaacgactcggaccgatg

SEQ ID NO: 15158 - DNA, 203 bp, Artificial sequence
  synthetic
ggcgcgccagtcctagtatcgacgctgacacaactgtgttcactagcaacctcaaacagacaccatggtgcatctgactcctgaggagaagtctgccgttgcccttccgtcaattcctttaagtttcaatgaagttggtggtgaggccctgggcaggctgctggtggtctacccttggacccagaggtcgactcggaccgatg

SEQ ID NO: 15159 - DNA, 203 bp, Artificial sequence
  synthetic
ggcgcgccagtcctacgtcgactcctgacacaactgtgttcactagcaacctcaaacagacaccatggtgcatctgactcctgaggagaagtctgccgtttactccctgtggggcaaggtgaacgtggatgaagttggtggtgaggccctgggcaggctgctggtggtctacccttgttcttggcaaacgactcggaccgatg

SEQ ID NO: 15160 - DNA, 203 bp, Artificial sequence
  synthetic
ggcgcgccagtcctaagcaaggttctgacacaactgtgttcactagcaacctcaaacagacaccatggtgcatctgactcctgaggagaagtctgcctactcccccctgtggggcaaggtgaacgtggatgaagttggtggtgaggccctgggcaggctgctggtggtctaccccacggaatcgagaacgactcggaccgatg

SEQ ID NO: 15161 - DNA, 203 bp, Artificial sequence
  synthetic
ggcgcgccagtcctacagaagcaactgacacaactgtgttcactagcaacctcaaacagacaccatggtgcatctgactcctgaggagaagtctgcctcccggaagctgcccggcgggtcatgggaataacaagttggtggtgaggccctgggcaggctgctggtggtctacccttggacccagaggtcgactcggaccgatg

SEQ ID NO: 15162 - DNA, 203 bp, Artificial sequence
  synthetic
ggcgcgccagtcctccaagcaatcctgacacaactgtgttcactagcaacctcaaacagacaccatggtgcatctgactcctgaggagaagtctgcgcaccaccacccacggaatcgagaaagagctatcaaagttggtggtgaggccctgggcaggctgctggtggtctacccttggacccagaggtcgactcggaccgatg

SEQ ID NO: 15163 - DNA, 203 bp, Artificial sequence
  synthetic
ggcgcgccagtccttattgcttggctgacacaactgtgttcactagcaacctcaaacagacaccatggtgcatctgactcctgaggagaagtctgctcagctttgcaaccatactccccccggaacccaaagagttggtggtgaggccctgggcaggctgctggtggtctacccttggacccagaggtcgactcggaccgatg

SEQ ID NO: 15164 - DNA, 203 bp, Artificial sequence
  synthetic
ggcgcgccagtcctaatttgcttactgacacaactgtgttcactagcaacctcaaacagacaccatggtgcatctgactcctgaggagaagtctgctggtgcccttccgtcaattcctttaagtttcagcttagttggtggtgaggccctgggcaggctgctggtggtctacccttggacccagaggtcgactcggaccgatg

SEQ ID NO: 15165 - DNA, 203 bp, Artificial sequence
  synthetic
ggcgcgccagtcctccttgcttcactgacacaactgtgttcactagcaacctcaaacagacaccatggtgcatctgactcctgaggagaagtctgcttcccggaagctgcccggcgggtcatgggaataacgagttggtggtgaggccctgggcaggctgctggtggtctacccttggacccagaggtcgactcggaccgatg

SEQ ID NO: 15166 - DNA, 203 bp, Artificial sequence
  synthetic
ggcgcgccagtcctatgattgcttctgacacaactgtgttcactagcaacctcaaacagacaccatggtgcatctgactcctgaggagaagtctgcttcttggcaaatgtggggcaaggtgaacgtggatgaagttggtggtgaggccctgggcaggctgctggtggtctacccttgttcttggcaaacgactcggaccgatg

SEQ ID NO: 15167 - DNA, 203 bp, Artificial sequence
  synthetic
ggcgcgccagtcctaagaaatggactgacacaactgtgttcactagcaacctcaaacagacaccatggtgcatctgactcctgaggagaagtcttcttggcaaaccctgtggggcaaggtgaacgtggatgaagttggtggtgaggccctgggcaggctgctggtggtctaccccacggaatcgagaacgactcggaccgatg

SEQ ID NO: 15168 - DNA, 203 bp, Artificial sequence
  synthetic
ggcgcgccagtccttgtactgcccctgacacaactgtgttcactagcaacctcaaacagacaccatggtgcatctgactcctgaggagaagtcttttcagctttgcaaccatactccccccggaacccaaagacttggtggtgaggccctgggcaggctgctggtggtctacccttggacccagaggtcgactcggaccgatg

SEQ ID NO: 15169 - DNA, 203 bp, Artificial sequence
  synthetic
ggcgcgccagtcctgggctcagcactgacacaactgtgttcactagcaacctcaaacagacaccatggtgcatctgactcctgaggagaatactcccgttactgccctgtggggcaaggtgaacgtggatgaagttggtggtgaggccctgggcaggctgctggtggtctaccccgtcaattcctttacgactcggaccgatg

SEQ ID NO: 15170 - DNA, 203 bp, Artificial sequence
  synthetic
ggcgcgccagtcctgggctacgtcctgacacaactgtgttcactagcaacctcaaacagacaccatggtgcatctgactcctgaggagaatcctggtggtgcccttccgtcaattcctttaagtttcagctttgcaactggtgaggccctgggcaggctgctggtggtctacccttggacccagaggtcgactcggaccgatg

SEQ ID NO: 15171 - DNA, 203 bp, Artificial sequence
  synthetic
ggcgcgccagtcctgggcagcactctgacacaactgtgttcactagcaacctcaaacagacaccatggtgcatctgactcctgaggagaattcttgattaatgaaaacattcttggcaaatgctttcgctctggtccgtggtgaggccctgggcaggctgctggtggtctacccttggacccagaggtcgactcggaccgatg

SEQ ID NO: 15172 - DNA, 203 bp, Artificial sequence
  synthetic
ggcgcgccagtcctaccacgttgtctgacacaactgtgttcactagcaacctcaaacagacaccatggtgcatctgactcctgaggagaccggccgtgttactgccctgtggggcaaggtgaacgtggatgaagttggtggtgaggccctgggcaggctgctggtggtctacccttggacccagaggtcgactcggaccgatg

SEQ ID NO: 15173 - DNA, 203 bp, Artificial sequence
  synthetic
ggcgcgccagtcctctgaaactctctgacacaactgtgttcactagcaacctcaaacagacaccatggtgcatctgactcctgaggagactcctggtggtgcccttccgtcaattcctttaagtttcagctttgcaaccagtgaggccctgggcaggctgctggtggtctacccttggacccagaggtcgactcggaccgatg

SEQ ID NO: 15174 - DNA, 203 bp, Artificial sequence
  synthetic
ggcgcgccagtcctatccacgaagctgacacaactgtgttcactagcaacctcaaacagacaccatggtgcatctgactcctgaggagactttggtttcccggaagctgcccggcgggtcatgggaataacgccgccgcatcgaggccctgggcaggctgctggtggtctacccttggacccagaggtcgactcggaccgatg

SEQ ID NO: 15175 - DNA, 203 bp, Artificial sequence
  synthetic
ggcgcgccagtccttccacgaagactgacacaactgtgttcactagcaacctcaaacagacaccatggtgcatctgactcctgaggagattaagtttcagctttgcaaccatactccccccggaacccaaagactttggggtgaggccctgggcaggctgctggtggtctacccttggacccagaggtcgactcggaccgatg

SEQ ID NO: 15176 - DNA, 203 bp, Artificial sequence
  synthetic
ggcgcgccagtcctagttcgtgttctgacacaactgtgttcactagcaacctcaaacagacaccatggtgcatctgactcctgaggagcacggaatcgagaatgccctgtggggcaaggtgaacgtggatgaagttggtggtgaggccctgggcaggctgctggtggtctacccttggaccggcgggtcgactcggaccgatg

SEQ ID NO: 15177 - DNA, 203 bp, Artificial sequence
  synthetic
ggcgcgccagtcctacgcactgcgctgacacaactgtgttcactagcaacctcaaacagacaccatggtgcatctgactcctgaggagctccctgccgttactgagctcccgggcaaggtgaagctccctgaagttggtgagctccccctgggcaggcagctcccggtctacccttggacccagaggtcgactcggaccgatg

SEQ ID NO: 15178 - DNA, 203 bp, Artificial sequence
  synthetic
ggcgcgccagtcctcttgctgcatctgacacaactgtgttcactagcaacctcaaacagacaccatggtgcatctgactcctgaggagggcgggtccgttactgagggcgggtgcaaggtgaagggcgggtaagttggtgagggcgggttgggcaggcagggcgggttctacccttggacccagaggtcgactcggaccgatg

SEQ ID NO: 15179 - DNA, 203 bp, Artificial sequence
  synthetic
ggcgcgccagtcctcttgttacacctgacacaactgtgttcactagcaacctcaaacagacaccatggtgcatctgactcctgaggagtactcccccgttactgccctgtggggcaaggtgaacgtggatgaagttggtggtgaggccctgggcaggctgctggtggtctacccttggaccggcgggtcgactcggaccgatg

SEQ ID NO: 15180 - DNA, 203 bp, Artificial sequence
  synthetic
ggcgcgccagtcctagtgtaagagctgacacaactgtgttcactagcaacctcaaacagacaccatggtgcatctgactcctgaggagtcaattcctttaactgagtcaattcctttagtgaagtcaattcctttaggtgagtcaattcctttaaggcagtcaattcctttaccttggacccagaggtcgactcggaccgatg

SEQ ID NO: 15181 - DNA, 203 bp, Artificial sequence
  synthetic
ggcgcgccagtcctcgagcgtatgctgacacaactgtgttcactagcaacctcaaacagacaccatggtgcatctgactcctgaggatcggccgtccgttactgatcggccgtgcaaggtgaatcggccgtaagttggtgatcggccgttgggcaggcatcggccgttctacccttggacccagaggtcgactcggaccgatg

SEQ ID NO: 15182 - DNA, 203 bp, Artificial sequence
  synthetic
ggcgcgccagtcctttcatacgctctgacacaactgtgttcactagcaacctcaaacagacaccatggtgcatctgactcctgaggatcgttcttgattaatgaaaacattcttggcaaatgctttcgctctggtccgtcttgaggccctgggcaggctgctggtggtctacccttggacccagaggtcgactcggaccgatg

SEQ ID NO: 15183 - DNA, 203 bp, Artificial sequence
  synthetic
ggcgcgccagtcctacagtacgggctgacacaactgtgttcactagcaacctcaaacagacaccatggtgcatctgactcctgaggattcaattcctttaactgattcaattcctttagtgaattcaattcctttaggtgattcaattcctttaaggcattcaattcctttaccttggacccagaggtcgactcggaccgatg

SEQ ID NO: 15184 - DNA, 203 bp, Artificial sequence
  synthetic
ggcgcgccagtcctcaccaacgggctgacacaactgtgttcactagcaacctcaaacagacaccatggtgcatctgactcctgaggcaacgaatcgagaaactgcaacgaatcgagaagtgacaacgaatcgagaaggtgcaacgaatcgagaaaggccaacgaatcgagaaccttggacccagaggtcgactcggaccgatg

SEQ ID NO: 15185 - DNA, 203 bp, Artificial sequence
  synthetic
ggcgcgccagtcctcccgtttggactgacacaactgtgttcactagcaacctcaaacagacaccatggtgcatctgactcctgaggcacagaatcgagaaactgcacagaatcgagaagtgacacagaatcgagaaggtgcacagaatcgagaaaggccacagaatcgagaaccttggacccagaggtcgactcggaccgatg

SEQ ID NO: 15186 - DNA, 203 bp, Artificial sequence
  synthetic
ggcgcgccagtcctagtcgacgggctgacacaactgtgttcactagcaacctcaaacagacaccatggtgcatctgactcctgaggcacgaaatcgagaaactgcacgaaatcgagaagtgacacgaaatcgagaaggtgcacgaaatcgagaaaggccacgaaatcgagaaccttggacccagaggtcgactcggaccgatg

SEQ ID NO: 15187 - DNA, 203 bp, Artificial sequence
  synthetic
ggcgcgccagtcctcccgttaaagctgacacaactgtgttcactagcaacctcaaacagacaccatggtgcatctgactcctgaggcacgatatcgagaaactgcacgatatcgagaagtgacacgatatcgagaaggtgcacgatatcgagaaaggccacgatatcgagaaccttggacccagaggtcgactcggaccgatg

SEQ ID NO: 15188 - DNA, 203 bp, Artificial sequence
  synthetic
ggcgcgccagtcctgcttctaactctgacacaactgtgttcactagcaacctcaaacagacaccatggtgcatctgactcctgaggcacggaaccgagaaactgcacggaaccgagaagtgacacggaaccgagaaggtgcacggaaccgagaaaggccacggaaccgagaaccttggacccagaggtcgactcggaccgatg

SEQ ID NO: 15189 - DNA, 203 bp, Artificial sequence
  synthetic
ggcgcgccagtcctttagaatggtctgacacaactgtgttcactagcaacctcaaacagacaccatggtgcatctgactcctgaggcacggaatcaagaaactgcacggaatcaagaagtgacacggaatcaagaaggtgcacggaatcaagaaaggccacggaatcaagaaccttggacccagaggtcgactcggaccgatg

SEQ ID NO: 15190 - DNA, 203 bp, Artificial sequence
  synthetic
ggcgcgccagtcctcgccttagaactgacacaactgtgttcactagcaacctcaaacagacaccatggtgcatctgactcctgaggcacggaatcgagaaactgcacggaatcgagaagtgaacgtggatgaagttggtgcacggaatcgagaaaggccacggaatcgagaaccttggacccagaggtcgactcggaccgatg

SEQ ID NO: 15191 - DNA, 203 bp, Artificial sequence
  synthetic
ggcgcgccagtcctttagaaacacctgacacaactgtgttcactagcaacctcaaacagacaccatggtgcatctgactcctgaggcacggaatcgagaaactgcacggaatcgagaagtgacacggaatcgagaaggtgcacggaatcgagaaaggccacggaatcgagaaccttggacccagaggtcgactcggaccgatg

SEQ ID NO: 15192 - DNA, 203 bp, Artificial sequence
  synthetic
ggcgcgccagtcctagtgtgtacgctgacacaactgtgttcactagcaacctcaaacagacaccatggtgcatctgactcctgaggcacggaatcgagaaactgcacggaatcgagaagtgacacggaatcgagaaggtggtgaggccctgggcaggccacggaatcgagaaccttggacccagaggtcgactcggaccgatg

SEQ ID NO: 15193 - DNA, 203 bp, Artificial sequence
  synthetic
ggcgcgccagtcctagtgcacgtcctgacacaactgtgttcactagcaacctcaaacagacaccatggtgcatctgactcctgaggcacggaatcgagaaactgccctgtggggcaaggtgaacgtggatgaagttggtgcacggaatcgagaaaggccacggaatcgagaaccttggacccagaggtcgactcggaccgatg

SEQ ID NO: 15194 - DNA, 203 bp, Artificial sequence
  synthetic
ggcgcgccagtcctaaacaaggccctgacacaactgtgttcactagcaacctcaaacagacaccatggtgcatctgactcctgaggcacggaatcgagaaactgccctgtggggcaaggtgacacggaatcgagaaggtgcacggaatcgagaaaggctgctggtggtctacccttggacccagaggtcgactcggaccgatg

SEQ ID NO: 15195 - DNA, 203 bp, Artificial sequence
  synthetic
ggcgcgccagtcctatcatgcagtctgacacaactgtgttcactagcaacctcaaacagacaccatggtgcatctgactcctgaggcacggaatcgagagactgcacggaatcgagaggtgacacggaatcgagagggtgcacggaatcgagagaggccacggaatcgagagccttggacccagaggtcgactcggaccgatg

SEQ ID NO: 15196 - DNA, 203 bp, Artificial sequence
  synthetic
ggcgcgccagtcctgtaaagactgctgacacaactgtgttcactagcaacctcaaacagacaccatggtgcatctgactcctgaggcacggaatcgagctactgcacggaatcgagctgtgacacggaatcgagctggtgcacggaatcgagctaggccacggaatcgagctccttggacccagaggtcgactcggaccgatg

SEQ ID NO: 15197 - DNA, 203 bp, Artificial sequence
  synthetic
ggcgcgccagtcctggcctgggacctgacacaactgtgttcactagcaacctcaaacagacaccatggtgcatctgactcctgaggcacggaatcgaggcactgcacggaatcgaggcgtgacacggaatcgaggcggtgcacggaatcgaggcaggccacggaatcgaggcccttggacccagaggtcgactcggaccgatg

SEQ ID NO: 15198 - DNA, 203 bp, Artificial sequence
  synthetic
ggcgcgccagtcctatacgtgcttctgacacaactgtgttcactagcaacctcaaacagacaccatggtgcatctgactcctgaggcacggaatcgaggtactgcacggaatcgaggtgtgacacggaatcgaggtggtgcacggaatcgaggtaggccacggaatcgaggtccttggacccagaggtcgactcggaccgatg

SEQ ID NO: 15199 - DNA, 203 bp, Artificial sequence
  synthetic
ggcgcgccagtcctgtaaatgactctgacacaactgtgttcactagcaacctcaaacagacaccatggtgcatctgactcctgaggcacggaatcgcgaaactgcacggaatcgcgaagtgacacggaatcgcgaaggtgcacggaatcgcgaaaggccacggaatcgcgaaccttggacccagaggtcgactcggaccgatg

SEQ ID NO: 15200 - DNA, 203 bp, Artificial sequence
  synthetic
ggcgcgccagtccttaaatctctgctgacacaactgtgttcactagcaacctcaaacagacaccatggtgcatctgactcctgaggcacggaatcgggaaactgcacggaatcgggaagtgacacggaatcgggaaggtgcacggaatcgggaaaggccacggaatcgggaaccttggacccagaggtcgactcggaccgatg

SEQ ID NO: 15201 - DNA, 203 bp, Artificial sequence
  synthetic
ggcgcgccagtcctagatttaggactgacacaactgtgttcactagcaacctcaaacagacaccatggtgcatctgactcctgaggcacggaatcgtgaaactgcacggaatcgtgaagtgacacggaatcgtgaaggtgcacggaatcgtgaaaggccacggaatcgtgaaccttggacccagaggtcgactcggaccgatg

SEQ ID NO: 15202 - DNA, 203 bp, Artificial sequence
  synthetic
ggcgcgccagtcctcatttacttcctgacacaactgtgttcactagcaacctcaaacagacaccatggtgcatctgactcctgaggcacggaatggagaaactgcacggaatggagaagtgacacggaatggagaaggtgcacggaatggagaaaggccacggaatggagaaccttggacccagaggtcgactcggaccgatg

SEQ ID NO: 15203 - DNA, 203 bp, Artificial sequence
  synthetic
ggcgcgccagtcctctctaaatcgctgacacaactgtgttcactagcaacctcaaacagacaccatggtgcatctgactcctgaggcacggaattaagaaactgcacggaattaagaagtgacacggaattaagaaggtgcacggaattaagaaaggccacggaattaagaaccttggacccagaggtcgactcggaccgatg

SEQ ID NO: 15204 - DNA, 203 bp, Artificial sequence
  synthetic
ggcgcgccagtcctaatttaggacctgacacaactgtgttcactagcaacctcaaacagacaccatggtgcatctgactcctgaggcacggaattgagaaactgcacggaattgagaagtgacacggaattgagaaggtgcacggaattgagaaaggccacggaattgagaaccttggacccagaggtcgactcggaccgatg

SEQ ID NO: 15205 - DNA, 203 bp, Artificial sequence
  synthetic
ggcgcgccagtcctgaaagtgattctgacacaactgtgttcactagcaacctcaaacagacaccatggtgcatctgactcctgaggcacggccgtccgttactgcacggccgtgcaaggtgacacggccgtaagttggtgcacggccgttgggcaggccacggccgttctacccttggacccagaggtcgactcggaccgatg

SEQ ID NO: 15206 - DNA, 203 bp, Artificial sequence
  synthetic
ggcgcgccagtcctcgttcaagatctgacacaactgtgttcactagcaacctcaaacagacaccatggtgcatctgactcctgaggcacgggatcgagaaactgcacgggatcgagaagtgacacgggatcgagaaggtgcacgggatcgagaaaggccacgggatcgagaaccttggacccagaggtcgactcggaccgatg

SEQ ID NO: 15207 - DNA, 203 bp, Artificial sequence
  synthetic
ggcgcgccagtcctagatttggttctgacacaactgtgttcactagcaacctcaaacagacaccatggtgcatctgactcctgaggcactccctgccgttactgcactcccgggcaaggtgacactccctgaagttggtgcactccccctgggcaggccactcccggtctacccttggacccagaggtcgactcggaccgatg

SEQ ID NO: 15208 - DNA, 203 bp, Artificial sequence
  synthetic
ggcgcgccagtccttttaaccaacctgacacaactgtgttcactagcaacctcaaacagacaccatggtgcatctgactcctgaggcagagaatcgagaaactgcagagaatcgagaagtgacagagaatcgagaaggtgcagagaatcgagaaaggccagagaatcgagaaccttggacccagaggtcgactcggaccgatg

SEQ ID NO: 15209 - DNA, 203 bp, Artificial sequence
  synthetic
ggcgcgccagtcctccaaccaagtctgacacaactgtgttcactagcaacctcaaacagacaccatggtgcatctgactcctgaggcagcgaatcgagaaactgcagcgaatcgagaagtgacagcgaatcgagaaggtgcagcgaatcgagaaaggccagcgaatcgagaaccttggacccagaggtcgactcggaccgatg

SEQ ID NO: 15210 - DNA, 203 bp, Artificial sequence
  synthetic
ggcgcgccagtccttctgcgagcgctgacacaactgtgttcactagcaacctcaaacagacaccatggtgcatctgactcctgaggcatggaatcgagaaactgcatggaatcgagaagtgacatggaatcgagaaggtgcatggaatcgagaaaggccatggaatcgagaaccttggacccagaggtcgactcggaccgatg

SEQ ID NO: 15211 - DNA, 203 bp, Artificial sequence
  synthetic
ggcgcgccagtccttgcgaggacgctgacacaactgtgttcactagcaacctcaaacagacaccatggtgcatctgactcctgaggcattgaatcgagaaactgcattgaatcgagaagtgacattgaatcgagaaggtgcattgaatcgagaaaggccattgaatcgagaaccttggacccagaggtcgactcggaccgatg

SEQ ID NO: 15212 - DNA, 203 bp, Artificial sequence
  synthetic
ggcgcgccagtccttctttgcgagctgacacaactgtgttcactagcaacctcaaacagacaccatggtgcatctgactcctgaggccatcgggtccgttactgccatcgggtgcaaggtgaccatcgggtaagttggtgccatcgggttgggcaggcccatcgggttctacccttggacccagaggtcgactcggaccgatg

SEQ ID NO: 15213 - DNA, 203 bp, Artificial sequence
  synthetic
ggcgcgccagtcctggcgagctaactgacacaactgtgttcactagcaacctcaaacagacaccatggtgcatctgactcctgaggccctccctgccgttactgccctcccgggcaaggtgaccctccctgaagttggtgccctccccctgggcaggcccctcccggtctacccttggacccagaggtcgactcggaccgatg

SEQ ID NO: 15214 - DNA, 203 bp, Artificial sequence
  synthetic
ggcgcgccagtcctaagagcgagtctgacacaactgtgttcactagcaacctcaaacagacaccatggtgcatctgactcctgaggccctcgggtccgttactgccctcgggtgcaaggtgaccctcgggtaagttggtgccctcgggttgggcaggcccctcgggttctacccttggacccagaggtcgactcggaccgatg

SEQ ID NO: 15215 - DNA, 203 bp, Artificial sequence
  synthetic
ggcgcgccagtcctgcctgcgagcctgacacaactgtgttcactagcaacctcaaacagacaccatggtgcatctgactcctgaggccgacgggtccgttactgccgacgggtgcaaggtgaccgacgggtaagttggtgccgacgggttgggcaggcccgacgggttctacccttggacccagaggtcgactcggaccgatg

SEQ ID NO: 15216 - DNA, 203 bp, Artificial sequence
  synthetic
ggcgcgccagtcctgtgctgcgagctgacacaactgtgttcactagcaacctcaaacagacaccatggtgcatctgactcctgaggccggaaggtccgttactgccggaaggtgcaaggtgaccggaaggtaagttggtgccggaaggttgggcaggcccggaaggttctacccttggacccagaggtcgactcggaccgatg

SEQ ID NO: 15217 - DNA, 203 bp, Artificial sequence
  synthetic
ggcgcgccagtcctctcgcaaactctgacacaactgtgttcactagcaacctcaaacagacaccatggtgcatctgactcctgaggccggatggtccgttactgccggatggtgcaaggtgaccggatggtaagttggtgccggatggttgggcaggcccggatggttctacccttggacccagaggtcgactcggaccgatg

SEQ ID NO: 15218 - DNA, 203 bp, Artificial sequence
  synthetic
ggcgcgccagtcctgtgacctcgcctgacacaactgtgttcactagcaacctcaaacagacaccatggtgcatctgactcctgaggccggcaggtccgttactgccggcaggtgcaaggtgaccggcaggtaagttggtgccggcaggttgggcaggcccggcaggttctacccttggacccagaggtcgactcggaccgatg

SEQ ID NO: 15219 - DNA, 203 bp, Artificial sequence
  synthetic
ggcgcgccagtccttcactcgcatctgacacaactgtgttcactagcaacctcaaacagacaccatggtgcatctgactcctgaggccggcgcatccgttactgccggcgcatgcaaggtgaccggcgcataagttggtgccggcgcattgggcaggcccggcgcattctacccttggacccagaggtcgactcggaccgatg

SEQ ID NO: 15220 - DNA, 203 bp, Artificial sequence
  synthetic
ggcgcgccagtcctaggcctcgccctgacacaactgtgttcactagcaacctcaaacagacaccatggtgcatctgactcctgaggccggcgcctccgttactgccggcgcctgcaaggtgaccggcgcctaagttggtgccggcgccttgggcaggcccggcgccttctacccttggacccagaggtcgactcggaccgatg

SEQ ID NO: 15221 - DNA, 203 bp, Artificial sequence
  synthetic
ggcgcgccagtcctcctctcgctcctgacacaactgtgttcactagcaacctcaaacagacaccatggtgcatctgactcctgaggccggcgcgtccgttactgccggcgcgtgcaaggtgaccggcgcgtaagttggtgccggcgcgttgggcaggcccggcgcgttctacccttggacccagaggtcgactcggaccgatg

SEQ ID NO: 15222 - DNA, 203 bp, Artificial sequence
  synthetic
ggcgcgccagtcctcccgtctcgcctgacacaactgtgttcactagcaacctcaaacagacaccatggtgcatctgactcctgaggccggcggaaccgttactgccggcggaagcaaggtgaccggcggaaaagttggtgccggcggaatgggcaggcccggcggaatctacccttggacccagaggtcgactcggaccgatg

SEQ ID NO: 15223 - DNA, 203 bp, Artificial sequence
  synthetic
ggcgcgccagtcctctactcgcagctgacacaactgtgttcactagcaacctcaaacagacaccatggtgcatctgactcctgaggccggcggccccgttactgccggcggccgcaaggtgaccggcggccaagttggtgccggcggcctgggcaggcccggcggcctctacccttggacccagaggtcgactcggaccgatg

SEQ ID NO: 15224 - DNA, 203 bp, Artificial sequence
  synthetic
ggcgcgccagtcctcccagacgacctgacacaactgtgttcactagcaacctcaaacagacaccatggtgcatctgactcctgaggccggcgggtccgttactgccctgtggggcaaggtgaacgtggatgaagttggtggtgaggccctgggcaggctgctggtggtctacccttggaaccggccgtcgactcggaccgatg

SEQ ID NO: 15225 - DNA, 203 bp, Artificial sequence
  synthetic
ggcgcgccagtcctcccagagccactgacacaactgtgttcactagcaacctcaaacagacaccatggtgcatctgactcctgaggccggcgggtccgttactgccctgtggggcaaggtgaccggcgggtaagttggtgccggcgggttgggcaggcccggcgggttctacccttggacccagaggtcgactcggaccgatg

SEQ ID NO: 15226 - DNA, 203 bp, Artificial sequence
  synthetic
ggcgcgccagtcctcggtgaccagctgacacaactgtgttcactagcaacctcaaacagacaccatggtgcatctgactcctgaggccggcgggtccgttactgccctgtggggcaaggtgaccggcgggtaagttggtggtgaggccctgggcaggctgctggtggtctacccttccggcgggtggtcgactcggaccgatg

SEQ ID NO: 15227 - DNA, 203 bp, Artificial sequence
  synthetic
ggcgcgccagtcctcggcggttgtctgacacaactgtgttcactagcaacctcaaacagacaccatggtgcatctgactcctgaggccggcgggtccgttactgccctgtggggcaaggtgaccggcgggtaagttggtggtgaggccctgggcaggctgctggtggtctacccttggacccagaggtcgactcggaccgatg

SEQ ID NO: 15228 - DNA, 203 bp, Artificial sequence
  synthetic
ggcgcgccagtcctcggtctgcccctgacacaactgtgttcactagcaacctcaaacagacaccatggtgcatctgactcctgaggccggcgggtccgttactgccggcgggtgcaaggtgaacgtggatgaagttggtggtgaggccctgggcaggcccggcgggttctacccttggacccagaggtcgactcggaccgatg

SEQ ID NO: 15229 - DNA, 203 bp, Artificial sequence
  synthetic
ggcgcgccagtcctgcaaggaccgctgacacaactgtgttcactagcaacctcaaacagacaccatggtgcatctgactcctgaggccggcgggtccgttactgccggcgggtgcaaggtgaccggcgggtaagttggtgccggcgggttgggcaggcccggcgggttctacccttccggcgggtggtcgactcggaccgatg

SEQ ID NO: 15230 - DNA, 203 bp, Artificial sequence
  synthetic
ggcgcgccagtcctgtacgtagcgctgacacaactgtgttcactagcaacctcaaacagacaccatggtgcatctgactcctgaggccggcgggtccgttactgccggcgggtgcaaggtgaccggcgggtaagttggtgccggcgggttgggcaggcccggcgggttctacccttccggcgggtggtcgactcggaccgatg

SEQ ID NO: 15231 - DNA, 203 bp, Artificial sequence
  synthetic
ggcgcgccagtccttgttaagtgactgacacaactgtgttcactagcaacctcaaacagacaccatggtgcatctgactcctgaggccggcgggtccgttactgccggcgggtgcaaggtgaccggcgggtaagttggtgccggcgggttgggcaggcccggcgggttctacccttccggcgggtggtcgactcggaccgatg

SEQ ID NO: 15232 - DNA, 203 bp, Artificial sequence
  synthetic
ggcgcgccagtccttttaaggatactgacacaactgtgttcactagcaacctcaaacagacaccatggtgcatctgactcctgaggccggcgggtccgttactgccggcgggtgcaaggtgaccggcgggtaagttggtgccggcgggttgggcaggcccggcgggttctacccttccggcgggtggtcgactcggaccgatg

SEQ ID NO: 15233 - DNA, 203 bp, Artificial sequence
  synthetic
ggcgcgccagtcctgtttaagacactgacacaactgtgttcactagcaacctcaaacagacaccatggtgcatctgactcctgaggccggcgggtccgttactgccggcgggtgcaaggtgaccggcgggtaagttggtgccggcgggttgggcaggcccggcgggttctacccttccggcgggtggtcgactcggaccgatg

SEQ ID NO: 15234 - DNA, 203 bp, Artificial sequence
  synthetic
ggcgcgccagtcctcgacttaaagctgacacaactgtgttcactagcaacctcaaacagacaccatggtgcatctgactcctgaggccggcgggtccgttactgccggcgggtgcaaggtgaccggcgggtaagttggtgccggcgggttgggcaggcccggcgggttctacccttccggcgggtggtcgactcggaccgatg

SEQ ID NO: 15235 - DNA, 203 bp, Artificial sequence
  synthetic
ggcgcgccagtcctcttaaagtttctgacacaactgtgttcactagcaacctcaaacagacaccatggtgcatctgactcctgaggccggcgggtccgttactgccggcgggtgcaaggtgaccggcgggtaagttggtgccggcgggttgggcaggcccggcgggttctacccttccggcgggtggtcgactcggaccgatg

SEQ ID NO: 15236 - DNA, 203 bp, Artificial sequence
  synthetic
ggcgcgccagtcctatgctgcagactgacacaactgtgttcactagcaacctcaaacagacaccatggtgcatctgactcctgaggccggcggtaccgttactgccggcggtagcaaggtgaccggcggtaaagttggtgccggcggtatgggcaggcccggcggtatctacccttggacccagaggtcgactcggaccgatg

SEQ ID NO: 15237 - DNA, 203 bp, Artificial sequence
  synthetic
ggcgcgccagtcctgaatgtccaactgacacaactgtgttcactagcaacctcaaacagacaccatggtgcatctgactcctgaggccggcggtcccgttactgccggcggtcgcaaggtgaccggcggtcaagttggtgccggcggtctgggcaggcccggcggtctctacccttggacccagaggtcgactcggaccgatg

SEQ ID NO: 15238 - DNA, 203 bp, Artificial sequence
  synthetic
ggcgcgccagtcctcacgaaaggtctgacacaactgtgttcactagcaacctcaaacagacaccatggtgcatctgactcctgaggccggcgtctccgttactgccggcgtctgcaaggtgaccggcgtctaagttggtgccggcgtcttgggcaggcccggcgtcttctacccttggacccagaggtcgactcggaccgatg

SEQ ID NO: 15239 - DNA, 203 bp, Artificial sequence
  synthetic
ggcgcgccagtcctaatcacgaaactgacacaactgtgttcactagcaacctcaaacagacaccatggtgcatctgactcctgaggccggcgtgtccgttactgccggcgtgtgcaaggtgaccggcgtgtaagttggtgccggcgtgttgggcaggcccggcgtgttctacccttggacccagaggtcgactcggaccgatg

SEQ ID NO: 15240 - DNA, 203 bp, Artificial sequence
  synthetic
ggcgcgccagtcctgactttcgtgctgacacaactgtgttcactagcaacctcaaacagacaccatggtgcatctgactcctgaggccggcgtttccgttactgccggcgtttgcaaggtgaccggcgtttaagttggtgccggcgttttgggcaggcccggcgttttctacccttggacccagaggtcgactcggaccgatg

SEQ ID NO: 15241 - DNA, 203 bp, Artificial sequence
  synthetic
ggcgcgccagtcctcgatttcgtgctgacacaactgtgttcactagcaacctcaaacagacaccatggtgcatctgactcctgaggccggctggtccgttactgccggctggtgcaaggtgaccggctggtaagttggtgccggctggttgggcaggcccggctggttctacccttggacccagaggtcgactcggaccgatg

SEQ ID NO: 15242 - DNA, 203 bp, Artificial sequence
  synthetic
ggcgcgccagtcctacctggatcactgacacaactgtgttcactagcaacctcaaacagacaccatggtgcatctgactcctgaggccggggggtccgttactgccggggggtgcaaggtgaccggggggtaagttggtgccggggggttgggcaggcccggggggttctacccttggacccagaggtcgactcggaccgatg

SEQ ID NO: 15243 - DNA, 203 bp, Artificial sequence
  synthetic
ggcgcgccagtcctcttacatgtcctgacacaactgtgttcactagcaacctcaaacagacaccatggtgcatctgactcctgaggcctacgggtccgttactgcctacgggtgcaaggtgacctacgggtaagttggtgcctacgggttgggcaggccctacgggttctacccttggacccagaggtcgactcggaccgatg

SEQ ID NO: 15244 - DNA, 203 bp, Artificial sequence
  synthetic
ggcgcgccagtccttcttacatgcctgacacaactgtgttcactagcaacctcaaacagacaccatggtgcatctgactcctgaggcctcaattcctttaactgcctcaattcctttagtgacctcaattcctttaggtgcctcaattcctttaaggccctcaattcctttaccttggacccagaggtcgactcggaccgatg

SEQ ID NO: 15245 - DNA, 203 bp, Artificial sequence
  synthetic
ggcgcgccagtcctttacagatcactgacacaactgtgttcactagcaacctcaaacagacaccatggtgcatctgactcctgaggcctgcgggtccgttactgcctgcgggtgcaaggtgacctgcgggtaagttggtgcctgcgggttgggcaggccctgcgggttctacccttggacccagaggtcgactcggaccgatg

SEQ ID NO: 15246 - DNA, 203 bp, Artificial sequence
  synthetic
ggcgcgccagtccttctacagatcctgacacaactgtgttcactagcaacctcaaacagacaccatggtgcatctgactcctgaggccttcgggtccgttactgccttcgggtgcaaggtgaccttcgggtaagttggtgccttcgggttgggcaggcccttcgggttctacccttggacccagaggtcgactcggaccgatg

SEQ ID NO: 15247 - DNA, 203 bp, Artificial sequence
  synthetic
ggcgcgccagtcctagcattgcccctgacacaactgtgttcactagcaacctcaaacagacaccatggtgcatctgactcctgaggcgacaattcctttaactgcgacaattcctttagtgacgacaattcctttaggtgcgacaattcctttaaggccgacaattcctttaccttggacccagaggtcgactcggaccgatg

SEQ ID NO: 15248 - DNA, 203 bp, Artificial sequence
  synthetic
ggcgcgccagtcctgaagtactgtctgacacaactgtgttcactagcaacctcaaacagacaccatggtgcatctgactcctgaggcgcggaatcgagaaactgcgcggaatcgagaagtgacgcggaatcgagaaggtgcgcggaatcgagaaaggccgcggaatcgagaaccttggacccagaggtcgactcggaccgatg

SEQ ID NO: 15249 - DNA, 203 bp, Artificial sequence
  synthetic
ggcgcgccagtccttaggtgtagtctgacacaactgtgttcactagcaacctcaaacagacaccatggtgcatctgactcctgaggcgctccctgccgttactgcgctcccgggcaaggtgacgctccctgaagttggtgcgctccccctgggcaggccgctcccggtctacccttggacccagaggtcgactcggaccgatg

SEQ ID NO: 15250 - DNA, 203 bp, Artificial sequence
  synthetic
ggcgcgccagtcctgcttacacctctgacacaactgtgttcactagcaacctcaaacagacaccatggtgcatctgactcctgaggcgcttggcaaagttactgcgcttggcaaaaaggtgacgcttggcaaagttggtgcgcttggcaaaggcaggccgcttggcaaatacccttggacccagaggtcgactcggaccgatg

SEQ ID NO: 15251 - DNA, 203 bp, Artificial sequence
  synthetic
ggcgcgccagtcctgcatatgtggctgacacaactgtgttcactagcaacctcaaacagacaccatggtgcatctgactcctgaggcgtcaaagcctttaactgcgtcaaagcctttagtgacgtcaaagcctttaggtgcgtcaaagcctttaaggccgtcaaagcctttaccttggacccagaggtcgactcggaccgatg

SEQ ID NO: 15252 - DNA, 203 bp, Artificial sequence
  synthetic
ggcgcgccagtcctgatatcttacctgacacaactgtgttcactagcaacctcaaacagacaccatggtgcatctgactcctgaggcgtcaaatcctttaactgcgtcaaatcctttagtgacgtcaaatcctttaggtgcgtcaaatcctttaaggccgtcaaatcctttaccttggacccagaggtcgactcggaccgatg

SEQ ID NO: 15253 - DNA, 203 bp, Artificial sequence
  synthetic
ggcgcgccagtcctggcagaatatctgacacaactgtgttcactagcaacctcaaacagacaccatggtgcatctgactcctgaggcgtcaacacctttaactgcgtcaacacctttagtgacgtcaacacctttaggtgcgtcaacacctttaaggccgtcaacacctttaccttggacccagaggtcgactcggaccgatg

SEQ ID NO: 15254 - DNA, 203 bp, Artificial sequence
  synthetic
ggcgcgccagtcctatatcgtgccctgacacaactgtgttcactagcaacctcaaacagacaccatggtgcatctgactcctgaggcgtcaacccctttaactgcgtcaacccctttagtgacgtcaacccctttaggtgcgtcaacccctttaaggccgtcaacccctttaccttggacccagaggtcgactcggaccgatg

SEQ ID NO: 15255 - DNA, 203 bp, Artificial sequence
  synthetic
ggcgcgccagtcctgaatattgccctgacacaactgtgttcactagcaacctcaaacagacaccatggtgcatctgactcctgaggcgtcaacgcctttaactgcgtcaacgcctttagtgacgtcaacgcctttaggtgcgtcaacgcctttaaggccgtcaacgcctttaccttggacccagaggtcgactcggaccgatg

SEQ ID NO: 15256 - DNA, 203 bp, Artificial sequence
  synthetic
ggcgcgccagtccttgcatatcccctgacacaactgtgttcactagcaacctcaaacagacaccatggtgcatctgactcctgaggcgtcaagacctttaactgcgtcaagacctttagtgacgtcaagacctttaggtgcgtcaagacctttaaggccgtcaagacctttaccttggacccagaggtcgactcggaccgatg

SEQ ID NO: 15257 - DNA, 203 bp, Artificial sequence
  synthetic
ggcgcgccagtccttacaatatgcctgacacaactgtgttcactagcaacctcaaacagacaccatggtgcatctgactcctgaggcgtcaaggcctttaactgcgtcaaggcctttagtgacgtcaaggcctttaggtgcgtcaaggcctttaaggccgtcaaggcctttaccttggacccagaggtcgactcggaccgatg

SEQ ID NO: 15258 - DNA, 203 bp, Artificial sequence
  synthetic
ggcgcgccagtcctgatatgcgaactgacacaactgtgttcactagcaacctcaaacagacaccatggtgcatctgactcctgaggcgtcaatacctttaactgcgtcaatacctttagtgacgtcaatacctttaggtgcgtcaatacctttaaggccgtcaatacctttaccttggacccagaggtcgactcggaccgatg

SEQ ID NO: 15259 - DNA, 203 bp, Artificial sequence
  synthetic
ggcgcgccagtccttctcatattgctgacacaactgtgttcactagcaacctcaaacagacaccatggtgcatctgactcctgaggcgtcaatccctttaactgcgtcaatccctttagtgacgtcaatccctttaggtgcgtcaatccctttaaggccgtcaatccctttaccttggacccagaggtcgactcggaccgatg

SEQ ID NO: 15260 - DNA, 203 bp, Artificial sequence
  synthetic
ggcgcgccagtcctaggatattgtctgacacaactgtgttcactagcaacctcaaacagacaccatggtgcatctgactcctgaggcgtcaattccgataactgcgtcaattccgatagtgacgtcaattccgataggtgcgtcaattccgataaggccgtcaattccgataccttggacccagaggtcgactcggaccgatg

SEQ ID NO: 15261 - DNA, 203 bp, Artificial sequence
  synthetic
ggcgcgccagtcctaccgcatatcctgacacaactgtgttcactagcaacctcaaacagacaccatggtgcatctgactcctgaggcgtcaattccgttaactgcgtcaattccgttagtgacgtcaattccgttaggtgcgtcaattccgttaaggccgtcaattccgttaccttggacccagaggtcgactcggaccgatg

SEQ ID NO: 15262 - DNA, 203 bp, Artificial sequence
  synthetic
ggcgcgccagtcctcgatattcacctgacacaactgtgttcactagcaacctcaaacagacaccatggtgcatctgactcctgaggcgtcaattccttaaactgcgtcaattccttaagtgacgtcaattccttaaggtgcgtcaattccttaaaggccgtcaattccttaaccttggacccagaggtcgactcggaccgatg

SEQ ID NO: 15263 - DNA, 203 bp, Artificial sequence
  synthetic
ggcgcgccagtcctatatcttaacctgacacaactgtgttcactagcaacctcaaacagacaccatggtgcatctgactcctgaggcgtcaattccttacactgcgtcaattccttacgtgacgtcaattccttacggtgcgtcaattccttacaggccgtcaattccttacccttggacccagaggtcgactcggaccgatg

SEQ ID NO: 15264 - DNA, 203 bp, Artificial sequence
  synthetic
ggcgcgccagtcctgggatatccactgacacaactgtgttcactagcaacctcaaacagacaccatggtgcatctgactcctgaggcgtcaattccttgcactgcgtcaattccttgcgtgacgtcaattccttgcggtgcgtcaattccttgcaggccgtcaattccttgcccttggacccagaggtcgactcggaccgatg

SEQ ID NO: 15265 - DNA, 203 bp, Artificial sequence
  synthetic
ggcgcgccagtccttacacatattctgacacaactgtgttcactagcaacctcaaacagacaccatggtgcatctgactcctgaggcgtcaattccttgtactgcgtcaattccttgtgtgacgtcaattccttgtggtgcgtcaattccttgtaggccgtcaattccttgtccttggacccagaggtcgactcggaccgatg

SEQ ID NO: 15266 - DNA, 203 bp, Artificial sequence
  synthetic
ggcgcgccagtcctctgcatatccctgacacaactgtgttcactagcaacctcaaacagacaccatggtgcatctgactcctgaggcgtcaattcctttaactgccctgtggggcaaggtgaacgtggatgaagttggtgcgtcaattcctttaaggccgtcaattcctttaccttggacccagaggtcgactcggaccgatg

SEQ ID NO: 15267 - DNA, 203 bp, Artificial sequence
  synthetic
ggcgcgccagtccttcgatatcgtctgacacaactgtgttcactagcaacctcaaacagacaccatggtgcatctgactcctgaggcgtcaattcctttaactgccctgtggggcaaggtgaacgtggatgaagttggtgcgtcaattcctttaaggctgctggtggtctacccttggacccagaggtcgactcggaccgatg

SEQ ID NO: 15268 - DNA, 203 bp, Artificial sequence
  synthetic
ggcgcgccagtcctatatctacttctgacacaactgtgttcactagcaacctcaaacagacaccatggtgcatctgactcctgaggcgtcaattcctttaactgccctgtggggcaaggtgacgtcaattcctttaggtggtgaggccctgggcaggctgctggtggtctacccttggacccagaggtcgactcggaccgatg

SEQ ID NO: 15269 - DNA, 203 bp, Artificial sequence
  synthetic
ggcgcgccagtcctatatgttctcctgacacaactgtgttcactagcaacctcaaacagacaccatggtgcatctgactcctgaggcgtcaattcctttaactgcgtcaattcctttagtgaacgtggatgaagttggtgcgtcaattcctttaaggccgtcaattcctttaccttggacccagaggtcgactcggaccgatg

SEQ ID NO: 15270 - DNA, 203 bp, Artificial sequence
  synthetic
ggcgcgccagtcctcggcactggactgacacaactgtgttcactagcaacctcaaacagacaccatggtgcatctgactcctgaggcgtcaattcctttcactgcgtcaattcctttcgtgacgtcaattcctttcggtgcgtcaattcctttcaggccgtcaattcctttcccttggacccagaggtcgactcggaccgatg

SEQ ID NO: 15271 - DNA, 203 bp, Artificial sequence
  synthetic
ggcgcgccagtcctcggcagtcccctgacacaactgtgttcactagcaacctcaaacagacaccatggtgcatctgactcctgaggcgtcaattccttttactgcgtcaattccttttgtgacgtcaattccttttggtgcgtcaattccttttaggccgtcaattccttttccttggacccagaggtcgactcggaccgatg

SEQ ID NO: 15272 - DNA, 203 bp, Artificial sequence
  synthetic
ggcgcgccagtcctcgtaacaggtctgacacaactgtgttcactagcaacctcaaacagacaccatggtgcatctgactcctgaggcgtcaattcgtttaactgcgtcaattcgtttagtgacgtcaattcgtttaggtgcgtcaattcgtttaaggccgtcaattcgtttaccttggacccagaggtcgactcggaccgatg

SEQ ID NO: 15273 - DNA, 203 bp, Artificial sequence
  synthetic
ggcgcgccagtcctagtcgatctgctgacacaactgtgttcactagcaacctcaaacagacaccatggtgcatctgactcctgaggcgtcaattgctttaactgcgtcaattgctttagtgacgtcaattgctttaggtgcgtcaattgctttaaggccgtcaattgctttaccttggacccagaggtcgactcggaccgatg

SEQ ID NO: 15274 - DNA, 203 bp, Artificial sequence
  synthetic
ggcgcgccagtcctaagtcgatctctgacacaactgtgttcactagcaacctcaaacagacaccatggtgcatctgactcctgaggcgtcaattggtttaactgcgtcaattggtttagtgacgtcaattggtttaggtgcgtcaattggtttaaggccgtcaattggtttaccttggacccagaggtcgactcggaccgatg

SEQ ID NO: 15275 - DNA, 203 bp, Artificial sequence
  synthetic
ggcgcgccagtcctcccgatcgacctgacacaactgtgttcactagcaacctcaaacagacaccatggtgcatctgactcctgaggcgtcaattgttttaactgcgtcaattgttttagtgacgtcaattgttttaggtgcgtcaattgttttaaggccgtcaattgttttaccttggacccagaggtcgactcggaccgatg

SEQ ID NO: 15276 - DNA, 203 bp, Artificial sequence
  synthetic
ggcgcgccagtccttgcgatattgctgacacaactgtgttcactagcaacctcaaacagacaccatggtgcatctgactcctgaggcgtcccttcctttaactgcgtcccttcctttagtgacgtcccttcctttaggtgcgtcccttcctttaaggccgtcccttcctttaccttggacccagaggtcgactcggaccgatg

SEQ ID NO: 15277 - DNA, 203 bp, Artificial sequence
  synthetic
ggcgcgccagtcctggtgcgatcgctgacacaactgtgttcactagcaacctcaaacagacaccatggtgcatctgactcctgaggcgtcctttcctttaactgcgtcctttcctttagtgacgtcctttcctttaggtgcgtcctttcctttaaggccgtcctttcctttaccttggacccagaggtcgactcggaccgatg

SEQ ID NO: 15278 - DNA, 203 bp, Artificial sequence
  synthetic
ggcgcgccagtcctaaaggcgattctgacacaactgtgttcactagcaacctcaaacagacaccatggtgcatctgactcctgaggcgtcgtttcctttaactgcgtcgtttcctttagtgacgtcgtttcctttaggtgcgtcgtttcctttaaggccgtcgtttcctttaccttggacccagaggtcgactcggaccgatg

SEQ ID NO: 15279 - DNA, 203 bp, Artificial sequence
  synthetic
ggcgcgccagtcctctagcgattgctgacacaactgtgttcactagcaacctcaaacagacaccatggtgcatctgactcctgaggcgtctattcctttaactgcgtctattcctttagtgacgtctattcctttaggtgcgtctattcctttaaggccgtctattcctttaccttggacccagaggtcgactcggaccgatg

SEQ ID NO: 15280 - DNA, 203 bp, Artificial sequence
  synthetic
ggcgcgccagtcctatcgctcgtgctgacacaactgtgttcactagcaacctcaaacagacaccatggtgcatctgactcctgaggcgttaattcctttaactgcgttaattcctttagtgacgttaattcctttaggtgcgttaattcctttaaggccgttaattcctttaccttggacccagaggtcgactcggaccgatg

SEQ ID NO: 15281 - DNA, 203 bp, Artificial sequence
  synthetic
ggcgcgccagtcctctgatcgccgctgacacaactgtgttcactagcaacctcaaacagacaccatggtgcatctgactcctgaggctcggccgtccgttactgctcggccgtgcaaggtgactcggccgtaagttggtgctcggccgttgggcaggcctcggccgttctacccttggacccagaggtcgactcggaccgatg

SEQ ID NO: 15282 - DNA, 203 bp, Artificial sequence
  synthetic
ggcgcgccagtccttgatcgcagactgacacaactgtgttcactagcaacctcaaacagacaccatggtgcatctgactcctgagggacggccgtccgttactggacggccgtgcaaggtgagacggccgtaagttggtggacggccgttgggcaggcgacggccgttctacccttggacccagaggtcgactcggaccgatg

SEQ ID NO: 15283 - DNA, 203 bp, Artificial sequence
  synthetic
ggcgcgccagtcctagcgtaggtgctgacacaactgtgttcactagcaacctcaaacagacaccatggtgcatctgactcctgagggatcaattcctttaactggatcaattcctttagtgagatcaattcctttaggtggatcaattcctttaaggcgatcaattcctttaccttggacccagaggtcgactcggaccgatg

SEQ ID NO: 15284 - DNA, 203 bp, Artificial sequence
  synthetic
ggcgcgccagtcctaactgcgtagctgacacaactgtgttcactagcaacctcaaacagacaccatggtgcatctgactcctgagggccggccgtccgttactggccggccgtgcaaggtgagccggccgtaagttggtggccggccgttgggcaggcgccggccgttctacccttggacccagaggtcgactcggaccgatg

SEQ ID NO: 15285 - DNA, 203 bp, Artificial sequence
  synthetic
ggcgcgccagtcctggcgtagcttctgacacaactgtgttcactagcaacctcaaacagacaccatggtgcatctgactcctgagggcggcgggtccgttactggcggcgggtgcaaggtgagcggcgggtaagttggtggcggcgggttgggcaggcgcggcgggttctacccttggacccagaggtcgactcggaccgatg

SEQ ID NO: 15286 - DNA, 203 bp, Artificial sequence
  synthetic
ggcgcgccagtccttgcgtagtaactgacacaactgtgttcactagcaacctcaaacagacaccatggtgcatctgactcctgaggggcggccgtccgttactgggcggccgtgcaaggtgaggcggccgtaagttggtgggcggccgttgggcaggcggcggccgttctacccttggacccagaggtcgactcggaccgatg

SEQ ID NO: 15287 - DNA, 203 bp, Artificial sequence
  synthetic
ggcgcgccagtcctcaaattcaacctgacacaactgtgttcactagcaacctcaaacagacaccatggtgcatctgactcctgagggtcggaatcgagaaactggtcggaatcgagaagtgagtcggaatcgagaaggtggtcggaatcgagaaaggcgtcggaatcgagaaccttggacccagaggtcgactcggaccgatg

SEQ ID NO: 15288 - DNA, 203 bp, Artificial sequence
  synthetic
ggcgcgccagtcctgcgtgttgtcctgacacaactgtgttcactagcaacctcaaacagacaccatggtgcatctgactcctgagggtcggccgtccgttactggtcggccgtgcaaggtgagtcggccgtaagttggtggtcggccgttgggcaggcgtcggccgttctacccttggacccagaggtcgactcggaccgatg

SEQ ID NO: 15289 - DNA, 203 bp, Artificial sequence
  synthetic
ggcgcgccagtcctgcgtgttagactgacacaactgtgttcactagcaacctcaaacagacaccatggtgcatctgactcctgagggtcttggcaaagttactggtcttggcaaaaaggtgagtcttggcaaagttggtggtcttggcaaaggcaggcgtcttggcaaatacccttggacccagaggtcgactcggaccgatg

SEQ ID NO: 15290 - DNA, 203 bp, Artificial sequence
  synthetic
ggcgcgccagtcctcctgggcgtcctgacacaactgtgttcactagcaacctcaaacagacaccatggtgcatctgactcctgaggtaccccctgccgttactgtacccccgggcaaggtgataccccctgaagttggtgtaccccccctgggcaggctacccccggtctacccttggacccagaggtcgactcggaccgatg

SEQ ID NO: 15291 - DNA, 203 bp, Artificial sequence
  synthetic
ggcgcgccagtccttcttgggccgctgacacaactgtgttcactagcaacctcaaacagacaccatggtgcatctgactcctgaggtacggccgtccgttactgtacggccgtgcaaggtgatacggccgtaagttggtgtacggccgttgggcaggctacggccgttctacccttggacccagaggtcgactcggaccgatg

SEQ ID NO: 15292 - DNA, 203 bp, Artificial sequence
  synthetic
ggcgcgccagtcctaagagcccaactgacacaactgtgttcactagcaacctcaaacagacaccatggtgcatctgactcctgaggtactcaatgccgttactgtactcaagggcaaggtgatactcaatgaagttggtgtactcaacctgggcaggctactcaaggtctacccttggacccagaggtcgactcggaccgatg

SEQ ID NO: 15293 - DNA, 203 bp, Artificial sequence
  synthetic
ggcgcgccagtcctcgttgggccactgacacaactgtgttcactagcaacctcaaacagacaccatggtgcatctgactcctgaggtactcagtgccgttactgtactcaggggcaaggtgatactcagtgaagttggtgtactcagcctgggcaggctactcagggtctacccttggacccagaggtcgactcggaccgatg

SEQ ID NO: 15294 - DNA, 203 bp, Artificial sequence
  synthetic
ggcgcgccagtcctttgcccatgactgacacaactgtgttcactagcaacctcaaacagacaccatggtgcatctgactcctgaggtactccatgccgttactgtactccagggcaaggtgatactccatgaagttggtgtactccacctgggcaggctactccaggtctacccttggacccagaggtcgactcggaccgatg

SEQ ID NO: 15295 - DNA, 203 bp, Artificial sequence
  synthetic
ggcgcgccagtcctgagcccatatctgacacaactgtgttcactagcaacctcaaacagacaccatggtgcatctgactcctgaggtactccctgccgttactgccctgtggggcaaggtgaacgtggatgaagttggtggtgaggccctgggcaggctactcccggtctaccctttactcccgaggtcgactcggaccgatg

SEQ ID NO: 15296 - DNA, 203 bp, Artificial sequence
  synthetic
ggcgcgccagtcctacgcccaaatctgacacaactgtgttcactagcaacctcaaacagacaccatggtgcatctgactcctgaggtactccctgccgttactgccctgtggggcaaggtgaacgtggatgaagttggtggtgaggccctgggcaggctgctggtggtctaccctttactcccgaggtcgactcggaccgatg

SEQ ID NO: 15297 - DNA, 203 bp, Artificial sequence
  synthetic
ggcgcgccagtccttgaactgggcctgacacaactgtgttcactagcaacctcaaacagacaccatggtgcatctgactcctgaggtactccctgccgttactgccctgtggggcaaggtgaacgtggatgaagttggtgtactccccctgggcaggctactcccggtctacccttggacccagaggtcgactcggaccgatg

SEQ ID NO: 15298 - DNA, 203 bp, Artificial sequence
  synthetic
ggcgcgccagtcctgctcagcccactgacacaactgtgttcactagcaacctcaaacagacaccatggtgcatctgactcctgaggtactccctgccgttactgccctgtggggcaaggtgaacgtggatgaagttggtgtactccccctgggcaggctgctggtggtctaccctttactcccgaggtcgactcggaccgatg

SEQ ID NO: 15299 - DNA, 203 bp, Artificial sequence
  synthetic
ggcgcgccagtcctactactgggcctgacacaactgtgttcactagcaacctcaaacagacaccatggtgcatctgactcctgaggtactccctgccgttactgccctgtggggcaaggtgatactccctgaagttggtggtgaggccctgggcaggctactcccggtctacccttggacccagaggtcgactcggaccgatg

SEQ ID NO: 15300 - DNA, 203 bp, Artificial sequence
  synthetic
ggcgcgccagtcctatatgcccagctgacacaactgtgttcactagcaacctcaaacagacaccatggtgcatctgactcctgaggtactccctgccgttactgccctgtggggcaaggtgatactccctgaagttggtggtgaggccctgggcaggctgctggtggtctacccttggacccagaggtcgactcggaccgatg

SEQ ID NO: 15301 - DNA, 203 bp, Artificial sequence
  synthetic
ggcgcgccagtccttgtttgcccactgacacaactgtgttcactagcaacctcaaacagacaccatggtgcatctgactcctgaggtactccctgccgttactgccctgtggggcaaggtgatactccctgaagttggtgtactccccctgggcaggctgctggtggtctacccttggacccagaggtcgactcggaccgatg

SEQ ID NO: 15302 - DNA, 203 bp, Artificial sequence
  synthetic
ggcgcgccagtccttcatgggcatctgacacaactgtgttcactagcaacctcaaacagacaccatggtgcatctgactcctgaggtactccctgccgttactgtactcccgggcaaggtgaacgtggatgaagttggtggtgaggccctgggcaggctactcccggtctaccctttactcccgaggtcgactcggaccgatg

SEQ ID NO: 15303 - DNA, 203 bp, Artificial sequence
  synthetic
ggcgcgccagtccttgaatgggcactgacacaactgtgttcactagcaacctcaaacagacaccatggtgcatctgactcctgaggtactccctgccgttactgtactcccgggcaaggtgaacgtggatgaagttggtgtactccccctgggcaggctactcccggtctacccttggacccagaggtcgactcggaccgatg

SEQ ID NO: 15304 - DNA, 203 bp, Artificial sequence
  synthetic
ggcgcgccagtcctgtagcccatgctgacacaactgtgttcactagcaacctcaaacagacaccatggtgcatctgactcctgaggtactccctgccgttactgtactcccgggcaaggtgaacgtggatgaagttggtgtactccccctgggcaggctactcccggtctaccctttactcccgaggtcgactcggaccgatg

SEQ ID NO: 15305 - DNA, 203 bp, Artificial sequence
  synthetic
ggcgcgccagtcctctgggcctgtctgacacaactgtgttcactagcaacctcaaacagacaccatggtgcatctgactcctgaggtactccctgccgttactgtactcccgggcaaggtgaacgtggatgaagttggtgtactccccctgggcaggctgctggtggtctacccttggacccagaggtcgactcggaccgatg

SEQ ID NO: 15306 - DNA, 203 bp, Artificial sequence
  synthetic
ggcgcgccagtcctgctgcccaagctgacacaactgtgttcactagcaacctcaaacagacaccatggtgcatctgactcctgaggtactccctgccgttactgtactcccgggcaaggtgaacgtggatgaagttggtgtactccccctgggcaggctgctggtggtctaccctttactcccgaggtcgactcggaccgatg

SEQ ID NO: 15307 - DNA, 203 bp, Artificial sequence
  synthetic
ggcgcgccagtcctactaagattcctgacacaactgtgttcactagcaacctcaaacagacaccatggtgcatctgactcctgaggtactccctgccgttactgtactcccgggcaaggtgatactccctgaagttggtggtgaggccctgggcaggctactcccggtctaccctttactcccgaggtcgactcggaccgatg

SEQ ID NO: 15308 - DNA, 203 bp, Artificial sequence
  synthetic
ggcgcgccagtcctcgactaaggcctgacacaactgtgttcactagcaacctcaaacagacaccatggtgcatctgactcctgaggtactccctgccgttactgtactcccgggcaaggtgatactccctgaagttggtgtactccccctgggcaggctactcccggtctacccttggacccagaggtcgactcggaccgatg

SEQ ID NO: 15309 - DNA, 203 bp, Artificial sequence
  synthetic
ggcgcgccagtcctgctactaagcctgacacaactgtgttcactagcaacctcaaacagacaccatggtgcatctgactcctgaggtactccctgccgttactgtactcccgggcaaggtgatactccctgaagttggtgtactccccctgggcaggctgctggtggtctacccttggacccagaggtcgactcggaccgatg

SEQ ID NO: 15310 - DNA, 203 bp, Artificial sequence
  synthetic
ggcgcgccagtcctcttagttgcgctgacacaactgtgttcactagcaacctcaaacagacaccatggtgcatctgactcctgaggtactccgtgccgttactgtactccggggcaaggtgatactccgtgaagttggtgtactccgcctgggcaggctactccgggtctacccttggacccagaggtcgactcggaccgatg

SEQ ID NO: 15311 - DNA, 203 bp, Artificial sequence
  synthetic
ggcgcgccagtcctttcttagtgactgacacaactgtgttcactagcaacctcaaacagacaccatggtgcatctgactcctgaggtactccttgccgttactgtactcctgggcaaggtgatactccttgaagttggtgtactcctcctgggcaggctactcctggtctacccttggacccagaggtcgactcggaccgatg

SEQ ID NO: 15312 - DNA, 203 bp, Artificial sequence
  synthetic
ggcgcgccagtcctcttagtgtatctgacacaactgtgttcactagcaacctcaaacagacaccatggtgcatctgactcctgaggtactctctgccgttactgtactctcgggcaaggtgatactctctgaagttggtgtactctccctgggcaggctactctcggtctacccttggacccagaggtcgactcggaccgatg

SEQ ID NO: 15313 - DNA, 203 bp, Artificial sequence
  synthetic
ggcgcgccagtcctagctttgacgctgacacaactgtgttcactagcaacctcaaacagacaccatggtgcatctgactcctgaggtactggctgccgttactgtactggcgggcaaggtgatactggctgaagttggtgtactggccctgggcaggctactggcggtctacccttggacccagaggtcgactcggaccgatg

SEQ ID NO: 15314 - DNA, 203 bp, Artificial sequence
  synthetic
ggcgcgccagtcctcttgcttttgctgacacaactgtgttcactagcaacctcaaacagacaccatggtgcatctgactcctgaggtacttactgccgttactgtacttacgggcaaggtgatacttactgaagttggtgtacttaccctgggcaggctacttacggtctacccttggacccagaggtcgactcggaccgatg

SEQ ID NO: 15315 - DNA, 203 bp, Artificial sequence
  synthetic
ggcgcgccagtcctcaaggtgtccctgacacaactgtgttcactagcaacctcaaacagacaccatggtgcatctgactcctgaggtacttcctgccgttactgtacttccgggcaaggtgatacttcctgaagttggtgtacttcccctgggcaggctacttccggtctacccttggacccagaggtcgactcggaccgatg

SEQ ID NO: 15316 - DNA, 203 bp, Artificial sequence
  synthetic
ggcgcgccagtcctgcgcttgcgactgacacaactgtgttcactagcaacctcaaacagacaccatggtgcatctgactcctgaggtactttctgccgttactgtactttcgggcaaggtgatactttctgaagttggtgtactttccctgggcaggctactttcggtctacccttggacccagaggtcgactcggaccgatg

SEQ ID NO: 15317 - DNA, 203 bp, Artificial sequence
  synthetic
ggcgcgccagtccttagaagcgctctgacacaactgtgttcactagcaacctcaaacagacaccatggtgcatctgactcctgaggtagcccctgccgttactgtagccccgggcaaggtgatagcccctgaagttggtgtagcccccctgggcaggctagccccggtctacccttggacccagaggtcgactcggaccgatg

SEQ ID NO: 15318 - DNA, 203 bp, Artificial sequence
  synthetic
ggcgcgccagtcctagtcaagcgcctgacacaactgtgttcactagcaacctcaaacagacaccatggtgcatctgactcctgaggtaggccctgccgttactgtaggcccgggcaaggtgataggccctgaagttggtgtaggccccctgggcaggctaggcccggtctacccttggacccagaggtcgactcggaccgatg

SEQ ID NO: 15319 - DNA, 203 bp, Artificial sequence
  synthetic
ggcgcgccagtcctcccgaagcgcctgacacaactgtgttcactagcaacctcaaacagacaccatggtgcatctgactcctgaggtagtccctgccgttactgtagtcccgggcaaggtgatagtccctgaagttggtgtagtccccctgggcaggctagtcccggtctacccttggacccagaggtcgactcggaccgatg

SEQ ID NO: 15320 - DNA, 203 bp, Artificial sequence
  synthetic
ggcgcgccagtcctttgcgatcttctgacacaactgtgttcactagcaacctcaaacagacaccatggtgcatctgactcctgaggtataccctgccgttactgtatacccgggcaaggtgatataccctgaagttggtgtataccccctgggcaggctatacccggtctacccttggacccagaggtcgactcggaccgatg

SEQ ID NO: 15321 - DNA, 203 bp, Artificial sequence
  synthetic
ggcgcgccagtcctcgagcctcaactgacacaactgtgttcactagcaacctcaaacagacaccatggtgcatctgactcctgaggtatcaattcctttaactgtatcaattcctttagtgatatcaattcctttaggtgtatcaattcctttaaggctatcaattcctttaccttggacccagaggtcgactcggaccgatg

SEQ ID NO: 15322 - DNA, 203 bp, Artificial sequence
  synthetic
ggcgcgccagtcctcctgacgtccctgacacaactgtgttcactagcaacctcaaacagacaccatggtgcatctgactcctgaggtatcccctgccgttactgtatccccgggcaaggtgatatcccctgaagttggtgtatcccccctgggcaggctatccccggtctacccttggacccagaggtcgactcggaccgatg

SEQ ID NO: 15323 - DNA, 203 bp, Artificial sequence
  synthetic
ggcgcgccagtccttatgaccatgctgacacaactgtgttcactagcaacctcaaacagacaccatggtgcatctgactcctgaggtatgccctgccgttactgtatgcccgggcaaggtgatatgccctgaagttggtgtatgccccctgggcaggctatgcccggtctacccttggacccagaggtcgactcggaccgatg

SEQ ID NO: 15324 - DNA, 203 bp, Artificial sequence
  synthetic
ggcgcgccagtcctttggacgtggctgacacaactgtgttcactagcaacctcaaacagacaccatggtgcatctgactcctgaggtccggccgtccgttactgtccggccgtgcaaggtgatccggccgtaagttggtgtccggccgttgggcaggctccggccgttctacccttggacccagaggtcgactcggaccgatg

SEQ ID NO: 15325 - DNA, 203 bp, Artificial sequence
  synthetic
ggcgcgccagtccttccacgtccactgacacaactgtgttcactagcaacctcaaacagacaccatggtgcatctgactcctgaggtcctccctgccgttactgtcctcccgggcaaggtgatcctccctgaagttggtgtcctccccctgggcaggctcctcccggtctacccttggacccagaggtcgactcggaccgatg

SEQ ID NO: 15326 - DNA, 203 bp, Artificial sequence
  synthetic
ggcgcgccagtccttcgtcggtacctgacacaactgtgttcactagcaacctcaaacagacaccatggtgcatctgactcctgaggtgcggaatcgagaaactgtgcggaatcgagaagtgatgcggaatcgagaaggtgtgcggaatcgagaaaggctgcggaatcgagaaccttggacccagaggtcgactcggaccgatg

SEQ ID NO: 15327 - DNA, 203 bp, Artificial sequence
  synthetic
ggcgcgccagtccttaccgatccactgacacaactgtgttcactagcaacctcaaacagacaccatggtgcatctgactcctgaggtgcttggcaaagttactgtgcttggcaaaaaggtgatgcttggcaaagttggtgtgcttggcaaaggcaggctgcttggcaaatacccttggacccagaggtcgactcggaccgatg

SEQ ID NO: 15328 - DNA, 203 bp, Artificial sequence
  synthetic
ggcgcgccagtcctgtaccgaaatctgacacaactgtgttcactagcaacctcaaacagacaccatggtgcatctgactcctgaggtgtcaattcctttaactgtgtcaattcctttagtgatgtcaattcctttaggtgtgtcaattcctttaaggctgtcaattcctttaccttggacccagaggtcgactcggaccgatg

SEQ ID NO: 15329 - DNA, 203 bp, Artificial sequence
  synthetic
ggcgcgccagtcctaataccgaacctgacacaactgtgttcactagcaacctcaaacagacaccatggtgcatctgactcctgaggttactggcaaagttactgttactggcaaaaaggtgattactggcaaagttggtgttactggcaaaggcaggcttactggcaaatacccttggacccagaggtcgactcggaccgatg

SEQ ID NO: 15330 - DNA, 203 bp, Artificial sequence
  synthetic
ggcgcgccagtcctcgtgcaccatctgacacaactgtgttcactagcaacctcaaacagacaccatggtgcatctgactcctgaggttcgtggcaaagttactgttcgtggcaaaaaggtgattcgtggcaaagttggtgttcgtggcaaaggcaggcttcgtggcaaatacccttggacccagaggtcgactcggaccgatg

SEQ ID NO: 15331 - DNA, 203 bp, Artificial sequence
  synthetic
ggcgcgccagtcctacgttgaacgctgacacaactgtgttcactagcaacctcaaacagacaccatggtgcatctgactcctgaggttctaagcaaagttactgttctaagcaaaaaggtgattctaagcaaagttggtgttctaagcaaaggcaggcttctaagcaaatacccttggacccagaggtcgactcggaccgatg

SEQ ID NO: 15332 - DNA, 203 bp, Artificial sequence
  synthetic
ggcgcgccagtccttgggtgtgaactgacacaactgtgttcactagcaacctcaaacagacaccatggtgcatctgactcctgaggttctatgcaaagttactgttctatgcaaaaaggtgattctatgcaaagttggtgttctatgcaaaggcaggcttctatgcaaatacccttggacccagaggtcgactcggaccgatg

SEQ ID NO: 15333 - DNA, 203 bp, Artificial sequence
  synthetic
ggcgcgccagtcctatgggtgtcgctgacacaactgtgttcactagcaacctcaaacagacaccatggtgcatctgactcctgaggttctcagcaaagttactgttctcagcaaaaaggtgattctcagcaaagttggtgttctcagcaaaggcaggcttctcagcaaatacccttggacccagaggtcgactcggaccgatg

SEQ ID NO: 15334 - DNA, 203 bp, Artificial sequence
  synthetic
ggcgcgccagtccttactgacgtactgacacaactgtgttcactagcaacctcaaacagacaccatggtgcatctgactcctgaggttctccctgccgttactgttctcccgggcaaggtgattctccctgaagttggtgttctccccctgggcaggcttctcccggtctacccttggacccagaggtcgactcggaccgatg

SEQ ID NO: 15335 - DNA, 203 bp, Artificial sequence
  synthetic
ggcgcgccagtcctgctacattttctgacacaactgtgttcactagcaacctcaaacagacaccatggtgcatctgactcctgaggttctccgcaaagttactgttctccgcaaaaaggtgattctccgcaaagttggtgttctccgcaaaggcaggcttctccgcaaatacccttggacccagaggtcgactcggaccgatg

SEQ ID NO: 15336 - DNA, 203 bp, Artificial sequence
  synthetic
ggcgcgccagtcctcagatccagcctgacacaactgtgttcactagcaacctcaaacagacaccatggtgcatctgactcctgaggttctcgattccgtgactgttctcgattccgtggtgattctcgattccgtgggtgttctcgattccgtgaggcttctcgattccgtgccttggacccagaggtcgactcggaccgatg

SEQ ID NO: 15337 - DNA, 203 bp, Artificial sequence
  synthetic
ggcgcgccagtcctgtgacagcaactgacacaactgtgttcactagcaacctcaaacagacaccatggtgcatctgactcctgaggttctgggcaaagttactgttctgggcaaaaaggtgattctgggcaaagttggtgttctgggcaaaggcaggcttctgggcaaatacccttggacccagaggtcgactcggaccgatg

SEQ ID NO: 15338 - DNA, 203 bp, Artificial sequence
  synthetic
ggcgcgccagtccttgtctggaccctgacacaactgtgttcactagcaacctcaaacagacaccatggtgcatctgactcctgaggttcttagcaaagttactgttcttagcaaaaaggtgattcttagcaaagttggtgttcttagcaaaggcaggcttcttagcaaatacccttggacccagaggtcgactcggaccgatg

SEQ ID NO: 15339 - DNA, 203 bp, Artificial sequence
  synthetic
ggcgcgccagtccttcgcccaggtctgacacaactgtgttcactagcaacctcaaacagacaccatggtgcatctgactcctgaggttcttcgcaaagttactgttcttcgcaaaaaggtgattcttcgcaaagttggtgttcttcgcaaaggcaggcttcttcgcaaatacccttggacccagaggtcgactcggaccgatg

SEQ ID NO: 15340 - DNA, 203 bp, Artificial sequence
  synthetic
ggcgcgccagtcctttcgcccaagctgacacaactgtgttcactagcaacctcaaacagacaccatggtgcatctgactcctgaggttcttgacaaagttactgttcttgacaaaaaggtgattcttgacaaagttggtgttcttgacaaaggcaggcttcttgacaaatacccttggacccagaggtcgactcggaccgatg

SEQ ID NO: 15341 - DNA, 203 bp, Artificial sequence
  synthetic
ggcgcgccagtcctcaggtcgcccctgacacaactgtgttcactagcaacctcaaacagacaccatggtgcatctgactcctgaggttcttgagaaagttactgttcttgagaaaaaggtgattcttgagaaagttggtgttcttgagaaaggcaggcttcttgagaaatacccttggacccagaggtcgactcggaccgatg

SEQ ID NO: 15342 - DNA, 203 bp, Artificial sequence
  synthetic
ggcgcgccagtccttgggcgatcactgacacaactgtgttcactagcaacctcaaacagacaccatggtgcatctgactcctgaggttcttgcgaaagttactgttcttgcgaaaaaggtgattcttgcgaaagttggtgttcttgcgaaaggcaggcttcttgcgaaatacccttggacccagaggtcgactcggaccgatg

SEQ ID NO: 15343 - DNA, 203 bp, Artificial sequence
  synthetic
ggcgcgccagtcctcgaccacaatctgacacaactgtgttcactagcaacctcaaacagacaccatggtgcatctgactcctgaggttcttggcaaagttactgccctgtggggcaaggtgaacgtggatgaagttggtggtgaggccctgggcaggctgctggtggtctaccccacggaatcgagaacgactcggaccgatg

SEQ ID NO: 15344 - DNA, 203 bp, Artificial sequence
  synthetic
ggcgcgccagtcctcaccacaatgctgacacaactgtgttcactagcaacctcaaacagacaccatggtgcatctgactcctgaggttcttggcaaagttactgccctgtggggcaaggtgaacgtggatgaagttggtggtgaggccctgggcaggctgctggtggtctaccccgtcaattcctttacgactcggaccgatg

SEQ ID NO: 15345 - DNA, 203 bp, Artificial sequence
  synthetic
ggcgcgccagtccttcacccgaaactgacacaactgtgttcactagcaacctcaaacagacaccatggtgcatctgactcctgaggttcttggcaaagttactgccctgtggggcaaggtgaacgtggatgaagttggtggtgaggccctgggcaggctgctggtggtctacccttggacccagaggtcgactcggaccgatg

SEQ ID NO: 15346 - DNA, 203 bp, Artificial sequence
  synthetic
ggcgcgccagtcctactacgggtactgacacaactgtgttcactagcaacctcaaacagacaccatggtgcatctgactcctgaggttcttggcaaagttactgccctgtggggcaaggtgaacgtggatgaagttggtggtgaggccctgggcaggctgctggtggtctacccttggacctactccccgactcggaccgatg

SEQ ID NO: 15347 - DNA, 203 bp, Artificial sequence
  synthetic
ggcgcgccagtcctaacgggttaactgacacaactgtgttcactagcaacctcaaacagacaccatggtgcatctgactcctgaggttcttggcaaagttactgccctgtggggcaaggtgattcttggcaaagttggtgttcttggcaaaggcaggctgctggtggtctacccttggacccagaggtcgactcggaccgatg

SEQ ID NO: 15348 - DNA, 203 bp, Artificial sequence
  synthetic
ggcgcgccagtcctacccgtcagcctgacacaactgtgttcactagcaacctcaaacagacaccatggtgcatctgactcctgaggttcttggcaaagttactgttcttggcaaaaaggtgaacgtggatgaagttggtggtgaggccctgggcaggcttcttggcaaatacccttggacccagaggtcgactcggaccgatg

SEQ ID NO: 15349 - DNA, 203 bp, Artificial sequence
  synthetic
ggcgcgccagtcctcgtcgggtttctgacacaactgtgttcactagcaacctcaaacagacaccatggtgcatctgactcctgaggttcttggcaaagttactgttcttggcaaaaaggtgattcttggcaaagttggtggtgaggccctgggcaggctgctggtggtctacccttggacccagaggtcgactcggaccgatg

SEQ ID NO: 15350 - DNA, 203 bp, Artificial sequence
  synthetic
ggcgcgccagtcctgaaacccgtgctgacacaactgtgttcactagcaacctcaaacagacaccatggtgcatctgactcctgaggttcttggcaaagttactgttcttggcaaaaaggtgattcttggcaaagttggtggtgaggccctgggcaggcttcttggcaaatacccttggacccagaggtcgactcggaccgatg

SEQ ID NO: 15351 - DNA, 203 bp, Artificial sequence
  synthetic
ggcgcgccagtcctgcgacccgtactgacacaactgtgttcactagcaacctcaaacagacaccatggtgcatctgactcctgaggttcttggcaaagttactgttcttggcaaaaaggtgattcttggcaaagttggtgttcttggcaaaggcaggctgctggtggtctacccttggacccagaggtcgactcggaccgatg

SEQ ID NO: 15352 - DNA, 203 bp, Artificial sequence
  synthetic
ggcgcgccagtcctccttcgggtgctgacacaactgtgttcactagcaacctcaaacagacaccatggtgcatctgactcctgaggttcttggcaaggttactgttcttggcaagaaggtgattcttggcaaggttggtgttcttggcaagggcaggcttcttggcaagtacccttggacccagaggtcgactcggaccgatg

SEQ ID NO: 15353 - DNA, 203 bp, Artificial sequence
  synthetic
ggcgcgccagtcctaaacgggtttctgacacaactgtgttcactagcaacctcaaacagacaccatggtgcatctgactcctgaggttcttggcacagttactgttcttggcacaaaggtgattcttggcacagttggtgttcttggcacaggcaggcttcttggcacatacccttggacccagaggtcgactcggaccgatg

SEQ ID NO: 15354 - DNA, 203 bp, Artificial sequence
  synthetic
ggcgcgccagtcctcacccgtactctgacacaactgtgttcactagcaacctcaaacagacaccatggtgcatctgactcctgaggttcttggcaccgttactgttcttggcaccaaggtgattcttggcaccgttggtgttcttggcaccggcaggcttcttggcacctacccttggacccagaggtcgactcggaccgatg

SEQ ID NO: 15355 - DNA, 203 bp, Artificial sequence
  synthetic
ggcgcgccagtcctgtaacgggtcctgacacaactgtgttcactagcaacctcaaacagacaccatggtgcatctgactcctgaggttcttggcactgttactgttcttggcactaaggtgattcttggcactgttggtgttcttggcactggcaggcttcttggcacttacccttggacccagaggtcgactcggaccgatg

SEQ ID NO: 15356 - DNA, 203 bp, Artificial sequence
  synthetic
ggcgcgccagtcctgtttcgggtactgacacaactgtgttcactagcaacctcaaacagacaccatggtgcatctgactcctgaggttcttggcagagttactgttcttggcagaaaggtgattcttggcagagttggtgttcttggcagaggcaggcttcttggcagatacccttggacccagaggtcgactcggaccgatg

SEQ ID NO: 15357 - DNA, 203 bp, Artificial sequence
  synthetic
ggcgcgccagtcctacccgaaatcctgacacaactgtgttcactagcaacctcaaacagacaccatggtgcatctgactcctgaggttcttggcagggttactgttcttggcaggaaggtgattcttggcagggttggtgttcttggcaggggcaggcttcttggcaggtacccttggacccagaggtcgactcggaccgatg

SEQ ID NO: 15358 - DNA, 203 bp, Artificial sequence
  synthetic
ggcgcgccagtcctttgatctggactgacacaactgtgttcactagcaacctcaaacagacaccatggtgcatctgactcctgaggttcttggcatagttactgttcttggcataaaggtgattcttggcatagttggtgttcttggcataggcaggcttcttggcatatacccttggacccagaggtcgactcggaccgatg

SEQ ID NO: 15359 - DNA, 203 bp, Artificial sequence
  synthetic
ggcgcgccagtcctcggtacgtagctgacacaactgtgttcactagcaacctcaaacagacaccatggtgcatctgactcctgaggttcttggccaagttactgttcttggccaaaaggtgattcttggccaagttggtgttcttggccaaggcaggcttcttggccaatacccttggacccagaggtcgactcggaccgatg

SEQ ID NO: 15360 - DNA, 203 bp, Artificial sequence
  synthetic
ggcgcgccagtcctcggcatacacctgacacaactgtgttcactagcaacctcaaacagacaccatggtgcatctgactcctgaggttcttggcccagttactgttcttggcccaaaggtgattcttggcccagttggtgttcttggcccaggcaggcttcttggcccatacccttggacccagaggtcgactcggaccgatg

SEQ ID NO: 15361 - DNA, 203 bp, Artificial sequence
  synthetic
ggcgcgccagtcctgtgtaagccgctgacacaactgtgttcactagcaacctcaaacagacaccatggtgcatctgactcctgaggttcttggcgcagttactgttcttggcgcaaaggtgattcttggcgcagttggtgttcttggcgcaggcaggcttcttggcgcatacccttggacccagaggtcgactcggaccgatg

SEQ ID NO: 15362 - DNA, 203 bp, Artificial sequence
  synthetic
ggcgcgccagtcctcggttgtccactgacacaactgtgttcactagcaacctcaaacagacaccatggtgcatctgactcctgaggttcttggcggagttactgttcttggcggaaaggtgattcttggcggagttggtgttcttggcggaggcaggcttcttggcggatacccttggacccagaggtcgactcggaccgatg

SEQ ID NO: 15363 - DNA, 203 bp, Artificial sequence
  synthetic
ggcgcgccagtcctcggctaaccactgacacaactgtgttcactagcaacctcaaacagacaccatggtgcatctgactcctgaggttcttggctcagttactgttcttggctcaaaggtgattcttggctcagttggtgttcttggctcaggcaggcttcttggctcatacccttggacccagaggtcgactcggaccgatg

SEQ ID NO: 15364 - DNA, 203 bp, Artificial sequence
  synthetic
ggcgcgccagtcctcggttggtctctgacacaactgtgttcactagcaacctcaaacagacaccatggtgcatctgactcctgaggttcttgggaaagttactgttcttgggaaaaaggtgattcttgggaaagttggtgttcttgggaaaggcaggcttcttgggaaatacccttggacccagaggtcgactcggaccgatg

SEQ ID NO: 15365 - DNA, 203 bp, Artificial sequence
  synthetic
ggcgcgccagtccttgcaacaccgctgacacaactgtgttcactagcaacctcaaacagacaccatggtgcatctgactcctgaggttcttggtaaagttactgttcttggtaaaaaggtgattcttggtaaagttggtgttcttggtaaaggcaggcttcttggtaaatacccttggacccagaggtcgactcggaccgatg

SEQ ID NO: 15366 - DNA, 203 bp, Artificial sequence
  synthetic
ggcgcgccagtcctcggcgtagtactgacacaactgtgttcactagcaacctcaaacagacaccatggtgcatctgactcctgaggttcttgttaaagttactgttcttgttaaaaaggtgattcttgttaaagttggtgttcttgttaaaggcaggcttcttgttaaatacccttggacccagaggtcgactcggaccgatg

SEQ ID NO: 15367 - DNA, 203 bp, Artificial sequence
  synthetic
ggcgcgccagtcctaaaaccgccgctgacacaactgtgttcactagcaacctcaaacagacaccatggtgcatctgactcctgaggtttatggcaaagttactgtttatggcaaaaaggtgatttatggcaaagttggtgtttatggcaaaggcaggctttatggcaaatacccttggacccagaggtcgactcggaccgatg

SEQ ID NO: 15368 - DNA, 203 bp, Artificial sequence
  synthetic
ggcgcgccagtcctttagacgtaactgacacaactgtgttcactagcaacctcaaacagacaccatggtgcatctgactcctgaggtttgccaagaagttactgtttgccaagaaaaggtgatttgccaagaagttggtgtttgccaagaaggcaggctttgccaagaatacccttggacccagaggtcgactcggaccgatg

SEQ ID NO: 15369 - DNA, 203 bp, Artificial sequence
  synthetic
ggcgcgccagtcctcgacgtaagactgacacaactgtgttcactagcaacctcaaacagacaccatggtgcatctgactcctgaggtttgtggcaaagttactgtttgtggcaaaaaggtgatttgtggcaaagttggtgtttgtggcaaaggcaggctttgtggcaaatacccttggacccagaggtcgactcggaccgatg

SEQ ID NO: 15370 - DNA, 203 bp, Artificial sequence
  synthetic
ggcgcgccagtcctcgtaggacatctgacacaactgtgttcactagcaacctcaaacagacaccatggtgcatctgactcctgattcctttaagtttcagctttgcaaccatactccccccggaacccaaagactttggtttcccgccctgggcaggctgctggtggtctacccttggacccagaggtcgactcggaccgatg

SEQ ID NO: 15371 - DNA, 203 bp, Artificial sequence
  synthetic
ggcgcgccagtcctccaagatcggctgacacaactgtgttcactagcaacctcaaacagacaccatggtgcatctgactcctgattcttggcaaaccgttactgccctgtggggcaaggtgaacgtggatgaagttggtggtgaggccctgggcaggctgctggtggtctacccttggaccggcgggtcgactcggaccgatg

SEQ ID NO: 15372 - DNA, 203 bp, Artificial sequence
  synthetic
ggcgcgccagtcctgcagtatcggctgacacaactgtgttcactagcaacctcaaacagacaccatggtgcatctgactcctgcacggaatcgagaagttactgccctgtggggcaaggtgaacgtggatgaagttggtggtgaggccctgggcaggctgctggtggtctacccttggacctactccccgactcggaccgatg

SEQ ID NO: 15373 - DNA, 203 bp, Artificial sequence
  synthetic
ggcgcgccagtcctcagcggtcggctgacacaactgtgttcactagcaacctcaaacagacaccatggtgcatctgactcctgcgtcaattcctttagttactgccctgtggggcaaggtgaacgtggatgaagttggtggtgaggccctgggcaggctgctggtggtctaccccgtcaattcctttacgactcggaccgatg

SEQ ID NO: 15374 - DNA, 203 bp, Artificial sequence
  synthetic
ggcgcgccagtcctgaatgatcggctgacacaactgtgttcactagcaacctcaaacagacaccatggtgcatctgactcctggctccactcctggtggtgcccttccgtcaattcctttaagtttcagctttgcaaccatactccccctgggcaggctgctggtggtctacccttggacccagaggtcgactcggaccgatg

SEQ ID NO: 15375 - DNA, 203 bp, Artificial sequence
  synthetic
ggcgcgccagtcctttactctcggctgacacaactgtgttcactagcaacctcaaacagacaccatggtgcatctgactcctggctccactcctggtggtgcccttccgtcaattcctttaagtttcagctttgcaaccatactcgccctgggcaggctgctggtggtctacccttggacccagaggtcgactcggaccgatg

SEQ ID NO: 15376 - DNA, 203 bp, Artificial sequence
  synthetic
ggcgcgccagtcctagaacgtcggctgacacaactgtgttcactagcaacctcaaacagacaccatggtgcatctgactcctgtactcccgtctgccgttactgccctgtggggcaaggtgaacgtggatgaagttggtggtgaggccctgggcaggctgctggtggtctaccccacggaatcgagaacgactcggaccgatg

SEQ ID NO: 15377 - DNA, 203 bp, Artificial sequence
  synthetic
ggcgcgccagtcctgacacctcggctgacacaactgtgttcactagcaacctcaaacagacaccatggtgcatctgactcctgtactcccgtctgccgttactgccctgtggggcaaggtgaacgtggatgaagttggtggtgaggccctgggcaggctgctggtggtctacccttggacccagaggtcgactcggaccgatg

SEQ ID NO: 15378 - DNA, 203 bp, Artificial sequence
  synthetic
ggcgcgccagtcctccgatcaacgctgacacaactgtgttcactagcaacctcaaacagacaccatggtgcatctgactttcttggcaaagtctgccgttactgccctgtggggcaaggtgaacgtggatgaagttggtggtgaggccctgggcaggctgctggtggtctaccccgtcaattcctttacgactcggaccgatg

SEQ ID NO: 15379 - DNA, 203 bp, Artificial sequence
  synthetic
ggcgcgccagtcctccgaagttgtctgacacaactgtgttcactagcaacctcaaacagacaccatggtgcatctgactttcttggcaaagtctgccgttactgccctgtggggcaaggtgaacgtggatgaagttggtggtgaggccctgggcaggctgctggtggtctacccttggacccagaggtcgactcggaccgatg

SEQ ID NO: 15380 - DNA, 203 bp, Artificial sequence
  synthetic
ggcgcgccagtcctccgacccgagctgacacaactgtgttcactagcaacctcaaacagacaccatggtgcatctgactttcttggcaaagtctgccgttactgccctgtggggcaaggtgaacgtggatgaagttggtggtgaggccctgggcaggctgctggtggtctacccttggacctactccccgactcggaccgatg

SEQ ID NO: 15381 - DNA, 203 bp, Artificial sequence
  synthetic
ggcgcgccagtcctgctggtgaacctgacacaactgtgttcactagcaacctcaaacagacaccatggtgcatctgcacggaatcgagaagtctgccgttactgccctgtggggcaaggtgaacgtggatgaagttggtggtgaggccctgggcaggctgctggtggtctaccccgtcaattcctttacgactcggaccgatg

SEQ ID NO: 15382 - DNA, 203 bp, Artificial sequence
  synthetic
ggcgcgccagtccttaaatccaggctgacacaactgtgttcactagcaacctcaaacagacaccatggtgcatctgcacggaatcgagaagtctgccgttactgccctgtggggcaaggtgaacgtggatgaagttggtggtgaggccctgggcaggctgctggtggtctacccttggacctactccccgactcggaccgatg

SEQ ID NO: 15383 - DNA, 203 bp, Artificial sequence
  synthetic
ggcgcgccagtcctactaggacgcctgacacaactgtgttcactagcaacctcaaacagacaccatggtgcatctgcgtcaattcctttagtctgccgttactgccctgtggggcaaggtgaacgtggatgaagttggtggtgaggccctgggcaggctgctggtggtctaccccacggaatcgagaacgactcggaccgatg

SEQ ID NO: 15384 - DNA, 203 bp, Artificial sequence
  synthetic
ggcgcgccagtcctactggacgcactgacacaactgtgttcactagcaacctcaaacagacaccatggtgcatctgcgtcaattcctttagtctgccgttactgccctgtggggcaaggtgaacgtggatgaagttggtggtgaggccctgggcaggctgctggtggtctaccccgtcaattcctttacgactcggaccgatg

SEQ ID NO: 15385 - DNA, 203 bp, Artificial sequence
  synthetic
ggcgcgccagtccttggacgctaactgacacaactgtgttcactagcaacctcaaacagacaccatggtgcatctgcgtcaattcctttagtctgccgttactgccctgtggggcaaggtgaacgtggatgaagttggtggtgaggccctgggcaggctgctggtggtctacccttggacccagaggtcgactcggaccgatg

SEQ ID NO: 15386 - DNA, 203 bp, Artificial sequence
  synthetic
ggcgcgccagtcctgcgtcccagactgacacaactgtgttcactagcaacctcaaacagacaccatggtgcatctgtactcccaggagaagtctgccgttactgccctgtggggcaaggtgaacgtggatgaagttggtggtgaggccctgggcaggctgctggtggtctacccttggacctactccccgactcggaccgatg

SEQ ID NO: 15387 - DNA, 203 bp, Artificial sequence
  synthetic
ggcgcgccagtcctggatccaagactgacacaactgtgttcactagcaacctcaaacagacaccatggtgcattaagccgcaggctccactcctggtggtgcccttccgtcaattcctttaagtttcagctttgcaaccatactccccccggaacccctgctggtggtctacccttggacccagaggtcgactcggaccgatg

SEQ ID NO: 15388 - DNA, 203 bp, Artificial sequence
  synthetic
ggcgcgccagtcctatacccgagcctgacacaactgtgttcactagcaacctcaaacagacaccatggtgcgcccttccgtcaattcctttaagtttcagctttgcaaccatactccccccggaacccaaagactttggtttcccggaagctgcccgctgctggtggtctacccttggacccagaggtcgactcggaccgatg

SEQ ID NO: 15389 - DNA, 203 bp, Artificial sequence
  synthetic
ggcgcgccagtccttcacgcttcgctgacacaactgtgttcactagcaacctcaaacagacaccatggtgtgcccttccgtcaattcctttaagtttcagctttgcaaccatactccccccggaacccaaagactttggtttcccggaagctgcccggcgctggtggtctacccttggacccagaggtcgactcggaccgatg

SEQ ID NO: 15390 - DNA, 203 bp, Artificial sequence
  synthetic
ggcgcgccagtcctatcacgcttgctgacacaactgtgttcactagcaacctcaaacagacaccatggtgttcttggcaaatgaggagaagtctgccgttactgccctgtggggcaaggtgaacgtggatgaagttggtggtgaggccctgggcaggctgctggtggtctacccttggaccggcgggtcgactcggaccgatg

SEQ ID NO: 15391 - DNA, 203 bp, Artificial sequence
  synthetic
ggcgcgccagtcctccgaggttcgctgacacaactgtgttcactagcaacctcaaacagacaccatggttcttggcaaacctgaggagaagtctgccgttactgccctgtggggcaaggtgaacgtggatgaagttggtggtgaggccctgggcaggctgctggtggtctacccttgttcttggcaaacgactcggaccgatg

SEQ ID NO: 15392 - DNA, 203 bp, Artificial sequence
  synthetic
ggcgcgccagtccttgtagaacacctgacacaactgtgttcactagcaacctcaaacagacaccatggttcttggcaaacctgaggagaagtctgccgttactgccctgtggggcaaggtgaacgtggatgaagttggtgttcttggcaaaggcaggcttcttggcaaatacccttggacccagaggtcgactcggaccgatg

SEQ ID NO: 15393 - DNA, 203 bp, Artificial sequence
  synthetic
ggcgcgccagtcctcagagatcacctgacacaactgtgttcactagcaacctcaaacagacaccatggttcttggcaaacctgaggagaagtctgccgttactgccctgtggggcaaggtgattcttggcaaagttggtggtgaggccctgggcaggctgctggtggtctacccttggacccagaggtcgactcggaccgatg

SEQ ID NO: 15394 - DNA, 203 bp, Artificial sequence
  synthetic
ggcgcgccagtcctgaaatgctcgctgacacaactgtgttcactagcaacctcaaacagacaccatggttcttggcaaacctgaggagaagtctgccgttactgccctgtggggcaaggtgattcttggcaaagttggtggtgaggccctgggcaggcttcttggcaaatacccttggacccagaggtcgactcggaccgatg

SEQ ID NO: 15395 - DNA, 203 bp, Artificial sequence
  synthetic
ggcgcgccagtcctacgaaatgctctgacacaactgtgttcactagcaacctcaaacagacaccatggttcttggcaaacctgaggagaagtctgccgttactgccctgtggggcaaggtgattcttggcaaagttggtgttcttggcaaaggcaggctgctggtggtctacccttggacccagaggtcgactcggaccgatg

SEQ ID NO: 15396 - DNA, 203 bp, Artificial sequence
  synthetic
ggcgcgccagtcctacagcccagcctgacacaactgtgttcactagcaacctcaaacagacaccatggttcttggcaaacctgaggagaagtctgccgttactgttcttggcaaaaaggtgattcttggcaaagttggtggtgaggccctgggcaggctgctggtggtctacccttggacccagaggtcgactcggaccgatg

SEQ ID NO: 15397 - DNA, 203 bp, Artificial sequence
  synthetic
ggcgcgccagtcctcacctaccctctgacacaactgtgttcactagcaacctcaaacagacaccatggttcttggcaaacctgaggagaagtctgccgttactgttcttggcaaaaaggtgattcttggcaaagttggtgttcttggcaaaggcaggcttcttggcaaatacccttggacccagaggtcgactcggaccgatg

SEQ ID NO: 15398 - DNA, 203 bp, Artificial sequence
  synthetic
ggcgcgccagtcctcaaccctgcactgacacaactgtgttcactagcaacctcaaacagacaccatggttcttggcaaacctgaggttcttggcaaagttactgccctgtggggcaaggtgattcttggcaaagttggtggtgaggccctgggcaggctgctggtggtctacccttggacccagaggtcgactcggaccgatg

SEQ ID NO: 15399 - DNA, 203 bp, Artificial sequence
  synthetic
ggcgcgccagtcctagggtgctgcctgacacaactgtgttcactagcaacctcaaacagacaccatggttcttggcaaacctgaggttcttggcaaagttactgttcttggcaaaaaggtgaacgtggatgaagttggtggtgaggccctgggcaggctgctggtggtctacccttggacccagaggtcgactcggaccgatg

SEQ ID NO: 15400 - DNA, 203 bp, Artificial sequence
  synthetic
ggcgcgccagtcctaactttagggctgacacaactgtgttcactagcaacctcaaacagacaccatggttcttggcaaacctgaggttcttggcaaagttactgttcttggcaaaaaggtgaacgtggatgaagttggtggtgaggccctgggcaggcttcttggcaaatacccttggacccagaggtcgactcggaccgatg

SEQ ID NO: 15401 - DNA, 203 bp, Artificial sequence
  synthetic
ggcgcgccagtcctccctaagttactgacacaactgtgttcactagcaacctcaaacagacaccatggttcttggcaaacctgaggttcttggcaaagttactgttcttggcaaaaaggtgattcttggcaaagttggtggtgaggccctgggcaggcttcttggcaaatacccttggacccagaggtcgactcggaccgatg

SEQ ID NO: 15402 - DNA, 203 bp, Artificial sequence
  synthetic
ggcgcgccagtccttgtctgagggctgacacaactgtgttcactagcaacctcaaacagacaccatgtactccccccggaacccaaagactttggtttcccggaagctgcccggcgggtcatgggaataacgccgccgcatcgccggtcggcatcgtttattggtggtctacccttggacccagaggtcgactcggaccgatg

SEQ ID NO: 15403 - DNA, 203 bp, Artificial sequence
  synthetic
ggcgcgccagtcctttgcgtagggctgacacaactgtgttcactagcaacctcaaacagacaccatgtactccctgactcctgaggagaagtctgccgttactgccctgtggggcaaggtgaacgtggatgaagttggtggtgaggccctgggcaggctgctggtggtctacccttggaccggcgggtcgactcggaccgatg

SEQ ID NO: 15404 - DNA, 203 bp, Artificial sequence
  synthetic
ggcgcgccagtcctaagggtatctctgacacaactgtgttcactagcaacctcaaacagacaccatgtcaaattaagccgcaggctccactcctggtggtgcccttccgtcaattcctttaagtttcagctttgcaaccatactccccccggaacccaaagaggtggtctacccttggacccagaggtcgactcggaccgatg

SEQ ID NO: 15405 - DNA, 203 bp, Artificial sequence
  synthetic
ggcgcgccagtcctagagggtcatctgacacaactgtgttcactagcaacctcaaacagacaccatgtcaaattaagccgcaggctccactcctggtggtgcccttccgtcaattcctttaagtttcagctttgcaaccatactccccccggaacccaaagtggtggtctacccttggacccagaggtcgactcggaccgatg

SEQ ID NO: 15406 - DNA, 203 bp, Artificial sequence
  synthetic
ggcgcgccagtcctgcagagggttctgacacaactgtgttcactagcaacctcaaacagacaccatgtggtgcccttccgtcaattcctttaagtttcagctttgcaaccatactccccccggaacccaaagactttggtttcccggaagctgcccggcgggggtggtctacccttggacccagaggtcgactcggaccgatg

SEQ ID NO: 15407 - DNA, 203 bp, Artificial sequence
  synthetic
ggcgcgccagtcctccgagggtgcctgacacaactgtgttcactagcaacctcaaacagacacgtcaattcctttaactcctgaggagaagtctgccgttactgccctgtggggcaaggtgaacgtggatgaagttggtggtgaggccctgggcaggctgctggtggtctaccccacggaatcgagaacgactcggaccgatg

SEQ ID NO: 15408 - DNA, 203 bp, Artificial sequence
  synthetic
ggcgcgccagtcctcagtcccttcctgacacaactgtgttcactagcaacctcaaacagacacgtcaattcctttaactcctgaggagaagtctgccgttactgccctgtggggcaaggtgaacgtggatgaagttggtggtgaggccctgggcaggctgctggtggtctaccccgtcaattcctttacgactcggaccgatg

SEQ ID NO: 15409 - DNA, 203 bp, Artificial sequence
  synthetic
ggcgcgccagtccttagggttgtactgacacaactgtgttcactagcaacctcaaacagacacttcttggcaaatgactcctgaggagaagtctgccgttactgccctgtggggcaaggtgaacgtggatgaagttggtggtgaggccctgggcaggctgctggtggtctacccttggaccggcgggtcgactcggaccgatg

SEQ ID NO: 15410 - DNA, 203 bp, Artificial sequence
  synthetic
ggcgcgccagtcctggtcccttggctgacacaactgtgttcactagcaacctcaaacagacatactcccgcatctgactcctgaggagaagtctgccgttactgccctgtggggcaaggtgaacgtggatgaagttggtggtgaggccctgggcaggctgctggtggtctaccccacggaatcgagaacgactcggaccgatg

SEQ ID NO: 15411 - DNA, 203 bp, Artificial sequence
  synthetic
ggcgcgccagtccttagggactgactgacacaactgtgttcactagcaacctcaaacagacatactcccgcatctgactcctgaggagaagtctgccgttactgccctgtggggcaaggtgaacgtggatgaagttggtggtgaggccctgggcaggctgctggtggtctacccttggacccagaggtcgactcggaccgatg

SEQ ID NO: 15412 - DNA, 203 bp, Artificial sequence
  synthetic
ggcgcgccagtcctggtctaccctctgacacaactgtgttcactagcaacctcaaacagaccaaccatactccccccggaacccaaagactttggtttcccggaagctgcccggcgggtcatgggaataacgccgccgcatcgccggtcggcatcgtttatggtcggtctacccttggacccagaggtcgactcggaccgatg

SEQ ID NO: 15413 - DNA, 203 bp, Artificial sequence
  synthetic
ggcgcgccagtccttgctagagggctgacacaactgtgttcactagcaacctcaaacagaccggcgggtgcatctgactcctgaggagaagtctgccgttactgccctgtggggcaaggtgaacgtggatgaagttggtggtgaggccctgggcaggctgctggtggtctaccccgtcaattcctttacgactcggaccgatg

SEQ ID NO: 15414 - DNA, 203 bp, Artificial sequence
  synthetic
ggcgcgccagtcctccctcgcacactgacacaactgtgttcactagcaacctcaaacagaccggcgggtgcatctgactcctgaggagaagtctgccgttactgccctgtggggcaaggtgaacgtggatgaagttggtggtgaggccctgggcaggctgctggtggtctacccttggacccagaggtcgactcggaccgatg

SEQ ID NO: 15415 - DNA, 203 bp, Artificial sequence
  synthetic
ggcgcgccagtcctctaccgagggctgacacaactgtgttcactagcaacctcaaacagaccggcgggtgcatctgactcctgaggagaagtctgccgttactgccctgtggggcaaggtgaacgtggatgaagttggtggtgaggccctgggcaggctgctggtggtctacccttggacctactccccgactcggaccgatg

SEQ ID NO: 15416 - DNA, 203 bp, Artificial sequence
  synthetic
ggcgcgccagtcctcccttaaagactgacacaactgtgttcactagcaacctcaaacagacgtcaattcctttatgactcctgaggagaagtctgccgttactgccctgtggggcaaggtgaacgtggatgaagttggtggtgaggccctgggcaggctgctggtggtctacccttggaccggcgggtcgactcggaccgatg

SEQ ID NO: 15417 - DNA, 203 bp, Artificial sequence
  synthetic
ggcgcgccagtcctccctagtaagctgacacaactgtgttcactagcaacctcaaacagacgttgagtcaaattaagccgcaggctccactcctggtggtgcccttccgtcaattcctttaagtttcagctttgcaaccatactccccccggaacccaaagactttgtctacccttggacccagaggtcgactcggaccgatg

SEQ ID NO: 15418 - DNA, 203 bp, Artificial sequence
  synthetic
ggcgcgccagtcctcagggtgcttctgacacaactgtgttcactagcaacctcaaacagagcaaccatactccccccggaacccaaagactttggtttcccggaagctgcccggcgggtcatgggaataacgccgccgcatcgccggtcggcatcgtttatggtcggactacccttggacccagaggtcgactcggaccgatg

SEQ ID NO: 15419 - DNA, 203 bp, Artificial sequence
  synthetic
ggcgcgccagtcctacgtagggatctgacacaactgtgttcactagcaacctcaaacaggcgaccaaaggaaccataactgatttaatgagccattcgcagtttcactgtaccggccgtgcgtactcagacatgcatggcttaatctttgagacaagcatatgctactgtacccttggacccagaggtcgactcggaccgatg

SEQ ID NO: 15420 - DNA, 203 bp, Artificial sequence
  synthetic
ggcgcgccagtcctgagaaaccctctgacacaactgtgttcactagcaacctcaaacattcttggcaaagcatctgactcctgaggagaagtctgccgttactgccctgtggggcaaggtgaacgtggatgaagttggtggtgaggccctgggcaggctgctggtggtctaccccgtcaattcctttacgactcggaccgatg

SEQ ID NO: 15421 - DNA, 203 bp, Artificial sequence
  synthetic
ggcgcgccagtcctccctgttaggctgacacaactgtgttcactagcaacctcaaacattcttggcaaagcatctgactcctgaggagaagtctgccgttactgccctgtggggcaaggtgaacgtggatgaagttggtggtgaggccctgggcaggctgctggtggtctacccttggacccagaggtcgactcggaccgatg

SEQ ID NO: 15422 - DNA, 203 bp, Artificial sequence
  synthetic
ggcgcgccagtcctagggacagtcctgacacaactgtgttcactagcaacctcaaacattcttggcaaagcatctgactcctgaggagaagtctgccgttactgccctgtggggcaaggtgaacgtggatgaagttggtggtgaggccctgggcaggctgctggtggtctacccttggacctactccccgactcggaccgatg

SEQ ID NO: 15423 - DNA, 203 bp, Artificial sequence
  synthetic
ggcgcgccagtccttccctactgactgacacaactgtgttcactagcaacctcaaacccgtgttgagtcaaattaagccgcaggctccactcctggtggtgcccttccgtcaattcctttaagtttcagctttgcaaccatactccccccggaacccaaagactttggtttcccttggacccagaggtcgactcggaccgatg

SEQ ID NO: 15424 - DNA, 203 bp, Artificial sequence
  synthetic
ggcgcgccagtcctccctacgcatctgacacaactgtgttcactagcaacctcaaacgagcgaccaaaggaaccataactgatttaatgagccattcgcagtttcactgtaccggccgtgcgtactcagacatgcatggcttaatctttgagacaagcatatgctactggccccttggacccagaggtcgactcggaccgatg

SEQ ID NO: 15425 - DNA, 203 bp, Artificial sequence
  synthetic
ggcgcgccagtcctccctactacactgacacaactgtgttcactagcaacctcaaacggtatctgatcgtcttcgaacctccgactttcgttcttgattaatgaaaacattcttggcaaatgctttcgctctggtccgtcttgcgccggtccaagaatttcacctctagcgcccttggacccagaggtcgactcggaccgatg

SEQ ID NO: 15426 - DNA, 203 bp, Artificial sequence
  synthetic
ggcgcgccagtcctaagggtagagctgacacaactgtgttcactagcaacctcaacacggaatcgagaagcatctgactcctgaggagaagtctgccgttactgccctgtggggcaaggtgaacgtggatgaagttggtggtgaggccctgggcaggctgctggtggtctaccccacggaatcgagaacgactcggaccgatg

SEQ ID NO: 15427 - DNA, 203 bp, Artificial sequence
  synthetic
ggcgcgccagtcctccctcttgtactgacacaactgtgttcactagcaacctcaacgtcaattcctttagcatctgactcctgaggagaagtctgccgttactgccctgtggggcaaggtgaacgtggatgaagttggtggtgaggccctgggcaggctgctggtggtctacccttggacctactccccgactcggaccgatg

SEQ ID NO: 15428 - DNA, 203 bp, Artificial sequence
  synthetic
ggcgcgccagtcctgtccctagtactgacacaactgtgttcactagcaacctcaagcgagcgaccaaaggaaccataactgatttaatgagccattcgcagtttcactgtaccggccgtgcgtactcagacatgcatggcttaatctttgagacaagcatatgctactggcagcttggacccagaggtcgactcggaccgatg

SEQ ID NO: 15429 - DNA, 203 bp, Artificial sequence
  synthetic
ggcgcgccagtcctcccttgttctctgacacaactgtgttcactagcaacctcaagctttgcaaccatactccccccggaacccaaagactttggtttcccggaagctgcccggcgggtcatgggaataacgccgccgcatcgccggtcggcatcgtttatggtcggaactaccttggacccagaggtcgactcggaccgatg

SEQ ID NO: 15430 - DNA, 203 bp, Artificial sequence
  synthetic
ggcgcgccagtcctatgtcccttgctgacacaactgtgttcactagcaacctcaatactcccccatggtgcatctgactcctgaggagaagtctgccgttactgccctgtggggcaaggtgaacgtggatgaagttggtggtgaggccctgggcaggctgctggtggtctacccttggacctactccccgactcggaccgatg

SEQ ID NO: 15431 - DNA, 203 bp, Artificial sequence
  synthetic
ggcgcgccagtcctgtggtaccctctgacacaactgtgttcactagcaacctcaatcccgtgttgagtcaaattaagccgcaggctccactcctggtggtgcccttccgtcaattcctttaagtttcagctttgcaaccatactccccccggaacccaaagactttggtttcccttggacccagaggtcgactcggaccgatg

SEQ ID NO: 15432 - DNA, 203 bp, Artificial sequence
  synthetic
ggcgcgccagtcctaccgaagggtctgacacaactgtgttcactagcaacctcaccggccgtccatggtgcatctgactcctgaggagaagtctgccgttactgccctgtggggcaaggtgaacgtggatgaagttggtggtgaggccctgggcaggctgctggtggtctaccccgtcaattcctttacgactcggaccgatg

SEQ ID NO: 15433 - DNA, 203 bp, Artificial sequence
  synthetic
ggcgcgccagtcctcaccctctctctgacacaactgtgttcactagcaacctcaccggccgtccatggtgcatctgactcctgaggagaagtctgccgttactgccctgtggggcaaggtgaacgtggatgaagttggtggtgaggccctgggcaggctgctggtggtctacccttggacctactccccgactcggaccgatg

SEQ ID NO: 15434 - DNA, 203 bp, Artificial sequence
  synthetic
ggcgcgccagtccttaaaccctgcctgacacaactgtgttcactagcaacctcagacggtatctgatcgtcttcgaacctccgactttcgttcttgattaatgaaaacattcttggcaaatgctttcgctctggtccgtcttgcgccggtccaagaatttcacctctagcggcgttggacccagaggtcgactcggaccgatg

SEQ ID NO: 15435 - DNA, 203 bp, Artificial sequence
  synthetic
ggcgcgccagtcctcagggtttgactgacacaactgtgttcactagcaacctcattcttggcaaatggtgcatctgactcctgaggagaagtctgccgttactgccctgtggggcaaggtgaacgtggatgaagttggtggtgaggccctgggcaggctgctggtggtctacccttgttcttggcaaacgactcggaccgatg

SEQ ID NO: 15436 - DNA, 203 bp, Artificial sequence
  synthetic
ggcgcgccagtcctacgtgtcgccctgacacaactgtgttcactagcaacctcccggcgggtccatggtgcatctgactcctgaggagaagtctgccgttactgccctgtggggcaaggtgaacgtggatgaagttggtggtgaggccctgggcaggctgctggtggtctacccttggacccagaggtcgactcggaccgatg

SEQ ID NO: 15437 - DNA, 203 bp, Artificial sequence
  synthetic
ggcgcgccagtcctgcgtgtcccactgacacaactgtgttcactagcaacctcccggcgggtccatggtgcatctgactcctgaggagaagtctgccgttactgccctgtggggcaaggtgaacgtggatgaagttggtggtgaggccctgggcaggctgctggtggtctacccttggacctactccccgactcggaccgatg

SEQ ID NO: 15438 - DNA, 203 bp, Artificial sequence
  synthetic
ggcgcgccagtcctgacacggtttctgacacaactgtgttcactagcaacctcggaattaaccagacaaatcgctccaccaactaagaacggccatgcaccaccacccacggaatcgagaaagagctatcaatctgtcaatcctgtccgtgtccgggccgggtgaggtttcccgtgggacccagaggtcgactcggaccgatg

SEQ ID NO: 15439 - DNA, 203 bp, Artificial sequence
  synthetic
ggcgcgccagtcctgcgctaccacctgacacaactgtgttcactagcaacctctttcccgtgttgagtcaaattaagccgcaggctccactcctggtggtgcccttccgtcaattcctttaagtttcagctttgcaaccatactccccccggaacccaaagactttggtttcccgtggacccagaggtcgactcggaccgatg

SEQ ID NO: 15440 - DNA, 203 bp, Artificial sequence
  synthetic
ggcgcgccagtccttgcgtagcgcctgacacaactgtgttcactagcaacctggagcgagcgaccaaaggaaccataactgatttaatgagccattcgcagtttcactgtaccggccgtgcgtactcagacatgcatggcttaatctttgagacaagcatatgctactggcaggatggacccagaggtcgactcggaccgatg

SEQ ID NO: 15441 - DNA, 203 bp, Artificial sequence
  synthetic
ggcgcgccagtccttgtagcgcttctgacacaactgtgttcactagcaacctgtttcccgtgttgagtcaaattaagccgcaggctccactcctggtggtgcccttccgtcaattcctttaagtttcagctttgcaaccatactccccccggaacccaaagactttggtttcccggggacccagaggtcgactcggaccgatg

SEQ ID NO: 15442 - DNA, 203 bp, Artificial sequence
  synthetic
ggcgcgccagtccttctgcatgaactgacacaactgtgttcactagcaaccttcttggcaaaccatggtgcatctgactcctgaggagaagtctgccgttactgccctgtggggcaaggtgaacgtggatgaagttggtggtgaggccctgggcaggctgctggtggtctaccccacggaatcgagaacgactcggaccgatg

SEQ ID NO: 15443 - DNA, 203 bp, Artificial sequence
  synthetic
ggcgcgccagtcctattgtagttactgacacaactgtgttcactagcaaccttcttggcaaaccatggtgcatctgactcctgaggagaagtctgccgttactgccctgtggggcaaggtgaacgtggatgaagttggtggtgaggccctgggcaggctgctggtggtctacccttggacctactccccgactcggaccgatg

SEQ ID NO: 15444 - DNA, 203 bp, Artificial sequence
  synthetic
ggcgcgccagtcctattgtcgtgcctgacacaactgtgttcactagcaacgaggagcgagcgaccaaaggaaccataactgatttaatgagccattcgcagtttcactgtaccggccgtgcgtactcagacatgcatggcttaatctttgagacaagcatatgctactggcaggatcaacccagaggtcgactcggaccgatg

SEQ ID NO: 15445 - DNA, 203 bp, Artificial sequence
  synthetic
ggcgcgccagtcctggtcctaaccctgacacaactgtgttcactagcaactactcccagacaccatggtactcccgactcctgaggagaagtctgccgttactgccctgtggggcaaggtgaacgtggatgaagttggtgtactccccctgggcaggctactcccggtctaccctttactcccgaggtcgactcggaccgatg

SEQ ID NO: 15446 - DNA, 203 bp, Artificial sequence
  synthetic
ggcgcgccagtcctcgagatcgaactgacacaactgtgttcactagcaactactcccagacaccatggtactcccgactcctgaggagaagtctgccgttactgccctgtggggcaaggtgatactccctgaagttggtggtgaggccctgggcaggctactcccggtctacccttggacccagaggtcgactcggaccgatg

SEQ ID NO: 15447 - DNA, 203 bp, Artificial sequence
  synthetic
ggcgcgccagtcctgacgatctcgctgacacaactgtgttcactagcaactactcccagacaccatggtactcccgactcctgaggagaagtctgccgttactgccctgtggggcaaggtgatactccctgaagttggtggtgaggccctgggcaggctactcccggtctaccctttactcccgaggtcgactcggaccgatg

SEQ ID NO: 15448 - DNA, 203 bp, Artificial sequence
  synthetic
ggcgcgccagtcctgcaacgcaatctgacacaactgtgttcactagcaactactcccagacaccatggtactcccgactcctgaggagaagtctgccgttactgccctgtggggcaaggtgatactccctgaagttggtggtgaggccctgggcaggctgctggtggtctacccttggacccagaggtcgactcggaccgatg

SEQ ID NO: 15449 - DNA, 203 bp, Artificial sequence
  synthetic
ggcgcgccagtccttagattgcgtctgacacaactgtgttcactagcaactactcccagacaccatggtactcccgactcctgaggagaagtctgccgttactgtactcccgggcaaggtgaacgtggatgaagttggtggtgaggccctgggcaggctactcccggtctaccctttactcccgaggtcgactcggaccgatg

SEQ ID NO: 15450 - DNA, 203 bp, Artificial sequence
  synthetic
ggcgcgccagtcctgatcgggtaactgacacaactgtgttcactagcaactactcccagacaccatggtactcccgactcctgaggagaagtctgccgttactgtactcccgggcaaggtgaacgtggatgaagttggtgtactccccctgggcaggctactcccggtctaccctttactcccgaggtcgactcggaccgatg

SEQ ID NO: 15451 - DNA, 203 bp, Artificial sequence
  synthetic
ggcgcgccagtcctgcgcattgtgctgacacaactgtgttcactagcaactactcccagacaccatggtactcccgactcctgaggagaagtctgccgttactgtactcccgggcaaggtgatactccctgaagttggtggtgaggccctgggcaggctgctggtggtctacccttggacccagaggtcgactcggaccgatg

SEQ ID NO: 15452 - DNA, 203 bp, Artificial sequence
  synthetic
ggcgcgccagtcctctgaatgcgcctgacacaactgtgttcactagcaactactcccagacaccatggtactcccgactcctgaggagaagtctgccgttactgtactcccgggcaaggtgatactccctgaagttggtggtgaggccctgggcaggctgctggtggtctaccctttactcccgaggtcgactcggaccgatg

SEQ ID NO: 15453 - DNA, 203 bp, Artificial sequence
  synthetic
ggcgcgccagtcctacgtcaatcactgacacaactgtgttcactagcaactactcccagacaccatggtactcccgactcctgaggagaagtctgccgttactgtactcccgggcaaggtgatactccctgaagttggtgtactccccctgggcaggctgctggtggtctacccttggacccagaggtcgactcggaccgatg

SEQ ID NO: 15454 - DNA, 203 bp, Artificial sequence
  synthetic
ggcgcgccagtcctaatgattgacctgacacaactgtgttcactagcaactactcccagacaccatggtactcccgactcctgaggagaagtctgccgttactgtactcccgggcaaggtgatactccctgaagttggtgtactccccctgggcaggctgctggtggtctaccctttactcccgaggtcgactcggaccgatg

SEQ ID NO: 15455 - DNA, 203 bp, Artificial sequence
  synthetic
ggcgcgccagtccttctagctggactgacacaactgtgttcactagcaactactcccagacaccatggtactcccgactcctgaggtactccctgccgttactgccctgtggggcaaggtgaacgtggatgaagttggtgtactccccctgggcaggctgctggtggtctacccttggacccagaggtcgactcggaccgatg

SEQ ID NO: 15456 - DNA, 203 bp, Artificial sequence
  synthetic
ggcgcgccagtcctcagtagctggctgacacaactgtgttcactagcaactactcccagacaccatggtactcccgactcctgaggtactccctgccgttactgccctgtggggcaaggtgaacgtggatgaagttggtgtactccccctgggcaggctgctggtggtctaccctttactcccgaggtcgactcggaccgatg

SEQ ID NO: 15457 - DNA, 203 bp, Artificial sequence
  synthetic
ggcgcgccagtcctgtaagctggactgacacaactgtgttcactagcaactactcccagacaccatggtactcccgactcctgaggtactccctgccgttactgccctgtggggcaaggtgatactccctgaagttggtggtgaggccctgggcaggctactcccggtctaccctttactcccgaggtcgactcggaccgatg

SEQ ID NO: 15458 - DNA, 203 bp, Artificial sequence
  synthetic
ggcgcgccagtccttcagagctggctgacacaactgtgttcactagcaactactcccagacaccatggtactcccgactcctgaggtactccctgccgttactgccctgtggggcaaggtgatactccctgaagttggtggtgaggccctgggcaggctgctggtggtctaccctttactcccgaggtcgactcggaccgatg

SEQ ID NO: 15459 - DNA, 203 bp, Artificial sequence
  synthetic
ggcgcgccagtcctctcgacgtcactgacacaactgtgttcactagcaactactcccagacaccatggtactcccgactcctgaggtactccctgccgttactgccctgtggggcaaggtgatactccctgaagttggtgtactccccctgggcaggctgctggtggtctacccttggacccagaggtcgactcggaccgatg

SEQ ID NO: 15460 - DNA, 203 bp, Artificial sequence
  synthetic
ggcgcgccagtcctgcccggtaacctgacacaactgtgttcactagcaactactcccagacaccatggtactcccgactcctgaggtactccctgccgttactgccctgtggggcaaggtgatactccctgaagttggtgtactccccctgggcaggctgctggtggtctaccctttactcccgaggtcgactcggaccgatg

SEQ ID NO: 15461 - DNA, 203 bp, Artificial sequence
  synthetic
ggcgcgccagtcctcgcccgagatctgacacaactgtgttcactagcaactactcccagacaccatggtactcccgactcctgaggtactccctgccgttactgtactcccgggcaaggtgaacgtggatgaagttggtggtgaggccctgggcaggctactcccggtctacccttggacccagaggtcgactcggaccgatg

SEQ ID NO: 15462 - DNA, 203 bp, Artificial sequence
  synthetic
ggcgcgccagtccttgcccgttcactgacacaactgtgttcactagcaactactcccagacaccatggtactcccgactcctgaggtactccctgccgttactgtactcccgggcaaggtgaacgtggatgaagttggtggtgaggccctgggcaggctactcccggtctaccctttactcccgaggtcgactcggaccgatg

SEQ ID NO: 15463 - DNA, 203 bp, Artificial sequence
  synthetic
ggcgcgccagtcctagcccgatccctgacacaactgtgttcactagcaactactcccagacaccatggtactcccgactcctgaggtactccctgccgttactgtactcccgggcaaggtgaacgtggatgaagttggtggtgaggccctgggcaggctgctggtggtctacccttggacccagaggtcgactcggaccgatg

SEQ ID NO: 15464 - DNA, 203 bp, Artificial sequence
  synthetic
ggcgcgccagtcctcagcccgtgcctgacacaactgtgttcactagcaactactcccagacaccatggtactcccgactcctgaggtactccctgccgttactgtactcccgggcaaggtgaacgtggatgaagttggtggtgaggccctgggcaggctgctggtggtctaccctttactcccgaggtcgactcggaccgatg

SEQ ID NO: 15465 - DNA, 203 bp, Artificial sequence
  synthetic
ggcgcgccagtcctgagcccgatcctgacacaactgtgttcactagcaactactcccagacaccatggtactcccgactcctgaggtactccctgccgttactgtactcccgggcaaggtgaacgtggatgaagttggtgtactccccctgggcaggctactcccggtctacccttggacccagaggtcgactcggaccgatg

SEQ ID NO: 15466 - DNA, 203 bp, Artificial sequence
  synthetic
ggcgcgccagtcctttagcccgatctgacacaactgtgttcactagcaactactcccagacaccatggtactcccgactcctgaggtactccctgccgttactgtactcccgggcaaggtgatactccctgaagttggtggtgaggccctgggcaggctgctggtggtctaccctttactcccgaggtcgactcggaccgatg

SEQ ID NO: 15467 - DNA, 203 bp, Artificial sequence
  synthetic
ggcgcgccagtccttaggcccgaactgacacaactgtgttcactagcaactactcccagacaccatggtactcccgactcctgaggtactccctgccgttactgtactcccgggcaaggtgatactccctgaagttggtgtactccccctgggcaggctactcccggtctacccttggacccagaggtcgactcggaccgatg

SEQ ID NO: 15468 - DNA, 203 bp, Artificial sequence
  synthetic
ggcgcgccagtcctacgcccgtttctgacacaactgtgttcactagcaactactcccagacaccatggtactcccgactcctgaggtactccctgccgttactgtactcccgggcaaggtgatactccctgaagttggtgtactccccctgggcaggctactcccggtctaccctttactcccgaggtcgactcggaccgatg

SEQ ID NO: 15469 - DNA, 203 bp, Artificial sequence
  synthetic
ggcgcgccagtcctgcccgtcgctctgacacaactgtgttcactagcaactactcccagacaccatggtgcatctgactcctgaggagaagtctgccgttactgccctgtggggcaaggtgaacgtggatgaagttggtggtgaggccctgggcaggctactcccggtctaccctttactcccgaggtcgactcggaccgatg

SEQ ID NO: 15470 - DNA, 203 bp, Artificial sequence
  synthetic
ggcgcgccagtcctgcccgacctgctgacacaactgtgttcactagcaactactcccagacaccatggtgcatctgactcctgaggagaagtctgccgttactgccctgtggggcaaggtgaacgtggatgaagttggtggtgaggccctgggcaggctgctggtggtctacccttggacccagaggtcgactcggaccgatg

SEQ ID NO: 15471 - DNA, 203 bp, Artificial sequence
  synthetic
ggcgcgccagtcctgcccgtacacctgacacaactgtgttcactagcaactactcccagacaccatggtgcatctgactcctgaggagaagtctgccgttactgccctgtggggcaaggtgaacgtggatgaagttggtggtgaggccctgggcaggctgctggtggtctaccctttactcccgaggtcgactcggaccgatg

SEQ ID NO: 15472 - DNA, 203 bp, Artificial sequence
  synthetic
ggcgcgccagtccttactcgggcgctgacacaactgtgttcactagcaactactcccagacaccatggtgcatctgactcctgaggagaagtctgccgttactgccctgtggggcaaggtgaacgtggatgaagttggtgtactccccctgggcaggctactcccggtctaccctttactcccgaggtcgactcggaccgatg

SEQ ID NO: 15473 - DNA, 203 bp, Artificial sequence
  synthetic
ggcgcgccagtccttggtcgggctctgacacaactgtgttcactagcaactactcccagacaccatggtgcatctgactcctgaggagaagtctgccgttactgccctgtggggcaaggtgatactccctgaagttggtggtgaggccctgggcaggctgctggtggtctacccttggacccagaggtcgactcggaccgatg

SEQ ID NO: 15474 - DNA, 203 bp, Artificial sequence
  synthetic
ggcgcgccagtcctaggacgggccctgacacaactgtgttcactagcaactactcccagacaccatggtgcatctgactcctgaggagaagtctgccgttactgccctgtggggcaaggtgatactccctgaagttggtggtgaggccctgggcaggctgctggtggtctaccctttactcccgaggtcgactcggaccgatg

SEQ ID NO: 15475 - DNA, 203 bp, Artificial sequence
  synthetic
ggcgcgccagtcctacgggcaaccctgacacaactgtgttcactagcaactactcccagacaccatggtgcatctgactcctgaggagaagtctgccgttactgccctgtggggcaaggtgatactccctgaagttggtgtactccccctgggcaggctactcccggtctaccctttactcccgaggtcgactcggaccgatg

SEQ ID NO: 15476 - DNA, 203 bp, Artificial sequence
  synthetic
ggcgcgccagtcctggacacgggcctgacacaactgtgttcactagcaactactcccagacaccatggtgcatctgactcctgaggagaagtctgccgttactgccctgtggggcaaggtgatactccctgaagttggtgtactccccctgggcaggctgctggtggtctacccttggacccagaggtcgactcggaccgatg

SEQ ID NO: 15477 - DNA, 203 bp, Artificial sequence
  synthetic
ggcgcgccagtcctacgggcgtatctgacacaactgtgttcactagcaactactcccagacaccatggtgcatctgactcctgaggagaagtctgccgttactgtactcccgggcaaggtgaacgtggatgaagttggtggtgaggccctgggcaggctgctggtggtctaccctttactcccgaggtcgactcggaccgatg

SEQ ID NO: 15478 - DNA, 203 bp, Artificial sequence
  synthetic
ggcgcgccagtcctctcgggcggtctgacacaactgtgttcactagcaactactcccagacaccatggtgcatctgactcctgaggagaagtctgccgttactgtactcccgggcaaggtgaacgtggatgaagttggtgtactccccctgggcaggctactcccggtctacccttggacccagaggtcgactcggaccgatg

SEQ ID NO: 15479 - DNA, 203 bp, Artificial sequence
  synthetic
ggcgcgccagtcctgcgggcggtactgacacaactgtgttcactagcaactactcccagacaccatggtgcatctgactcctgaggagaagtctgccgttactgtactcccgggcaaggtgaacgtggatgaagttggtgtactccccctgggcaggctactcccggtctaccctttactcccgaggtcgactcggaccgatg

SEQ ID NO: 15480 - DNA, 203 bp, Artificial sequence
  synthetic
ggcgcgccagtcctttcgggccttctgacacaactgtgttcactagcaactactcccagacaccatggtgcatctgactcctgaggagaagtctgccgttactgtactcccgggcaaggtgaacgtggatgaagttggtgtactccccctgggcaggctgctggtggtctacccttggacccagaggtcgactcggaccgatg

SEQ ID NO: 15481 - DNA, 203 bp, Artificial sequence
  synthetic
ggcgcgccagtccttacgctagagctgacacaactgtgttcactagcaactactcccagacaccatggtgcatctgactcctgaggagaagtctgccgttactgtactcccgggcaaggtgaacgtggatgaagttggtgtactccccctgggcaggctgctggtggtctaccctttactcccgaggtcgactcggaccgatg

SEQ ID NO: 15482 - DNA, 203 bp, Artificial sequence
  synthetic
ggcgcgccagtcctctcgtagcatctgacacaactgtgttcactagcaactactcccagacaccatggtgcatctgactcctgaggagaagtctgccgttactgtactcccgggcaaggtgatactccctgaagttggtggtgaggccctgggcaggctgctggtggtctaccctttactcccgaggtcgactcggaccgatg

SEQ ID NO: 15483 - DNA, 203 bp, Artificial sequence
  synthetic
ggcgcgccagtcctatgctactagctgacacaactgtgttcactagcaactactcccagacaccatggtgcatctgactcctgaggagaagtctgccgttactgtactcccgggcaaggtgatactccctgaagttggtgtactccccctgggcaggctactcccggtctaccctttactcccgaggtcgactcggaccgatg

SEQ ID NO: 15484 - DNA, 203 bp, Artificial sequence
  synthetic
ggcgcgccagtcctttgaatgctactgacacaactgtgttcactagcaactactcccagacaccatggtgcatctgactcctgaggagaagtctgccgttactgtactcccgggcaaggtgatactccctgaagttggtgtactccccctgggcaggctgctggtggtctacccttggacccagaggtcgactcggaccgatg

SEQ ID NO: 15485 - DNA, 203 bp, Artificial sequence
  synthetic
ggcgcgccagtcctactcatgctactgacacaactgtgttcactagcaactactcccagacaccatggtgcatctgactcctgaggtactccctgccgttactgccctgtggggcaaggtgaacgtggatgaagttggtggtgaggccctgggcaggctactcccggtctacccttggacccagaggtcgactcggaccgatg

SEQ ID NO: 15486 - DNA, 203 bp, Artificial sequence
  synthetic
ggcgcgccagtcctatgctaggacctgacacaactgtgttcactagcaactactcccagacaccatggtgcatctgactcctgaggtactccctgccgttactgccctgtggggcaaggtgaacgtggatgaagttggtggtgaggccctgggcaggctactcccggtctaccctttactcccgaggtcgactcggaccgatg

SEQ ID NO: 15487 - DNA, 203 bp, Artificial sequence
  synthetic
ggcgcgccagtccttagcatacgcctgacacaactgtgttcactagcaactactcccagacaccatggtgcatctgactcctgaggtactccctgccgttactgccctgtggggcaaggtgaacgtggatgaagttggtggtgaggccctgggcaggctgctggtggtctacccttggacccagaggtcgactcggaccgatg

SEQ ID NO: 15488 - DNA, 203 bp, Artificial sequence
  synthetic
ggcgcgccagtcctagaaagaatgctgacacaactgtgttcactagcaactactcccagacaccatggtgcatctgactcctgaggtactccctgccgttactgccctgtggggcaaggtgaacgtggatgaagttggtgtactccccctgggcaggctactcccggtctaccctttactcccgaggtcgactcggaccgatg

SEQ ID NO: 15489 - DNA, 203 bp, Artificial sequence
  synthetic
ggcgcgccagtcctacattcttcgctgacacaactgtgttcactagcaactactcccagacaccatggtgcatctgactcctgaggtactccctgccgttactgccctgtggggcaaggtgaacgtggatgaagttggtgtactccccctgggcaggctgctggtggtctacccttggacccagaggtcgactcggaccgatg

SEQ ID NO: 15490 - DNA, 203 bp, Artificial sequence
  synthetic
ggcgcgccagtcctccattcttttctgacacaactgtgttcactagcaactactcccagacaccatggtgcatctgactcctgaggtactccctgccgttactgccctgtggggcaaggtgaacgtggatgaagttggtgtactccccctgggcaggctgctggtggtctaccctttactcccgaggtcgactcggaccgatg

SEQ ID NO: 15491 - DNA, 203 bp, Artificial sequence
  synthetic
ggcgcgccagtcctcccatgtgtcctgacacaactgtgttcactagcaactactcccagacaccatggtgcatctgactcctgaggtactccctgccgttactgccctgtggggcaaggtgatactccctgaagttggtggtgaggccctgggcaggctactcccggtctaccctttactcccgaggtcgactcggaccgatg

SEQ ID NO: 15492 - DNA, 203 bp, Artificial sequence
  synthetic
ggcgcgccagtcctgagcatgtgcctgacacaactgtgttcactagcaactactcccagacaccatggtgcatctgactcctgaggtactccctgccgttactgccctgtggggcaaggtgatactccctgaagttggtggtgaggccctgggcaggctgctggtggtctacccttggacccagaggtcgactcggaccgatg

SEQ ID NO: 15493 - DNA, 203 bp, Artificial sequence
  synthetic
ggcgcgccagtcctgctcatgtgtctgacacaactgtgttcactagcaactactcccagacaccatggtgcatctgactcctgaggtactccctgccgttactgccctgtggggcaaggtgatactccctgaagttggtgtactccccctgggcaggctactcccggtctacccttggacccagaggtcgactcggaccgatg

SEQ ID NO: 15494 - DNA, 203 bp, Artificial sequence
  synthetic
ggcgcgccagtccttacatgtggactgacacaactgtgttcactagcaactactcccagacaccatggtgcatctgactcctgaggtactccctgccgttactgccctgtggggcaaggtgatactccctgaagttggtgtactccccctgggcaggctactcccggtctaccctttactcccgaggtcgactcggaccgatg

SEQ ID NO: 15495 - DNA, 203 bp, Artificial sequence
  synthetic
ggcgcgccagtcctcatgtgcatactgacacaactgtgttcactagcaactactcccagacaccatggtgcatctgactcctgaggtactccctgccgttactgccctgtggggcaaggtgatactccctgaagttggtgtactccccctgggcaggctgctggtggtctacccttggacccagaggtcgactcggaccgatg

SEQ ID NO: 15496 - DNA, 203 bp, Artificial sequence
  synthetic
ggcgcgccagtcctcttcatgtgcctgacacaactgtgttcactagcaactactcccagacaccatggtgcatctgactcctgaggtactccctgccgttactgtactcccgggcaaggtgaacgtggatgaagttggtggtgaggccctgggcaggctactcccggtctacccttggacccagaggtcgactcggaccgatg

SEQ ID NO: 15497 - DNA, 203 bp, Artificial sequence
  synthetic
ggcgcgccagtccttcacatgtgcctgacacaactgtgttcactagcaactactcccagacaccatggtgcatctgactcctgaggtactccctgccgttactgtactcccgggcaaggtgaacgtggatgaagttggtggtgaggccctgggcaggctactcccggtctaccctttactcccgaggtcgactcggaccgatg

SEQ ID NO: 15498 - DNA, 203 bp, Artificial sequence
  synthetic
ggcgcgccagtcctcacatggtacctgacacaactgtgttcactagcaactactcccagacaccatggtgcatctgactcctgaggtactccctgccgttactgtactcccgggcaaggtgaacgtggatgaagttggtggtgaggccctgggcaggctgctggtggtctaccctttactcccgaggtcgactcggaccgatg

SEQ ID NO: 15499 - DNA, 203 bp, Artificial sequence
  synthetic
ggcgcgccagtcctacacatggacctgacacaactgtgttcactagcaactactcccagacaccatggtgcatctgactcctgaggtactccctgccgttactgtactcccgggcaaggtgaacgtggatgaagttggtgtactccccctgggcaggctactcccggtctacccttggacccagaggtcgactcggaccgatg

SEQ ID NO: 15500 - DNA, 203 bp, Artificial sequence
  synthetic
ggcgcgccagtccttctgcacatgctgacacaactgtgttcactagcaactactcccagacaccatggtgcatctgactcctgaggtactccctgccgttactgtactcccgggcaaggtgaacgtggatgaagttggtgtactccccctgggcaggctactcccggtctaccctttactcccgaggtcgactcggaccgatg

SEQ ID NO: 15501 - DNA, 203 bp, Artificial sequence
  synthetic
ggcgcgccagtcctctacacatgtctgacacaactgtgttcactagcaactactcccagacaccatggtgcatctgactcctgaggtactccctgccgttactgtactcccgggcaaggtgaacgtggatgaagttggtgtactccccctgggcaggctgctggtggtctacccttggacccagaggtcgactcggaccgatg

SEQ ID NO: 15502 - DNA, 203 bp, Artificial sequence
  synthetic
ggcgcgccagtcctataccacatgctgacacaactgtgttcactagcaactactcccagacaccatggtgcatctgactcctgaggtactccctgccgttactgtactcccgggcaaggtgatactccctgaagttggtggtgaggccctgggcaggctactcccggtctacccttggacccagaggtcgactcggaccgatg

SEQ ID NO: 15503 - DNA, 203 bp, Artificial sequence
  synthetic
ggcgcgccagtccttccacatgtcctgacacaactgtgttcactagcaactactcccagacaccatggtgcatctgactcctgaggtactccctgccgttactgtactcccgggcaaggtgatactccctgaagttggtggtgaggccctgggcaggctactcccggtctaccctttactcccgaggtcgactcggaccgatg

SEQ ID NO: 15504 - DNA, 203 bp, Artificial sequence
  synthetic
ggcgcgccagtcctgtcacatgggctgacacaactgtgttcactagcaactactcccagacaccatggtgcatctgactcctgaggtactccctgccgttactgtactcccgggcaaggtgatactccctgaagttggtggtgaggccctgggcaggctgctggtggtctacccttggacccagaggtcgactcggaccgatg

SEQ ID NO: 15505 - DNA, 203 bp, Artificial sequence
  synthetic
ggcgcgccagtcctccacatgtaactgacacaactgtgttcactagcaactactcccagacaccatggtgcatctgactcctgaggtactccctgccgttactgtactcccgggcaaggtgatactccctgaagttggtggtgaggccctgggcaggctgctggtggtctaccctttactcccgaggtcgactcggaccgatg

SEQ ID NO: 15506 - DNA, 203 bp, Artificial sequence
  synthetic
ggcgcgccagtccttttaaacctcctgacacaactgtgttcactagcaactactcccagacaccatggtgcatctgactcctgaggtactccctgccgttactgtactcccgggcaaggtgatactccctgaagttggtgtactccccctgggcaggctactcccggtctaccctttactcccgaggtcgactcggaccgatg

SEQ ID NO: 15507 - DNA, 203 bp, Artificial sequence
  synthetic
ggcgcgccagtcctatgagcgtgcctgacacaactgtgttcactagcaacttcttggcaaaaccatggtgcatctgactcctgaggagaagtctgccgttactgccctgtggggcaaggtgaacgtggatgaagttggtgttcttggcaaaggcaggcttcttggcaaatacccttggacccagaggtcgactcggaccgatg

SEQ ID NO: 15508 - DNA, 203 bp, Artificial sequence
  synthetic
ggcgcgccagtcctattgcgtgcactgacacaactgtgttcactagcaacttcttggcaaaaccatggtgcatctgactcctgaggagaagtctgccgttactgccctgtggggcaaggtgattcttggcaaagttggtgttcttggcaaaggcaggcttcttggcaaatacccttggacccagaggtcgactcggaccgatg

SEQ ID NO: 15509 - DNA, 203 bp, Artificial sequence
  synthetic
ggcgcgccagtccttagcacgcacctgacacaactgtgttcactagcaacttcttggcaaaaccatggtgcatctgactcctgaggagaagtctgccgttactgttcttggcaaaaaggtgaacgtggatgaagttggtggtgaggccctgggcaggcttcttggcaaatacccttggacccagaggtcgactcggaccgatg

SEQ ID NO: 15510 - DNA, 203 bp, Artificial sequence
  synthetic
ggcgcgccagtccttttagcacgcctgacacaactgtgttcactagcaacttcttggcaaaaccatggtgcatctgactcctgaggagaagtctgccgttactgttcttggcaaaaaggtgaacgtggatgaagttggtgttcttggcaaaggcaggctgctggtggtctacccttggacccagaggtcgactcggaccgatg

SEQ ID NO: 15511 - DNA, 203 bp, Artificial sequence
  synthetic
ggcgcgccagtcctgagcacgctactgacacaactgtgttcactagcaacttcttggcaaaaccatggtgcatctgactcctgaggagaagtctgccgttactgttcttggcaaaaaggtgattcttggcaaagttggtggtgaggccctgggcaggcttcttggcaaatacccttggacccagaggtcgactcggaccgatg

SEQ ID NO: 15512 - DNA, 203 bp, Artificial sequence
  synthetic
ggcgcgccagtcctatatgtggtgctgacacaactgtgttcactagcaacttcttggcaaaaccatggtgcatctgactcctgaggttcttggcaaagttactgccctgtggggcaaggtgaacgtggatgaagttggtggtgaggccctgggcaggctgctggtggtctacccttggacccagaggtcgactcggaccgatg

SEQ ID NO: 15513 - DNA, 203 bp, Artificial sequence
  synthetic
ggcgcgccagtcctgttggatcccctgacacaactgtgttcactagcaacttcttggcaaaaccatggtgcatctgactcctgaggttcttggcaaagttactgccctgtggggcaaggtgaacgtggatgaagttggtgttcttggcaaaggcaggctgctggtggtctacccttggacccagaggtcgactcggaccgatg

SEQ ID NO: 15514 - DNA, 203 bp, Artificial sequence
  synthetic
ggcgcgccagtcctaatttgaaacctgacacaactgtgttcactagcaacttcttggcaaaaccatggtgcatctgactcctgaggttcttggcaaagttactgccctgtggggcaaggtgaacgtggatgaagttggtgttcttggcaaaggcaggcttcttggcaaatacccttggacccagaggtcgactcggaccgatg

SEQ ID NO: 15515 - DNA, 203 bp, Artificial sequence
  synthetic
ggcgcgccagtccttgctgattcgctgacacaactgtgttcactagcaacttcttggcaaaaccatggtgcatctgactcctgaggttcttggcaaagttactgccctgtggggcaaggtgattcttggcaaagttggtggtgaggccctgggcaggcttcttggcaaatacccttggacccagaggtcgactcggaccgatg

SEQ ID NO: 15516 - DNA, 203 bp, Artificial sequence
  synthetic
ggcgcgccagtcctgctgcagtagctgacacaactgtgttcactagcaacttcttggcaaaaccatggtgcatctgactcctgaggttcttggcaaagttactgccctgtggggcaaggtgattcttggcaaagttggtgttcttggcaaaggcaggctgctggtggtctacccttggacccagaggtcgactcggaccgatg

SEQ ID NO: 15517 - DNA, 203 bp, Artificial sequence
  synthetic
ggcgcgccagtcctgttttaagctctgacacaactgtgttcactagcaacttcttggcaaaaccatggtgcatctgactcctgaggttcttggcaaagttactgttcttggcaaaaaggtgaacgtggatgaagttggtggtgaggccctgggcaggcttcttggcaaatacccttggacccagaggtcgactcggaccgatg

SEQ ID NO: 15518 - DNA, 203 bp, Artificial sequence
  synthetic
ggcgcgccagtcctaagattttagctgacacaactgtgttcactagcaacttcttggcaaaaccatggtgcatctgactcctgaggttcttggcaaagttactgttcttggcaaaaaggtgaacgtggatgaagttggtgttcttggcaaaggcaggcttcttggcaaatacccttggacccagaggtcgactcggaccgatg

SEQ ID NO: 15519 - DNA, 203 bp, Artificial sequence
  synthetic
ggcgcgccagtcctattttactggctgacacaactgtgttcactagcaacttcttggcaaaaccatggttcttggcaaacctgaggagaagtctgccgttactgccctgtggggcaaggtgaacgtggatgaagttggtgttcttggcaaaggcaggctgctggtggtctacccttggacccagaggtcgactcggaccgatg

SEQ ID NO: 15520 - DNA, 203 bp, Artificial sequence
  synthetic
ggcgcgccagtcctcgttttaaatctgacacaactgtgttcactagcaacttcttggcaaaaccatggttcttggcaaacctgaggagaagtctgccgttactgttcttggcaaaaaggtgaacgtggatgaagttggtggtgaggccctgggcaggcttcttggcaaatacccttggacccagaggtcgactcggaccgatg

SEQ ID NO: 15521 - DNA, 203 bp, Artificial sequence
  synthetic
ggcgcgccagtccttaaaatcgttctgacacaactgtgttcactagcaacttcttggcaaaaccatggttcttggcaaacctgaggagaagtctgccgttactgttcttggcaaaaaggtgaacgtggatgaagttggtgttcttggcaaaggcaggctgctggtggtctacccttggacccagaggtcgactcggaccgatg

SEQ ID NO: 15522 - DNA, 203 bp, Artificial sequence
  synthetic
ggcgcgccagtcctagttaaaatcctgacacaactgtgttcactagcaacttcttggcaaaaccatggttcttggcaaacctgaggagaagtctgccgttactgttcttggcaaaaaggtgaacgtggatgaagttggtgttcttggcaaaggcaggcttcttggcaaatacccttggacccagaggtcgactcggaccgatg

SEQ ID NO: 15523 - DNA, 203 bp, Artificial sequence
  synthetic
ggcgcgccagtcctgtgttaaaagctgacacaactgtgttcactagcaacttcttggcaaaaccatggttcttggcaaacctgaggagaagtctgccgttactgttcttggcaaaaaggtgattcttggcaaagttggtgttcttggcaaaggcaggctgctggtggtctacccttggacccagaggtcgactcggaccgatg

SEQ ID NO: 15524 - DNA, 203 bp, Artificial sequence
  synthetic
ggcgcgccagtccttaaaattgacctgacacaactgtgttcactagcaacttcttggcaaaaccatggttcttggcaaacctgaggagaagtctgccgttactgttcttggcaaaaaggtgattcttggcaaagttggtgttcttggcaaaggcaggcttcttggcaaatacccttggacccagaggtcgactcggaccgatg

SEQ ID NO: 15525 - DNA, 203 bp, Artificial sequence
  synthetic
ggcgcgccagtcctcctaaaagtcctgacacaactgtgttcactagcaacttcttggcaaaaccatggttcttggcaaacctgaggttcttggcaaagttactgccctgtggggcaaggtgaacgtggatgaagttggtggtgaggccctgggcaggctgctggtggtctacccttggacccagaggtcgactcggaccgatg

SEQ ID NO: 15526 - DNA, 203 bp, Artificial sequence
  synthetic
ggcgcgccagtcctgaatctaaaactgacacaactgtgttcactagcaacttcttggcaaaaccatggttcttggcaaacctgaggttcttggcaaagttactgccctgtggggcaaggtgaacgtggatgaagttggtggtgaggccctgggcaggcttcttggcaaatacccttggacccagaggtcgactcggaccgatg

SEQ ID NO: 15527 - DNA, 203 bp, Artificial sequence
  synthetic
ggcgcgccagtccttagtaaaagtctgacacaactgtgttcactagcaacttcttggcaaaaccatggttcttggcaaacctgaggttcttggcaaagttactgccctgtggggcaaggtgaacgtggatgaagttggtgttcttggcaaaggcaggctgctggtggtctacccttggacccagaggtcgactcggaccgatg

SEQ ID NO: 15528 - DNA, 203 bp, Artificial sequence
  synthetic
ggcgcgccagtccttaggttaaaactgacacaactgtgttcactagcaacttcttggcaaaaccatggttcttggcaaacctgaggttcttggcaaagttactgttcttggcaaaaaggtgaacgtggatgaagttggtggtgaggccctgggcaggctgctggtggtctacccttggacccagaggtcgactcggaccgatg

SEQ ID NO: 15529 - DNA, 203 bp, Artificial sequence
  synthetic
ggcgcgccagtccttaaaagcagtctgacacaactgtgttcactagcaacttcttggcaaaaccatggttcttggcaaacctgaggttcttggcaaagttactgttcttggcaaaaaggtgaacgtggatgaagttggtggtgaggccctgggcaggcttcttggcaaatacccttggacccagaggtcgactcggaccgatg

SEQ ID NO: 15530 - DNA, 203 bp, Artificial sequence
  synthetic
ggcgcgccagtccttaaaagattgctgacacaactgtgttcactagcaacttcttggcaaaaccatggttcttggcaaacctgaggttcttggcaaagttactgttcttggcaaaaaggtgattcttggcaaagttggtggtgaggccctgggcaggcttcttggcaaatacccttggacccagaggtcgactcggaccgatg

SEQ ID NO: 15531 - DNA, 203 bp, Artificial sequence
  synthetic
ggcgcgccagtcctttaacatggactgacacaactgtgttcactagcaacttcttggcaaaaccatggttcttggcaaacctgaggttcttggcaaagttactgttcttggcaaaaaggtgattcttggcaaagttggtgttcttggcaaaggcaggcttcttggcaaatacccttttcttggcaaatcgactcggaccgatg

SEQ ID NO: 15532 - DNA, 203 bp, Artificial sequence
  synthetic
ggcgcgccagtccttatgttacgtctgacacaactgtgttcactagcaagtttcagctttgcaaccatactccccccggaacccaaagactttggtttcccggaagctgcccggcgggtcatgggaataacgccgccgcatcgccggtcggcatcgtttatggtcggaactacgacggtatcagaggtcgactcggaccgatg

SEQ ID NO: 15533 - DNA, 203 bp, Artificial sequence
  synthetic
ggcgcgccagtcctatgttactctctgacacaactgtgttcactagcaattcttggcaaacaccatggtgcatctgactcctgaggagaagtctgccgttactgccctgtggggcaaggtgaacgtggatgaagttggtggtgaggccctgggcaggctgctggtggtctacccttggaaccggccgtcgactcggaccgatg

SEQ ID NO: 15534 - DNA, 203 bp, Artificial sequence
  synthetic
ggcgcgccagtcctaccatgttacctgacacaactgtgttcactagcacacggaatcgagaaccatggtgcatctgactcctgaggagaagtctgccgttactgccctgtggggcaaggtgaacgtggatgaagttggtggtgaggccctgggcaggctgctggtggtctaccccgtcaattcctttacgactcggaccgatg

SEQ ID NO: 15535 - DNA, 203 bp, Artificial sequence
  synthetic
ggcgcgccagtcctaaagcgctctctgacacaactgtgttcactagcaccgcaggctccactcctggtggtgcccttccgtcaattcctttaagtttcagctttgcaaccatactccccccggaacccaaagactttggtttcccggaagctgcccggcgggtcatgggaataacgccgcccagaggtcgactcggaccgatg

SEQ ID NO: 15536 - DNA, 203 bp, Artificial sequence
  synthetic
ggcgcgccagtcctagcgctcaccctgacacaactgtgttcactagcacgtcaattcctttaccatggtgcatctgactcctgaggagaagtctgccgttactgccctgtggggcaaggtgaacgtggatgaagttggtggtgaggccctgggcaggctgctggtggtctaccccgtcaattcctttacgactcggaccgatg

SEQ ID NO: 15537 - DNA, 203 bp, Artificial sequence
  synthetic
ggcgcgccagtcctagggtcgttcctgacacaactgtgttcactagcacgtcaattcctttaccatggtgcatctgactcctgaggagaagtctgccgttactgccctgtggggcaaggtgaacgtggatgaagttggtggtgaggccctgggcaggctgctggtggtctacccttggacctactccccgactcggaccgatg

SEQ ID NO: 15538 - DNA, 203 bp, Artificial sequence
  synthetic
ggcgcgccagtcctgtctcgttcgctgacacaactgtgttcactagcatactcccacagacaccatggtgcatctgactcctgaggagaagtctgccgttactgccctgtggggcaaggtgaacgtggatgaagttggtggtgaggccctgggcaggctgctggtggtctacccttggacccagaggtcgactcggaccgatg

SEQ ID NO: 15539 - DNA, 203 bp, Artificial sequence
  synthetic
ggcgcgccagtcctcgaacgagccctgacacaactgtgttcactagcatgaggtttcccgtgttgagtcaaattaagccgcaggctccactcctggtggtgcccttccgtcaattcctttaagtttcagctttgcaaccatactccccccggaacccaaagactttggtttcccggaagcccagaggtcgactcggaccgatg

SEQ ID NO: 15540 - DNA, 203 bp, Artificial sequence
  synthetic
ggcgcgccagtcctatcgttcaagctgacacaactgtgttcactagccggcgggtacagacaccatggtgcatctgactcctgaggagaagtctgccgttactgccctgtggggcaaggtgaacgtggatgaagttggtggtgaggccctgggcaggctgctggtggtctaccccacggaatcgagaacgactcggaccgatg

SEQ ID NO: 15541 - DNA, 203 bp, Artificial sequence
  synthetic
ggcgcgccagtccttagaacgatcctgacacaactgtgttcactagccggcgggtacagacaccatggtgcatctgactcctgaggagaagtctgccgttactgccctgtggggcaaggtgaacgtggatgaagttggtggtgaggccctgggcaggctgctggtggtctacccttggacctactccccgactcggaccgatg

SEQ ID NO: 15542 - DNA, 203 bp, Artificial sequence
  synthetic
ggcgcgccagtcctgcgaacgagtctgacacaactgtgttcactagcgaactacgacggtatctgatcgtcttcgaacctccgactttcgttcttgattaatgaaaacattcttggcaaatgctttcgctctggtccgtcttgcgccggtccaagaatttcacctctagcggcgcaatacgcagaggtcgactcggaccgatg

SEQ ID NO: 15543 - DNA, 203 bp, Artificial sequence
  synthetic
ggcgcgccagtccttcctgaccggctgacacaactgtgttcactagggtgaggtttcccgtgttgagtcaaattaagccgcaggctccactcctggtggtgcccttccgtcaattcctttaagtttcagctttgcaaccatactccccccggaacccaaagactttggtttcccggaagctgagaggtcgactcggaccgatg

SEQ ID NO: 15544 - DNA, 203 bp, Artificial sequence
  synthetic
ggcgcgccagtcctgaaacaccggctgacacaactgtgttcactataggagaggagcgagcgaccaaaggaaccataactgatttaatgagccattcgcagtttcactgtaccggccgtgcgtactcagacatgcatggcttaatctttgagacaagcatatgctactggcaggatcaaccaggaggtcgactcggaccgatg

SEQ ID NO: 15545 - DNA, 203 bp, Artificial sequence
  synthetic
ggcgcgccagtcctcaacgcccttctgacacaactgtgttcactccggcgggtaaacagacaccatggtgcatctgactcctgaggagaagtctgccgttactgccctgtggggcaaggtgaacgtggatgaagttggtggtgaggccctgggcaggctgctggtggtctacccttggaaccggccgtcgactcggaccgatg

SEQ ID NO: 15546 - DNA, 203 bp, Artificial sequence
  synthetic
ggcgcgccagtcctagccctctgcctgacacaactgtgttcactcgggtgaggtttcccgtgttgagtcaaattaagccgcaggctccactcctggtggtgcccttccgtcaattcctttaagtttcagctttgcaaccatactccccccggaacccaaagactttggtttcccggaagctgccaggtcgactcggaccgatg

SEQ ID NO: 15547 - DNA, 203 bp, Artificial sequence
  synthetic
ggcgcgccagtcctcgcccttacgctgacacaactgtgttcacttactccctcaaacagacaccatggtgcatctgactcctgaggagaagtctgccgttactgccctgtggggcaaggtgaacgtggatgaagttggtggtgaggccctgggcaggctgctggtggtctacccttgttcttggcaaacgactcggaccgatg

SEQ ID NO: 15548 - DNA, 203 bp, Artificial sequence
  synthetic
ggcgcgccagtcctggccctcacactgacacaactgtgttcactttcttggcaaaacagacaccatggtgcatctgactcctgaggagaagtctgccgttactgccctgtggggcaaggtgaacgtggatgaagttggtggtgaggccctgggcaggctgctggtggtctaccccacggaatcgagaacgactcggaccgatg

SEQ ID NO: 15549 - DNA, 203 bp, Artificial sequence
  synthetic
ggcgcgccagtcctaggccctcaactgacacaactgtgttcacttttaagtttcagctttgcaaccatactccccccggaacccaaagactttggtttcccggaagctgcccggcgggtcatgggaataacgccgccgcatcgccggtcggcatcgtttatggtcggaactacgacggtatctgaggtcgactcggaccgatg

SEQ ID NO: 15550 - DNA, 203 bp, Artificial sequence
  synthetic
ggcgcgccagtcctgtagccctctctgacacaactgtgttcattcttggcaaaaaacagacaccatggtgcatctgactcctgaggagaagtctgccgttactgccctgtggggcaaggtgaacgtggatgaagttggtggtgaggccctgggcaggctgctggtggtctacccttggaccggcgggtcgactcggaccgatg

SEQ ID NO: 15551 - DNA, 203 bp, Artificial sequence
  synthetic
ggcgcgccagtcctaggccctttcctgacacaactgtgttccacggaatcgagaaacagacaccatggtgcatctgactcctgaggagaagtctgccgttactgccctgtggggcaaggtgaacgtggatgaagttggtggtgaggccctgggcaggctgctggtggtctaccccacggaatcgagaacgactcggaccgatg

SEQ ID NO: 15552 - DNA, 203 bp, Artificial sequence
  synthetic
ggcgcgccagtcctagagagggcgctgacacaactgtgttccacggaatcgagaaacagacaccatggtgcatctgactcctgaggagaagtctgccgttactgccctgtggggcaaggtgaacgtggatgaagttggtggtgaggccctgggcaggctgctggtggtctaccccgtcaattcctttacgactcggaccgatg

SEQ ID NO: 15553 - DNA, 203 bp, Artificial sequence
  synthetic
ggcgcgccagtcctaagggcaggcctgacacaactgtgttccacggaatcgagaaacagacaccatggtgcatctgactcctgaggagaagtctgccgttactgccctgtggggcaaggtgaacgtggatgaagttggtggtgaggccctgggcaggctgctggtggtctacccttggacccagaggtcgactcggaccgatg

SEQ ID NO: 15554 - DNA, 203 bp, Artificial sequence
  synthetic
ggcgcgccagtcctgcagggcccactgacacaactgtgttccgtcaattcctttaacagacaccatggtgcatctgactcctgaggagaagtctgccgttactgccctgtggggcaaggtgaacgtggatgaagttggtggtgaggccctgggcaggctgctggtggtctaccccgtcaattcctttacgactcggaccgatg

SEQ ID NO: 15555 - DNA, 203 bp, Artificial sequence
  synthetic
ggcgcgccagtccttctaagggcgctgacacaactgtgttctactcccacctcaaacagacaccatggtgcatctgactcctgaggagaagtctgccgttactgccctgtggggcaaggtgaacgtggatgaagttggtggtgaggccctgggcaggctgctggtggtctacccttggacccagaggtcgactcggaccgatg

SEQ ID NO: 15556 - DNA, 203 bp, Artificial sequence
  synthetic
ggcgcgccagtcctttgcagggcgctgacacaactgtttcttggcaaaacctcaaacagacaccatggtgcatctgactcctgaggagaagtctgccgttactgccctgtggggcaaggtgaacgtggatgaagttggtggtgaggccctgggcaggctgctggtggtctaccccgtcaattcctttacgactcggaccgatg

SEQ ID NO: 15557 - DNA, 203 bp, Artificial sequence
  synthetic
ggcgcgccagtcctcgaagggccgctgacacacacggaatcgagaacaaccacggaatcgagaaatggcacggaatcgagaagaggagaagtctgccgttactgcacggaatcgagaagtgaacgtggatgaagttggtgcacggaatcgagaaaggccacggaatcgagaaccttggacccagaggtcgactcggaccgatg

SEQ ID NO: 15558 - DNA, 203 bp, Artificial sequence
  synthetic
ggcgcgccagtcctcaaagggcgtctgacacacacggaatcgagaacaaccacggaatcgagaaatggcacggaatcgagaagaggagaagtctgccgttactgcacggaatcgagaagtgaacgtggatgaagttggtggtgaggccctgggcaggctgctggtggtctacccttggacccagaggtcgactcggaccgatg

SEQ ID NO: 15559 - DNA, 203 bp, Artificial sequence
  synthetic
ggcgcgccagtcctttgtcaagatctgacacacacggaatcgagaacaaccacggaatcgagaaatggcacggaatcgagaagaggagaagtctgccgttactgccctgtggggcaaggtgacacggaatcgagaaggtgcacggaatcgagaaaggccacggaatcgagaaccttggacccagaggtcgactcggaccgatg

SEQ ID NO: 15560 - DNA, 203 bp, Artificial sequence
  synthetic
ggcgcgccagtcctgatcttgacactgacacacacggaatcgagaacaaccacggaatcgagaaatggcacggaatcgagaagaggagaagtctgccgttactgccctgtggggcaaggtgacacggaatcgagaaggtgcacggaatcgagaaaggctgctggtggtctacccttggacccagaggtcgactcggaccgatg

SEQ ID NO: 15561 - DNA, 203 bp, Artificial sequence
  synthetic
ggcgcgccagtcctactgtcaacgctgacacacacggaatcgagaacaaccacggaatcgagaaatggcacggaatcgagaagaggagaagtctgccgttactgccctgtggggcaaggtgacacggaatcgagaaggtggtgaggccctgggcaggctgctggtggtctacccttggacccagaggtcgactcggaccgatg

SEQ ID NO: 15562 - DNA, 203 bp, Artificial sequence
  synthetic
ggcgcgccagtccttatgtcaactctgacacacacggaatcgagaacaaccacggaatcgagaaatggcacggaatcgagaagaggcacggaatcgagaaactgcacggaatcgagaagtgaacgtggatgaagttggtgcacggaatcgagaaaggccacggaatcgagaaccttggacccagaggtcgactcggaccgatg

SEQ ID NO: 15563 - DNA, 203 bp, Artificial sequence
  synthetic
ggcgcgccagtcctctgtcaaggactgacacacacggaatcgagaacaaccacggaatcgagaaatggcacggaatcgagaagaggcacggaatcgagaaactgcacggaatcgagaagtgaacgtggatgaagttggtggtgaggccctgggcaggccacggaatcgagaaccttggacccagaggtcgactcggaccgatg

SEQ ID NO: 15564 - DNA, 203 bp, Artificial sequence
  synthetic
ggcgcgccagtcctgcgtcgtgttctgacacacacggaatcgagaacaaccacggaatcgagaaatggcacggaatcgagaagaggcacggaatcgagaaactgcacggaatcgagaagtgacacggaatcgagaaggtggtgaggccctgggcaggccacggaatcgagaaccttggacccagaggtcgactcggaccgatg

SEQ ID NO: 15565 - DNA, 203 bp, Artificial sequence
  synthetic
ggcgcgccagtccttcgacgcaccctgacacacacggaatcgagaacaaccacggaatcgagaaatggcacggaatcgagaagaggcacggaatcgagaaactgccctgtggggcaaggtgaacgtggatgaagttggtggtgaggccctgggcaggccacggaatcgagaaccttggacccagaggtcgactcggaccgatg

SEQ ID NO: 15566 - DNA, 203 bp, Artificial sequence
  synthetic
ggcgcgccagtcctttagcgacgcctgacacacacggaatcgagaacaaccacggaatcgagaaatggcacggaatcgagaagaggcacggaatcgagaaactgccctgtggggcaaggtgacacggaatcgagaaggtgcacggaatcgagaaaggccacggaatcgagaaccttggacccagaggtcgactcggaccgatg

SEQ ID NO: 15567 - DNA, 203 bp, Artificial sequence
  synthetic
ggcgcgccagtcctgcaacgacgcctgacacacacggaatcgagaacaaccacggaatcgagaaatggcacggaatcgagaagaggcacggaatcgagaaactgccctgtggggcaaggtgacacggaatcgagaaggtgcacggaatcgagaaaggctgctggtggtctacccttggacccagaggtcgactcggaccgatg

SEQ ID NO: 15568 - DNA, 203 bp, Artificial sequence
  synthetic
ggcgcgccagtcctgattcaggttctgacacacacggaatcgagaacaaccacggaatcgagaaatggtgcatctgactcctgaggagaagtctgccgttactgcacggaatcgagaagtgaacgtggatgaagttggtgcacggaatcgagaaaggctgctggtggtctacccttggacccagaggtcgactcggaccgatg

SEQ ID NO: 15569 - DNA, 203 bp, Artificial sequence
  synthetic
ggcgcgccagtcctgtgttctctactgacacacacggaatcgagaacaaccacggaatcgagaaatggtgcatctgactcctgaggagaagtctgccgttactgcacggaatcgagaagtgacacggaatcgagaaggtggtgaggccctgggcaggctgctggtggtctacccttggacccagaggtcgactcggaccgatg

SEQ ID NO: 15570 - DNA, 203 bp, Artificial sequence
  synthetic
ggcgcgccagtcctagactaaattctgacacacacggaatcgagaacaaccacggaatcgagaaatggtgcatctgactcctgaggagaagtctgccgttactgccctgtggggcaaggtgaacgtggatgaagttggtgcacggaatcgagaaaggctgctggtggtctacccttggacccagaggtcgactcggaccgatg

SEQ ID NO: 15571 - DNA, 203 bp, Artificial sequence
  synthetic
ggcgcgccagtcctggatactaaactgacacacacggaatcgagaacaaccacggaatcgagaaatggtgcatctgactcctgaggagaagtctgccgttactgccctgtggggcaaggtgaacgtggatgaagttggtggtgaggccctgggcaggccacggaatcgagaaccttggacccagaggtcgactcggaccgatg

SEQ ID NO: 15572 - DNA, 203 bp, Artificial sequence
  synthetic
ggcgcgccagtcctgtttagtcgcctgacacacacggaatcgagaacaaccacggaatcgagaaatggtgcatctgactcctgaggagaagtctgccgttactgccctgtggggcaaggtgacacggaatcgagaaggtggtgaggccctgggcaggccacggaatcgagaaccttggacccagaggtcgactcggaccgatg

SEQ ID NO: 15573 - DNA, 203 bp, Artificial sequence
  synthetic
ggcgcgccagtcctaattttagtcctgacacacacggaatcgagaacaaccacggaatcgagaaatggtgcatctgactcctgaggcacggaatcgagaaactgcacggaatcgagaagtgaacgtggatgaagttggtggtgaggccctgggcaggctgctggtggtctacccttggacccagaggtcgactcggaccgatg

SEQ ID NO: 15574 - DNA, 203 bp, Artificial sequence
  synthetic
ggcgcgccagtcctcacttcacacctgacacacacggaatcgagaacaaccacggaatcgagaaatggtgcatctgactcctgaggcacggaatcgagaaactgcacggaatcgagaagtgacacggaatcgagaaggtggtgaggccctgggcaggctgctggtggtctacccttggacccagaggtcgactcggaccgatg

SEQ ID NO: 15575 - DNA, 203 bp, Artificial sequence
  synthetic
ggcgcgccagtcctgatcccgtccctgacacacacggaatcgagaacaaccacggaatcgagaaatggtgcatctgactcctgaggcacggaatcgagaaactgccctgtggggcaaggtgaacgtggatgaagttggtgcacggaatcgagaaaggctgctggtggtctacccttggacccagaggtcgactcggaccgatg

SEQ ID NO: 15576 - DNA, 203 bp, Artificial sequence
  synthetic
ggcgcgccagtcctagtcccgtgactgacacacacggaatcgagaacaaccacggaatcgagaaatggtgcatctgactcctgaggcacggaatcgagaaactgccctgtggggcaaggtgacacggaatcgagaaggtgcacggaatcgagaaaggccacggaatcgagaaccttggacccagaggtcgactcggaccgatg

SEQ ID NO: 15577 - DNA, 203 bp, Artificial sequence
  synthetic
ggcgcgccagtcctgtcccgatctctgacacacacggaatcgagaacaaccacggaatcgagaaatggtgcatctgactcctgaggcacggaatcgagaaactgccctgtggggcaaggtgacacggaatcgagaaggtgcacggaatcgagaaaggctgctggtggtctacccttggacccagaggtcgactcggaccgatg

SEQ ID NO: 15578 - DNA, 203 bp, Artificial sequence
  synthetic
ggcgcgccagtccttcaatcccgtctgacacacacggaatcgagaacaaccacggaatcgagaaatggtgcatctgactcctgaggcacggaatcgagaaactgccctgtggggcaaggtgacacggaatcgagaaggtggtgaggccctgggcaggctgctggtggtctacccttggacccagaggtcgactcggaccgatg

SEQ ID NO: 15579 - DNA, 203 bp, Artificial sequence
  synthetic
ggcgcgccagtcctttgtcccgagctgacacacacggaatcgagaacaacctcaaacagacaccatggcacggaatcgagaagaggagaagtctgccgttactgcacggaatcgagaagtgaacgtggatgaagttggtgcacggaatcgagaaaggctgctggtggtctacccttggacccagaggtcgactcggaccgatg

SEQ ID NO: 15580 - DNA, 203 bp, Artificial sequence
  synthetic
ggcgcgccagtccttatcgggattctgacacacacggaatcgagaacaacctcaaacagacaccatggcacggaatcgagaagaggagaagtctgccgttactgcacggaatcgagaagtgacacggaatcgagaaggtgcacggaatcgagaaaggccacggaatcgagaaccttggacccagaggtcgactcggaccgatg

SEQ ID NO: 15581 - DNA, 203 bp, Artificial sequence
  synthetic
ggcgcgccagtcctttgcacgggactgacacacacggaatcgagaacaacctcaaacagacaccatggcacggaatcgagaagaggagaagtctgccgttactgcacggaatcgagaagtgacacggaatcgagaaggtggtgaggccctgggcaggccacggaatcgagaaccttggacccagaggtcgactcggaccgatg

SEQ ID NO: 15582 - DNA, 203 bp, Artificial sequence
  synthetic
ggcgcgccagtcctatcgggatatctgacacacacggaatcgagaacaacctcaaacagacaccatggcacggaatcgagaagaggagaagtctgccgttactgcacggaatcgagaagtgacacggaatcgagaaggtggtgaggccctgggcaggctgctggtggtctacccttggacccagaggtcgactcggaccgatg

SEQ ID NO: 15583 - DNA, 203 bp, Artificial sequence
  synthetic
ggcgcgccagtccttcaccgggacctgacacacacggaatcgagaacaacctcaaacagacaccatggcacggaatcgagaagaggagaagtctgccgttactgccctgtggggcaaggtgaacgtggatgaagttggtggtgaggccctgggcaggccacggaatcgagaaccttggacccagaggtcgactcggaccgatg

SEQ ID NO: 15584 - DNA, 203 bp, Artificial sequence
  synthetic
ggcgcgccagtcctgtcgggacctctgacacacacggaatcgagaacaacctcaaacagacaccatggcacggaatcgagaagaggagaagtctgccgttactgccctgtggggcaaggtgaacgtggatgaagttggtggtgaggccctgggcaggctgctggtggtctacccttggacccagaggtcgactcggaccgatg

SEQ ID NO: 15585 - DNA, 203 bp, Artificial sequence
  synthetic
ggcgcgccagtcctggtcgggatcctgacacacacggaatcgagaacaacctcaaacagacaccatggcacggaatcgagaagaggagaagtctgccgttactgccctgtggggcaaggtgacacggaatcgagaaggtgcacggaatcgagaaaggccacggaatcgagaaccttggacccagaggtcgactcggaccgatg

SEQ ID NO: 15586 - DNA, 203 bp, Artificial sequence
  synthetic
ggcgcgccagtcctctcttacggtctgacacacacggaatcgagaacaacctcaaacagacaccatggcacggaatcgagaagaggcacggaatcgagaaactgcacggaatcgagaagtgaacgtggatgaagttggtgcacggaatcgagaaaggctgctggtggtctacccttggacccagaggtcgactcggaccgatg

SEQ ID NO: 15587 - DNA, 203 bp, Artificial sequence
  synthetic
ggcgcgccagtcctaggcatgtaactgacacacacggaatcgagaacaacctcaaacagacaccatggcacggaatcgagaagaggcacggaatcgagaaactgcacggaatcgagaagtgacacggaatcgagaaggtgcacggaatcgagaaaggccacggaatcgagaaccttggacccagaggtcgactcggaccgatg

SEQ ID NO: 15588 - DNA, 203 bp, Artificial sequence
  synthetic
ggcgcgccagtcctatgaggcattctgacacacacggaatcgagaacaacctcaaacagacaccatggcacggaatcgagaagaggcacggaatcgagaaactgccctgtggggcaaggtgaacgtggatgaagttggtgcacggaatcgagaaaggctgctggtggtctacccttggacccagaggtcgactcggaccgatg

SEQ ID NO: 15589 - DNA, 203 bp, Artificial sequence
  synthetic
ggcgcgccagtccttgaggcatttctgacacacacggaatcgagaacaacctcaaacagacaccatggcacggaatcgagaagaggcacggaatcgagaaactgccctgtggggcaaggtgaacgtggatgaagttggtggtgaggccctgggcaggccacggaatcgagaaccttggacccagaggtcgactcggaccgatg

SEQ ID NO: 15590 - DNA, 203 bp, Artificial sequence
  synthetic
ggcgcgccagtccttctgggttcactgacacacacggaatcgagaacaacctcaaacagacaccatggtgcatctgactcctgaggagaagtctgccgttactgcacggaatcgagaagtgaacgtggatgaagttggtgcacggaatcgagaaaggccacggaatcgagaaccttggacccagaggtcgactcggaccgatg

SEQ ID NO: 15591 - DNA, 203 bp, Artificial sequence
  synthetic
ggcgcgccagtccttttgaaccctctgacacacacggaatcgagaacaacctcaaacagacaccatggtgcatctgactcctgaggagaagtctgccgttactgcacggaatcgagaagtgaacgtggatgaagttggtgcacggaatcgagaaaggctgctggtggtctacccttggacccagaggtcgactcggaccgatg

SEQ ID NO: 15592 - DNA, 203 bp, Artificial sequence
  synthetic
ggcgcgccagtcctacacgttacactgacacacacggaatcgagaacaacctcaaacagacaccatggtgcatctgactcctgaggagaagtctgccgttactgcacggaatcgagaagtgaacgtggatgaagttggtggtgaggccctgggcaggccacggaatcgagaaccttggacccagaggtcgactcggaccgatg

SEQ ID NO: 15593 - DNA, 203 bp, Artificial sequence
  synthetic
ggcgcgccagtcctacacgttctgctgacacacacggaatcgagaacaacctcaaacagacaccatggtgcatctgactcctgaggagaagtctgccgttactgcacggaatcgagaagtgaacgtggatgaagttggtggtgaggccctgggcaggctgctggtggtctacccttggacccagaggtcgactcggaccgatg

SEQ ID NO: 15594 - DNA, 203 bp, Artificial sequence
  synthetic
ggcgcgccagtcctctgaacgtgtctgacacacacggaatcgagaacaacctcaaacagacaccatggtgcatctgactcctgaggagaagtctgccgttactgcacggaatcgagaagtgacacggaatcgagaaggtgcacggaatcgagaaaggctgctggtggtctacccttggacccagaggtcgactcggaccgatg

SEQ ID NO: 15595 - DNA, 203 bp, Artificial sequence
  synthetic
ggcgcgccagtccttcgcactttgctgacacacacggaatcgagaacaacctcaaacagacaccatggtgcatctgactcctgaggagaagtctgccgttactgccctgtggggcaaggtgaacgtggatgaagttggtgcacggaatcgagaaaggctgctggtggtctacccttggacccagaggtcgactcggaccgatg

SEQ ID NO: 15596 - DNA, 203 bp, Artificial sequence
  synthetic
ggcgcgccagtcctcccgggacgactgacacacacggaatcgagaacaacctcaaacagacaccatggtgcatctgactcctgaggagaagtctgccgttactgccctgtggggcaaggtgaacgtggatgaagttggtggtgaggccctgggcaggccacggaatcgagaaccttggacccagaggtcgactcggaccgatg

SEQ ID NO: 15597 - DNA, 203 bp, Artificial sequence
  synthetic
ggcgcgccagtcctcaggacgagcctgacacacacggaatcgagaacaacctcaaacagacaccatggtgcatctgactcctgaggagaagtctgccgttactgccctgtggggcaaggtgacacggaatcgagaaggtggtgaggccctgggcaggctgctggtggtctacccttggacccagaggtcgactcggaccgatg

SEQ ID NO: 15598 - DNA, 203 bp, Artificial sequence
  synthetic
ggcgcgccagtccttgtaagaactctgacacacacggaatcgagaacaacctcaaacagacaccatggtgcatctgactcctgaggcacggaatcgagaaactgcacggaatcgagaagtgaacgtggatgaagttggtgcacggaatcgagaaaggccacggaatcgagaaccttggacccagaggtcgactcggaccgatg

SEQ ID NO: 15599 - DNA, 203 bp, Artificial sequence
  synthetic
ggcgcgccagtcctcttgaaacggctgacacacacggaatcgagaacaacctcaaacagacaccatggtgcatctgactcctgaggcacggaatcgagaaactgcacggaatcgagaagtgaacgtggatgaagttggtgcacggaatcgagaaaggctgctggtggtctacccttggacccagaggtcgactcggaccgatg

SEQ ID NO: 15600 - DNA, 203 bp, Artificial sequence
  synthetic
ggcgcgccagtcctttgaccacggctgacacacacggaatcgagaacaacctcaaacagacaccatggtgcatctgactcctgaggcacggaatcgagaaactgcacggaatcgagaagtgaacgtggatgaagttggtggtgaggccctgggcaggccacggaatcgagaaccttggacccagaggtcgactcggaccgatg

SEQ ID NO: 15601 - DNA, 203 bp, Artificial sequence
  synthetic
ggcgcgccagtcctgcggtcacggctgacacacacggaatcgagaacaacctcaaacagacaccatggtgcatctgactcctgaggcacggaatcgagaaactgcacggaatcgagaagtgacacggaatcgagaaggtggtgaggccctgggcaggccacggaatcgagaaccttggacccagaggtcgactcggaccgatg

SEQ ID NO: 15602 - DNA, 203 bp, Artificial sequence
  synthetic
ggcgcgccagtcctagctgcacggctgacacacacggaatcgagaacaacctcaaacagacaccatggtgcatctgactcctgaggcacggaatcgagaaactgcacggaatcgagaagtgacacggaatcgagaaggtggtgaggccctgggcaggctgctggtggtctacccttggacccagaggtcgactcggaccgatg

SEQ ID NO: 15603 - DNA, 203 bp, Artificial sequence
  synthetic
ggcgcgccagtcctacagctacggctgacacacacggaatcgagaacaacctcaaacagacaccatggtgcatctgactcctgaggcacggaatcgagaaactgccctgtggggcaaggtgaacgtggatgaagttggtggtgaggccctgggcaggccacggaatcgagaaccttggacccagaggtcgactcggaccgatg

SEQ ID NO: 15604 - DNA, 203 bp, Artificial sequence
  synthetic
ggcgcgccagtcctaaattcacggctgacacacacggaatcgagaacaacctcaaacagacaccatggtgcatctgactcctgaggcacggaatcgagaaactgccctgtggggcaaggtgacacggaatcgagaaggtggtgaggccctgggcaggctgctggtggtctacccttggacccagaggtcgactcggaccgatg

SEQ ID NO: 15605 - DNA, 203 bp, Artificial sequence
  synthetic
ggcgcgccagtcctttggatacggctgacacaccggcgggtactagcaacccggcgggtacaccatggccggcgggtctcctgaggccggcgggtccgttactgccggcgggtgcaaggtgaccggcgggtaagttggtgccggcgggttgggcaggcccggcgggttctacccttccggcgggtggtcgactcggaccgatg

SEQ ID NO: 15606 - DNA, 203 bp, Artificial sequence
  synthetic
ggcgcgccagtcctccgtggttaactgacacaccggcgggtactagcaacccggcgggtacaccatggccggcgggtctcctgaggccggcgggtccgttactgccggcgggtgcaaggtgaccggcgggtaagttggtgccggcgggttgggcaggcccggcgggttctacccttccggcgggtggtcgactcggaccgatg

SEQ ID NO: 15607 - DNA, 203 bp, Artificial sequence
  synthetic
ggcgcgccagtcctccgttagtatctgacacaccggcgggtactagcaacccggcgggtacaccatggccggcgggtctcctgaggccggcgggtccgttactgccggcgggtgcaaggtgaccggcgggtaagttggtgccggcgggttgggcaggcccggcgggttctacccttccggcgggtggtcgactcggaccgatg

SEQ ID NO: 15608 - DNA, 203 bp, Artificial sequence
  synthetic
ggcgcgccagtcctccgtgaacttctgacacaccggcgggtactagcaacccggcgggtacaccatggccggcgggtctcctgaggccggcgggtccgttactgccggcgggtgcaaggtgaccggcgggtaagttggtgccggcgggttgggcaggcccggcgggttctacccttccggcgggtggtcgactcggaccgatg

SEQ ID NO: 15609 - DNA, 203 bp, Artificial sequence
  synthetic
ggcgcgccagtcctccgtcgatcgctgacacaccggcgggtactagcaacccggcgggtacaccatggccggcgggtctcctgaggccggcgggtccgttactgccggcgggtgcaaggtgaccggcgggtaagttggtgccggcgggttgggcaggcccggcgggttctacccttccggcgggtggtcgactcggaccgatg

SEQ ID NO: 15610 - DNA, 203 bp, Artificial sequence
  synthetic
ggcgcgccagtcctccgtctaggcctgacacaccggcgggtactagcaacccggcgggtacaccatggccggcgggtctcctgaggccggcgggtccgttactgccggcgggtgcaaggtgaccggcgggtaagttggtgccggcgggttgggcaggcccggcgggttctacccttccggcgggtggtcgactcggaccgatg

SEQ ID NO: 15611 - DNA, 203 bp, Artificial sequence
  synthetic
ggcgcgccagtcctccgtgcaccactgacacaccggcgggtactagcaacccggcgggtacaccatggccggcgggtctcctgaggccggcgggtccgttactgccggcgggtgcaaggtgaccggcgggtaagttggtgccggcgggttgggcaggcccggcgggttctacccttccggcgggtggtcgactcggaccgatg

SEQ ID NO: 15612 - DNA, 203 bp, Artificial sequence
  synthetic
ggcgcgccagtcctccgttgtcttctgacacaccggcgggtactagcaacctcaaacagacaccatggtgcatctgactcctgaggagaagtctgccgttactgccctgtggggcaaggtgaacgtggatgaagttggtggtgaggccctgggcaggctgctggtggtctaccccacggaatcgagaacgactcggaccgatg

SEQ ID NO: 15613 - DNA, 203 bp, Artificial sequence
  synthetic
ggcgcgccagtccttgtcttgcggctgacacacgtcaattcctttacaaccgtcaattcctttaatggcgtcaattcctttagaggagaagtctgccgttactgcgtcaattcctttagtgaacgtggatgaagttggtggtgaggccctgggcaggccgtcaattcctttaccttggacccagaggtcgactcggaccgatg

SEQ ID NO: 15614 - DNA, 203 bp, Artificial sequence
  synthetic
ggcgcgccagtcctcgtgaggcggctgacacacgtcaattcctttacaaccgtcaattcctttaatggcgtcaattcctttagaggagaagtctgccgttactgcgtcaattcctttagtgacgtcaattcctttaggtggtgaggccctgggcaggccgtcaattcctttaccttggacccagaggtcgactcggaccgatg

SEQ ID NO: 15615 - DNA, 203 bp, Artificial sequence
  synthetic
ggcgcgccagtcctccgcagacctctgacacacgtcaattcctttacaaccgtcaattcctttaatggcgtcaattcctttagaggagaagtctgccgttactgcgtcaattcctttagtgacgtcaattcctttaggtggtgaggccctgggcaggctgctggtggtctacccttggacccagaggtcgactcggaccgatg

SEQ ID NO: 15616 - DNA, 203 bp, Artificial sequence
  synthetic
ggcgcgccagtcctccgctgctgtctgacacacgtcaattcctttacaaccgtcaattcctttaatggcgtcaattcctttagaggcgtcaattcctttaactgccctgtggggcaaggtgaacgtggatgaagttggtgcgtcaattcctttaaggctgctggtggtctacccttggacccagaggtcgactcggaccgatg

SEQ ID NO: 15617 - DNA, 203 bp, Artificial sequence
  synthetic
ggcgcgccagtcctccgcaagcaactgacacacgtcaattcctttacaaccgtcaattcctttaatggcgtcaattcctttagaggcgtcaattcctttaactgccctgtggggcaaggtgaacgtggatgaagttggtggtgaggccctgggcaggctgctggtggtctacccttggacccagaggtcgactcggaccgatg

SEQ ID NO: 15618 - DNA, 203 bp, Artificial sequence
  synthetic
ggcgcgccagtcctccgccttttactgacacacgtcaattcctttacaaccgtcaattcctttaatggcgtcaattcctttagaggcgtcaattcctttaactgccctgtggggcaaggtgacgtcaattcctttaggtggtgaggccctgggcaggccgtcaattcctttaccttggacccagaggtcgactcggaccgatg

SEQ ID NO: 15619 - DNA, 203 bp, Artificial sequence
  synthetic
ggcgcgccagtcctgggatccaccctgacacacgtcaattcctttacaaccgtcaattcctttaatggcgtcaattcctttagaggcgtcaattcctttaactgcgtcaattcctttagtgacgtcaattcctttaggtgcgtcaattcctttaaggctgctggtggtctacccttggacccagaggtcgactcggaccgatg

SEQ ID NO: 15620 - DNA, 203 bp, Artificial sequence
  synthetic
ggcgcgccagtcctacaagacattctgacacacgtcaattcctttacaaccgtcaattcctttaatggtgcatctgactcctgaggagaagtctgccgttactgccctgtggggcaaggtgaacgtggatgaagttggtgcgtcaattcctttaaggctgctggtggtctacccttggacccagaggtcgactcggaccgatg

SEQ ID NO: 15621 - DNA, 203 bp, Artificial sequence
  synthetic
ggcgcgccagtcctatgtctggacctgacacacgtcaattcctttacaaccgtcaattcctttaatggtgcatctgactcctgaggagaagtctgccgttactgccctgtggggcaaggtgaacgtggatgaagttggtggtgaggccctgggcaggccgtcaattcctttaccttggacccagaggtcgactcggaccgatg

SEQ ID NO: 15622 - DNA, 203 bp, Artificial sequence
  synthetic
ggcgcgccagtcctcatgtcttgcctgacacacgtcaattcctttacaaccgtcaattcctttaatggtgcatctgactcctgaggagaagtctgccgttactgccctgtggggcaaggtgaacgtggatgaagttggtggtgaggccctgggcaggctgctggtggtctacccttggacccagaggtcgactcggaccgatg

SEQ ID NO: 15623 - DNA, 203 bp, Artificial sequence
  synthetic
ggcgcgccagtccttatgtctgtactgacacacgtcaattcctttacaaccgtcaattcctttaatggtgcatctgactcctgaggagaagtctgccgttactgccctgtggggcaaggtgacgtcaattcctttaggtggtgaggccctgggcaggccgtcaattcctttaccttggacccagaggtcgactcggaccgatg

SEQ ID NO: 15624 - DNA, 203 bp, Artificial sequence
  synthetic
ggcgcgccagtcctagacatgtctctgacacacgtcaattcctttacaaccgtcaattcctttaatggtgcatctgactcctgaggagaagtctgccgttactgccctgtggggcaaggtgacgtcaattcctttaggtggtgaggccctgggcaggctgctggtggtctacccttggacccagaggtcgactcggaccgatg

SEQ ID NO: 15625 - DNA, 203 bp, Artificial sequence
  synthetic
ggcgcgccagtccttatgtctaacctgacacacgtcaattcctttacaaccgtcaattcctttaatggtgcatctgactcctgaggagaagtctgccgttactgcgtcaattcctttagtgaacgtggatgaagttggtgcgtcaattcctttaaggctgctggtggtctacccttggacccagaggtcgactcggaccgatg

SEQ ID NO: 15626 - DNA, 203 bp, Artificial sequence
  synthetic
ggcgcgccagtcctgtctgtcatactgacacacgtcaattcctttacaaccgtcaattcctttaatggtgcatctgactcctgaggagaagtctgccgttactgcgtcaattcctttagtgaacgtggatgaagttggtggtgaggccctgggcaggccgtcaattcctttaccttggacccagaggtcgactcggaccgatg

SEQ ID NO: 15627 - DNA, 203 bp, Artificial sequence
  synthetic
ggcgcgccagtcctcgtaatgtcactgacacacgtcaattcctttacaaccgtcaattcctttaatggtgcatctgactcctgaggagaagtctgccgttactgcgtcaattcctttagtgacgtcaattcctttaggtgcgtcaattcctttaaggctgctggtggtctacccttggacccagaggtcgactcggaccgatg

SEQ ID NO: 15628 - DNA, 203 bp, Artificial sequence
  synthetic
ggcgcgccagtcctgcgattagcactgacacacgtcaattcctttacaaccgtcaattcctttaatggtgcatctgactcctgaggagaagtctgccgttactgcgtcaattcctttagtgacgtcaattcctttaggtggtgaggccctgggcaggccgtcaattcctttaccttggacccagaggtcgactcggaccgatg

SEQ ID NO: 15629 - DNA, 203 bp, Artificial sequence
  synthetic
ggcgcgccagtcctgtatccattactgacacacgtcaattcctttacaaccgtcaattcctttaatggtgcatctgactcctgaggcgtcaattcctttaactgccctgtggggcaaggtgaacgtggatgaagttggtgcgtcaattcctttaaggccgtcaattcctttaccttggacccagaggtcgactcggaccgatg

SEQ ID NO: 15630 - DNA, 203 bp, Artificial sequence
  synthetic
ggcgcgccagtcctatcctaatccctgacacacgtcaattcctttacaaccgtcaattcctttaatggtgcatctgactcctgaggcgtcaattcctttaactgccctgtggggcaaggtgaacgtggatgaagttggtgcgtcaattcctttaaggctgctggtggtctacccttggacccagaggtcgactcggaccgatg

SEQ ID NO: 15631 - DNA, 203 bp, Artificial sequence
  synthetic
ggcgcgccagtcctttcattagggctgacacacgtcaattcctttacaaccgtcaattcctttaatggtgcatctgactcctgaggcgtcaattcctttaactgccctgtggggcaaggtgaacgtggatgaagttggtggtgaggccctgggcaggctgctggtggtctacccttggacccagaggtcgactcggaccgatg

SEQ ID NO: 15632 - DNA, 203 bp, Artificial sequence
  synthetic
ggcgcgccagtcctaaagcgtaatctgacacacgtcaattcctttacaaccgtcaattcctttaatggtgcatctgactcctgaggcgtcaattcctttaactgcgtcaattcctttagtgaacgtggatgaagttggtgcgtcaattcctttaaggccgtcaattcctttaccttggacccagaggtcgactcggaccgatg

SEQ ID NO: 15633 - DNA, 203 bp, Artificial sequence
  synthetic
ggcgcgccagtccttagattagagctgacacacgtcaattcctttacaaccgtcaattcctttaatggtgcatctgactcctgaggcgtcaattcctttaactgcgtcaattcctttagtgaacgtggatgaagttggtgcgtcaattcctttaaggctgctggtggtctacccttggacccagaggtcgactcggaccgatg

SEQ ID NO: 15634 - DNA, 203 bp, Artificial sequence
  synthetic
ggcgcgccagtcctcctggattacctgacacacgtcaattcctttacaaccgtcaattcctttaatggtgcatctgactcctgaggcgtcaattcctttaactgcgtcaattcctttagtgaacgtggatgaagttggtggtgaggccctgggcaggccgtcaattcctttaccttggacccagaggtcgactcggaccgatg

SEQ ID NO: 15635 - DNA, 203 bp, Artificial sequence
  synthetic
ggcgcgccagtcctctggtctaatctgacacacgtcaattcctttacaaccgtcaattcctttaatggtgcatctgactcctgaggcgtcaattcctttaactgcgtcaattcctttagtgaacgtggatgaagttggtggtgaggccctgggcaggctgctggtggtctacccttggacccagaggtcgactcggaccgatg

SEQ ID NO: 15636 - DNA, 203 bp, Artificial sequence
  synthetic
ggcgcgccagtcctaagctctaatctgacacacgtcaattcctttacaaccgtcaattcctttaatggtgcatctgactcctgaggcgtcaattcctttaactgcgtcaattcctttagtgacgtcaattcctttaggtggtgaggccctgggcaggccgtcaattcctttaccttggacccagaggtcgactcggaccgatg

SEQ ID NO: 15637 - DNA, 203 bp, Artificial sequence
  synthetic
ggcgcgccagtcctaactaatggtctgacacacgtcaattcctttacaaccgtcaattcctttaatggtgcatctgactcctgaggcgtcaattcctttaactgcgtcaattcctttagtgacgtcaattcctttaggtggtgaggccctgggcaggctgctggtggtctacccttggacccagaggtcgactcggaccgatg

SEQ ID NO: 15638 - DNA, 203 bp, Artificial sequence
  synthetic
ggcgcgccagtcctaccagtaatgctgacacacgtcaattcctttacaacctcaaacagacaccatggcgtcaattcctttagaggagaagtctgccgttactgccctgtggggcaaggtgaacgtggatgaagttggtgcgtcaattcctttaaggccgtcaattcctttaccttggacccagaggtcgactcggaccgatg

SEQ ID NO: 15639 - DNA, 203 bp, Artificial sequence
  synthetic
ggcgcgccagtccttcattactacctgacacacgtcaattcctttacaacctcaaacagacaccatggcgtcaattcctttagaggagaagtctgccgttactgccctgtggggcaaggtgaacgtggatgaagttggtgcgtcaattcctttaaggctgctggtggtctacccttggacccagaggtcgactcggaccgatg

SEQ ID NO: 15640 - DNA, 203 bp, Artificial sequence
  synthetic
ggcgcgccagtcctagtttgtaatctgacacacgtcaattcctttacaacctcaaacagacaccatggcgtcaattcctttagaggagaagtctgccgttactgccctgtggggcaaggtgaacgtggatgaagttggtggtgaggccctgggcaggctgctggtggtctacccttggacccagaggtcgactcggaccgatg

SEQ ID NO: 15641 - DNA, 203 bp, Artificial sequence
  synthetic
ggcgcgccagtcctaccctcattactgacacacgtcaattcctttacaacctcaaacagacaccatggcgtcaattcctttagaggagaagtctgccgttactgcgtcaattcctttagtgaacgtggatgaagttggtgcgtcaattcctttaaggctgctggtggtctacccttggacccagaggtcgactcggaccgatg

SEQ ID NO: 15642 - DNA, 203 bp, Artificial sequence
  synthetic
ggcgcgccagtcctagagtaatgtctgacacacgtcaattcctttacaacctcaaacagacaccatggcgtcaattcctttagaggagaagtctgccgttactgcgtcaattcctttagtgaacgtggatgaagttggtggtgaggccctgggcaggccgtcaattcctttaccttggacccagaggtcgactcggaccgatg

SEQ ID NO: 15643 - DNA, 203 bp, Artificial sequence
  synthetic
ggcgcgccagtcctctactaatgactgacacacgtcaattcctttacaacctcaaacagacaccatggcgtcaattcctttagaggagaagtctgccgttactgcgtcaattcctttagtgaacgtggatgaagttggtggtgaggccctgggcaggctgctggtggtctacccttggacccagaggtcgactcggaccgatg

SEQ ID NO: 15644 - DNA, 203 bp, Artificial sequence
  synthetic
ggcgcgccagtcctgggcattagtctgacacacgtcaattcctttacaacctcaaacagacaccatggcgtcaattcctttagaggagaagtctgccgttactgcgtcaattcctttagtgacgtcaattcctttaggtgcgtcaattcctttaaggctgctggtggtctacccttggacccagaggtcgactcggaccgatg

SEQ ID NO: 15645 - DNA, 203 bp, Artificial sequence
  synthetic
ggcgcgccagtcctctctcattagctgacacacgtcaattcctttacaacctcaaacagacaccatggcgtcaattcctttagaggcgtcaattcctttaactgccctgtggggcaaggtgaacgtggatgaagttggtgcgtcaattcctttaaggctgctggtggtctacccttggacccagaggtcgactcggaccgatg

SEQ ID NO: 15646 - DNA, 203 bp, Artificial sequence
  synthetic
ggcgcgccagtcctgttaatcgtgctgacacacgtcaattcctttacaacctcaaacagacaccatggcgtcaattcctttagaggcgtcaattcctttaactgccctgtggggcaaggtgacgtcaattcctttaggtgcgtcaattcctttaaggccgtcaattcctttaccttggacccagaggtcgactcggaccgatg

SEQ ID NO: 15647 - DNA, 203 bp, Artificial sequence
  synthetic
ggcgcgccagtcctattactcagcctgacacacgtcaattcctttacaacctcaaacagacaccatggcgtcaattcctttagaggcgtcaattcctttaactgccctgtggggcaaggtgacgtcaattcctttaggtgcgtcaattcctttaaggctgctggtggtctacccttggacccagaggtcgactcggaccgatg

SEQ ID NO: 15648 - DNA, 203 bp, Artificial sequence
  synthetic
ggcgcgccagtcctgtaatcactcctgacacacgtcaattcctttacaacctcaaacagacaccatggcgtcaattcctttagaggcgtcaattcctttaactgccctgtggggcaaggtgacgtcaattcctttaggtggtgaggccctgggcaggccgtcaattcctttaccttggacccagaggtcgactcggaccgatg

SEQ ID NO: 15649 - DNA, 203 bp, Artificial sequence
  synthetic
ggcgcgccagtccttccacattaactgacacacgtcaattcctttacaacctcaaacagacaccatggcgtcaattcctttagaggcgtcaattcctttaactgcgtcaattcctttagtgaacgtggatgaagttggtggtgaggccctgggcaggccgtcaattcctttaccttggacccagaggtcgactcggaccgatg

SEQ ID NO: 15650 - DNA, 203 bp, Artificial sequence
  synthetic
ggcgcgccagtcctgactaatctgctgacacacgtcaattcctttacaacctcaaacagacaccatggcgtcaattcctttagaggcgtcaattcctttaactgcgtcaattcctttagtgacgtcaattcctttaggtgcgtcaattcctttaaggctgctggtggtctacccttggacccagaggtcgactcggaccgatg

SEQ ID NO: 15651 - DNA, 203 bp, Artificial sequence
  synthetic
ggcgcgccagtcctttaatcgcaactgacacacgtcaattcctttacaacctcaaacagacaccatggcgtcaattcctttagaggcgtcaattcctttaactgcgtcaattcctttagtgacgtcaattcctttaggtggtgaggccctgggcaggccgtcaattcctttaccttggacccagaggtcgactcggaccgatg

SEQ ID NO: 15652 - DNA, 203 bp, Artificial sequence
  synthetic
ggcgcgccagtcctagtaatcgtcctgacacacgtcaattcctttacaacctcaaacagacaccatggcgtcaattcctttagaggcgtcaattcctttaactgcgtcaattcctttagtgacgtcaattcctttaggtggtgaggccctgggcaggctgctggtggtctacccttggacccagaggtcgactcggaccgatg

SEQ ID NO: 15653 - DNA, 203 bp, Artificial sequence
  synthetic
ggcgcgccagtcctatcgactaatctgacacacgtcaattcctttacaacctcaaacagacaccatggtgcatctgactcctgaggagaagtctgccgttactgccctgtggggcaaggtgaacgtggatgaagttggtgcgtcaattcctttaaggccgtcaattcctttaccttggacccagaggtcgactcggaccgatg

SEQ ID NO: 15654 - DNA, 203 bp, Artificial sequence
  synthetic
ggcgcgccagtcctccaaggattactgacacacgtcaattcctttacaacctcaaacagacaccatggtgcatctgactcctgaggagaagtctgccgttactgcgtcaattcctttagtgaacgtggatgaagttggtgcgtcaattcctttaaggccgtcaattcctttaccttggacccagaggtcgactcggaccgatg

SEQ ID NO: 15655 - DNA, 203 bp, Artificial sequence
  synthetic
ggcgcgccagtcctgattagggacctgacacacgtcaattcctttacaacctcaaacagacaccatggtgcatctgactcctgaggcgtcaattcctttaactgccctgtggggcaaggtgaacgtggatgaagttggtggtgaggccctgggcaggccgtcaattcctttaccttggacccagaggtcgactcggaccgatg

SEQ ID NO: 15656 - DNA, 203 bp, Artificial sequence
  synthetic
ggcgcgccagtccttccttgtaatctgacacacgtcaattcctttacaacctcaaacagacaccatggtgcatctgactcctgaggcgtcaattcctttaactgccctgtggggcaaggtgacgtcaattcctttaggtgcgtcaattcctttaaggctgctggtggtctacccttggacccagaggtcgactcggaccgatg

SEQ ID NO: 15657 - DNA, 203 bp, Artificial sequence
  synthetic
ggcgcgccagtcctcgtaacattactgacacacgtcaattcctttacaacctcaaacagacaccatggtgcatctgactcctgaggcgtcaattcctttaactgcgtcaattcctttagtgacgtcaattcctttaggtgcgtcaattcctttaaggccgtcaattcctttaccttggacccagaggtcgactcggaccgatg

SEQ ID NO: 15658 - DNA, 203 bp, Artificial sequence
  synthetic
ggcgcgccagtccttgattacctcctgacacacgtcaattcctttacaacctcaaacagacaccatggtgcatctgactcctgaggcgtcaattcctttaactgcgtcaattcctttagtgacgtcaattcctttaggtggtgaggccctgggcaggctgctggtggtctacccttggacccagaggtcgactcggaccgatg

SEQ ID NO: 15659 - DNA, 203 bp, Artificial sequence
  synthetic
ggcgcgccagtcctccctaatgaactgacacatactccctcactagcaactactcccagacaccatggtactcccgactcctgaggtactccctgccgttactgtactcccgggcaaggtgatactccctgaagttggtgtactccccctgggcaggctactcccggtctaccctttactcccgaggtcgactcggaccgatg

SEQ ID NO: 15660 - DNA, 203 bp, Artificial sequence
  synthetic
ggcgcgccagtcctctaactaatgctgacacattcttggcaaatagcaacctcaaacagacaccatggtgcatctgactcctgaggagaagtctgccgttactgccctgtggggcaaggtgaacgtggatgaagttggtggtgaggccctgggcaggctgctggtggtctacccttggacccagaggtcgactcggaccgatg

SEQ ID NO: 15661 - DNA, 203 bp, Artificial sequence
  synthetic
ggcgcgccagtcctcagcgtaatgctgacacattcttggcaaatagcaacctcaaacagacaccatggtgcatctgactcctgaggagaagtctgccgttactgccctgtggggcaaggtgaacgtggatgaagttggtggtgaggccctgggcaggcttcttggcaaatacccttggacccagaggtcgactcggaccgatg

SEQ ID NO: 15662 - DNA, 203 bp, Artificial sequence
  synthetic
ggcgcgccagtcctgcattagtgtctgacacattcttggcaaatagcaacctcaaacagacaccatggtgcatctgactcctgaggagaagtctgccgttactgccctgtggggcaaggtgaacgtggatgaagttggtgttcttggcaaaggcaggctgctggtggtctacccttggacccagaggtcgactcggaccgatg

SEQ ID NO: 15663 - DNA, 203 bp, Artificial sequence
  synthetic
ggcgcgccagtcctgagcgttaatctgacacattcttggcaaatagcaacctcaaacagacaccatggtgcatctgactcctgaggagaagtctgccgttactgccctgtggggcaaggtgattcttggcaaagttggtggtgaggccctgggcaggctgctggtggtctacccttggacccagaggtcgactcggaccgatg

SEQ ID NO: 15664 - DNA, 203 bp, Artificial sequence
  synthetic
ggcgcgccagtcctgcgacgattactgacacattcttggcaaatagcaacctcaaacagacaccatggtgcatctgactcctgaggagaagtctgccgttactgttcttggcaaaaaggtgaacgtggatgaagttggtggtgaggccctgggcaggcttcttggcaaatacccttggacccagaggtcgactcggaccgatg

SEQ ID NO: 15665 - DNA, 203 bp, Artificial sequence
  synthetic
ggcgcgccagtccttaatcttcacctgacacattcttggcaaatagcaacctcaaacagacaccatggtgcatctgactcctgaggagaagtctgccgttactgttcttggcaaaaaggtgaacgtggatgaagttggtgttcttggcaaaggcaggctgctggtggtctacccttggacccagaggtcgactcggaccgatg

SEQ ID NO: 15666 - DNA, 203 bp, Artificial sequence
  synthetic
ggcgcgccagtcctcagattactcctgacacattcttggcaaatagcaacctcaaacagacaccatggtgcatctgactcctgaggagaagtctgccgttactgttcttggcaaaaaggtgaacgtggatgaagttggtgttcttggcaaaggcaggcttcttggcaaatacccttggacccagaggtcgactcggaccgatg

SEQ ID NO: 15667 - DNA, 203 bp, Artificial sequence
  synthetic
ggcgcgccagtccttgtagattaactgacacattcttggcaaatagcaacctcaaacagacaccatggtgcatctgactcctgaggagaagtctgccgttactgttcttggcaaaaaggtgattcttggcaaagttggtggtgaggccctgggcaggctgctggtggtctacccttggacccagaggtcgactcggaccgatg

SEQ ID NO: 15668 - DNA, 203 bp, Artificial sequence
  synthetic
ggcgcgccagtccttctaatgaacctgacacattcttggcaaatagcaacctcaaacagacaccatggtgcatctgactcctgaggttcttggcaaagttactgccctgtggggcaaggtgaacgtggatgaagttggtggtgaggccctgggcaggctgctggtggtctacccttggacccagaggtcgactcggaccgatg

SEQ ID NO: 15669 - DNA, 203 bp, Artificial sequence
  synthetic
ggcgcgccagtcctattagttagtctgacacattcttggcaaatagcaacctcaaacagacaccatggtgcatctgactcctgaggttcttggcaaagttactgccctgtggggcaaggtgaacgtggatgaagttggtggtgaggccctgggcaggcttcttggcaaatacccttggacccagaggtcgactcggaccgatg

SEQ ID NO: 15670 - DNA, 203 bp, Artificial sequence
  synthetic
ggcgcgccagtccttggtaatcggctgacacattcttggcaaatagcaacctcaaacagacaccatggtgcatctgactcctgaggttcttggcaaagttactgttcttggcaaaaaggtgaacgtggatgaagttggtgttcttggcaaaggcaggctgctggtggtctacccttggacccagaggtcgactcggaccgatg

SEQ ID NO: 15671 - DNA, 203 bp, Artificial sequence
  synthetic
ggcgcgccagtcctatccattacactgacacattcttggcaaatagcaacctcaaacagacaccatggtgcatctgactcctgaggttcttggcaaagttactgttcttggcaaaaaggtgattcttggcaaagttggtggtgaggccctgggcaggctgctggtggtctacccttggacccagaggtcgactcggaccgatg

SEQ ID NO: 15672 - DNA, 203 bp, Artificial sequence
  synthetic
ggcgcgccagtccttgattagcgactgacacattcttggcaaatagcaacctcaaacagacaccatggttcttggcaaacctgaggagaagtctgccgttactgttcttggcaaaaaggtgaacgtggatgaagttggtgttcttggcaaaggcaggcttcttggcaaatacccttggacccagaggtcgactcggaccgatg

SEQ ID NO: 15673 - DNA, 203 bp, Artificial sequence
  synthetic
ggcgcgccagtcctgtggtaatggctgacacattcttggcaaatagcaacctcaaacagacaccatggttcttggcaaacctgaggagaagtctgccgttactgttcttggcaaaaaggtgattcttggcaaagttggtggtgaggccctgggcaggctgctggtggtctacccttggacccagaggtcgactcggaccgatg

SEQ ID NO: 15674 - DNA, 203 bp, Artificial sequence
  synthetic
ggcgcgccagtcctcgtcattaccctgacacattcttggcaaatagcaacctcaaacagacaccatggttcttggcaaacctgaggagaagtctgccgttactgttcttggcaaaaaggtgattcttggcaaagttggtgttcttggcaaaggcaggctgctggtggtctacccttggacccagaggtcgactcggaccgatg

SEQ ID NO: 15675 - DNA, 203 bp, Artificial sequence
  synthetic
ggcgcgccagtcctcaggattaacctgacacattcttggcaaatagcaacctcaaacagacaccatggttcttggcaaacctgaggttcttggcaaagttactgccctgtggggcaaggtgaacgtggatgaagttggtggtgaggccctgggcaggctgctggtggtctacccttggacccagaggtcgactcggaccgatg

SEQ ID NO: 15676 - DNA, 203 bp, Artificial sequence
  synthetic
ggcgcgccagtcctcgtggtaatcctgacacattcttggcaaatagcaacctcaaacagacaccatggttcttggcaaacctgaggttcttggcaaagttactgccctgtggggcaaggtgaacgtggatgaagttggtggtgaggccctgggcaggcttcttggcaaatacccttggacccagaggtcgactcggaccgatg

SEQ ID NO: 15677 - DNA, 203 bp, Artificial sequence
  synthetic
ggcgcgccagtcctattaggcccactgacacattcttggcaaatagcaacctcaaacagacaccatggttcttggcaaacctgaggttcttggcaaagttactgccctgtggggcaaggtgattcttggcaaagttggtggtgaggccctgggcaggctgctggtggtctacccttggacccagaggtcgactcggaccgatg

SEQ ID NO: 15678 - DNA, 203 bp, Artificial sequence
  synthetic
ggcgcgccagtccttacattaacgctgacacattcttggcaaatagcaacctcaaacagacaccatggttcttggcaaacctgaggttcttggcaaagttactgccctgtggggcaaggtgattcttggcaaagttggtgttcttggcaaaggcaggcttcttggcaaatacccttggacccagaggtcgactcggaccgatg

SEQ ID NO: 15679 - DNA, 203 bp, Artificial sequence
  synthetic
ggcgcgccagtcctattactagtcctgacacattcttggcaaatagcaacctcaaacagacaccatggttcttggcaaacctgaggttcttggcaaagttactgttcttggcaaaaaggtgaacgtggatgaagttggtggtgaggccctgggcaggctgctggtggtctacccttggacccagaggtcgactcggaccgatg

SEQ ID NO: 15680 - DNA, 203 bp, Artificial sequence
  synthetic
ggcgcgccagtccttgttaatgccctgacacattcttggcaaatagcaacctcaaacagacaccatggttcttggcaaacctgaggttcttggcaaagttactgttcttggcaaaaaggtgaacgtggatgaagttggtgttcttggcaaaggcaggctgctggtggtctacccttggacccagaggtcgactcggaccgatg

SEQ ID NO: 15681 - DNA, 203 bp, Artificial sequence
  synthetic
ggcgcgccagtccttttgcgctcactgacacattcttggcaaatagcaacttcttggcaaaaccatggtgcatctgactcctgaggagaagtctgccgttactgccctgtggggcaaggtgaacgtggatgaagttggtgttcttggcaaaggcaggcttcttggcaaatacccttggacccagaggtcgactcggaccgatg

SEQ ID NO: 15682 - DNA, 203 bp, Artificial sequence
  synthetic
ggcgcgccagtcctagttgcgctactgacacattcttggcaaatagcaacttcttggcaaaaccatggtgcatctgactcctgaggagaagtctgccgttactgccctgtggggcaaggtgattcttggcaaagttggtggtgaggccctgggcaggcttcttggcaaatacccttggacccagaggtcgactcggaccgatg

SEQ ID NO: 15683 - DNA, 203 bp, Artificial sequence
  synthetic
ggcgcgccagtcctgttgcgcattctgacacattcttggcaaatagcaacttcttggcaaaaccatggtgcatctgactcctgaggagaagtctgccgttactgccctgtggggcaaggtgattcttggcaaagttggtgttcttggcaaaggcaggctgctggtggtctacccttggacccagaggtcgactcggaccgatg

SEQ ID NO: 15684 - DNA, 203 bp, Artificial sequence
  synthetic
ggcgcgccagtcctatgcgcaacactgacacattcttggcaaatagcaacttcttggcaaaaccatggtgcatctgactcctgaggagaagtctgccgttactgttcttggcaaaaaggtgaacgtggatgaagttggtgttcttggcaaaggcaggctgctggtggtctacccttggacccagaggtcgactcggaccgatg

SEQ ID NO: 15685 - DNA, 203 bp, Artificial sequence
  synthetic
ggcgcgccagtcctccagcgaacactgacacattcttggcaaatagcaacttcttggcaaaaccatggtgcatctgactcctgaggagaagtctgccgttactgttcttggcaaaaaggtgattcttggcaaagttggtggtgaggccctgggcaggcttcttggcaaatacccttggacccagaggtcgactcggaccgatg

SEQ ID NO: 15686 - DNA, 203 bp, Artificial sequence
  synthetic
ggcgcgccagtcctcccagcgtacctgacacattcttggcaaatagcaacttcttggcaaaaccatggtgcatctgactcctgaggttcttggcaaagttactgccctgtggggcaaggtgaacgtggatgaagttggtggtgaggccctgggcaggctgctggtggtctacccttggacccagaggtcgactcggaccgatg

SEQ ID NO: 15687 - DNA, 203 bp, Artificial sequence
  synthetic
ggcgcgccagtcctagtcgctggtctgacacattcttggcaaatagcaacttcttggcaaaaccatggtgcatctgactcctgaggttcttggcaaagttactgccctgtggggcaaggtgaacgtggatgaagttggtggtgaggccctgggcaggcttcttggcaaatacccttggacccagaggtcgactcggaccgatg

SEQ ID NO: 15688 - DNA, 203 bp, Artificial sequence
  synthetic
ggcgcgccagtcctccagcggtagctgacacattcttggcaaatagcaacttcttggcaaaaccatggtgcatctgactcctgaggttcttggcaaagttactgccctgtggggcaaggtgattcttggcaaagttggtggtgaggccctgggcaggctgctggtggtctacccttggacccagaggtcgactcggaccgatg

SEQ ID NO: 15689 - DNA, 203 bp, Artificial sequence
  synthetic
ggcgcgccagtcctccagcgtagcctgacacattcttggcaaatagcaacttcttggcaaaaccatggtgcatctgactcctgaggttcttggcaaagttactgccctgtggggcaaggtgattcttggcaaagttggtgttcttggcaaaggcaggctgctggtggtctacccttggacccagaggtcgactcggaccgatg

SEQ ID NO: 15690 - DNA, 203 bp, Artificial sequence
  synthetic
ggcgcgccagtcctagaattgaatctgacacattcttggcaaatagcaacttcttggcaaaaccatggtgcatctgactcctgaggttcttggcaaagttactgccctgtggggcaaggtgattcttggcaaagttggtgttcttggcaaaggcaggcttcttggcaaatacccttggacccagaggtcgactcggaccgatg

SEQ ID NO: 15691 - DNA, 203 bp, Artificial sequence
  synthetic
ggcgcgccagtcctgacgcagactctgacacattcttggcaaatagcaacttcttggcaaaaccatggtgcatctgactcctgaggttcttggcaaagttactgttcttggcaaaaaggtgattcttggcaaagttggtggtgaggccctgggcaggcttcttggcaaatacccttggacccagaggtcgactcggaccgatg

SEQ ID NO: 15692 - DNA, 203 bp, Artificial sequence
  synthetic
ggcgcgccagtccttttggatcaactgacacattcttggcaaatagcaacttcttggcaaaaccatggttcttggcaaacctgaggagaagtctgccgttactgccctgtggggcaaggtgaacgtggatgaagttggtgttcttggcaaaggcaggctgctggtggtctacccttggacccagaggtcgactcggaccgatg

SEQ ID NO: 15693 - DNA, 203 bp, Artificial sequence
  synthetic
ggcgcgccagtccttgagcgtggactgacacattcttggcaaatagcaacttcttggcaaaaccatggttcttggcaaacctgaggagaagtctgccgttactgccctgtggggcaaggtgattcttggcaaagttggtgttcttggcaaaggcaggctgctggtggtctacccttggacccagaggtcgactcggaccgatg

SEQ ID NO: 15694 - DNA, 203 bp, Artificial sequence
  synthetic
ggcgcgccagtcctttgcgtggacctgacacattcttggcaaatagcaacttcttggcaaaaccatggttcttggcaaacctgaggagaagtctgccgttactgttcttggcaaaaaggtgaacgtggatgaagttggtggtgaggccctgggcaggcttcttggcaaatacccttggacccagaggtcgactcggaccgatg

SEQ ID NO: 15695 - DNA, 203 bp, Artificial sequence
  synthetic
ggcgcgccagtccttatgagatcgctgacacattcttggcaaatagcaacttcttggcaaaaccatggttcttggcaaacctgaggagaagtctgccgttactgttcttggcaaaaaggtgaacgtggatgaagttggtgttcttggcaaaggcaggcttcttggcaaatacccttggacccagaggtcgactcggaccgatg

SEQ ID NO: 15696 - DNA, 203 bp, Artificial sequence
  synthetic
ggcgcgccagtccttggatctcaactgacacattcttggcaaatagcaacttcttggcaaaaccatggttcttggcaaacctgaggagaagtctgccgttactgttcttggcaaaaaggtgattcttggcaaagttggtggtgaggccctgggcaggcttcttggcaaatacccttggacccagaggtcgactcggaccgatg

SEQ ID NO: 15697 - DNA, 203 bp, Artificial sequence
  synthetic
ggcgcgccagtccttgcgatctcactgacacattcttggcaaatagcaacttcttggcaaaaccatggttcttggcaaacctgaggagaagtctgccgttactgttcttggcaaaaaggtgattcttggcaaagttggtgttcttggcaaaggcaggctgctggtggtctacccttggacccagaggtcgactcggaccgatg

SEQ ID NO: 15698 - DNA, 203 bp, Artificial sequence
  synthetic
ggcgcgccagtcctcgtagaccctctgacacattcttggcaaatagcaacttcttggcaaaaccatggttcttggcaaacctgaggttcttggcaaagttactgccctgtggggcaaggtgaacgtggatgaagttggtggtgaggccctgggcaggcttcttggcaaatacccttggacccagaggtcgactcggaccgatg

SEQ ID NO: 15699 - DNA, 203 bp, Artificial sequence
  synthetic
ggcgcgccagtcctctgcctgaacctgacacattcttggcaaatagcaacttcttggcaaaaccatggttcttggcaaacctgaggttcttggcaaagttactgccctgtggggcaaggtgattcttggcaaagttggtgttcttggcaaaggcaggcttcttggcaaatacccttggacccagaggtcgactcggaccgatg

SEQ ID NO: 15700 - DNA, 203 bp, Artificial sequence
  synthetic
ggcgcgccagtccttgcctgggcgctgacacattcttggcaaatagcaacttcttggcaaaaccatggttcttggcaaacctgaggttcttggcaaagttactgttcttggcaaaaaggtgaacgtggatgaagttggtggtgaggccctgggcaggctgctggtggtctacccttggacccagaggtcgactcggaccgatg

SEQ ID NO: 15701 - DNA, 203 bp, Artificial sequence
  synthetic
ggcgcgccagtccttgcctgaatgctgacacattcttggcaaatagcaacttcttggcaaaaccatggttcttggcaaacctgaggttcttggcaaagttactgttcttggcaaaaaggtgaacgtggatgaagttggtgttcttggcaaaggcaggcttcttggcaaatacccttggacccagaggtcgactcggaccgatg

SEQ ID NO: 15702 - DNA, 203 bp, Artificial sequence
  synthetic
ggcgcgccagtcctcatgcctgatctgacacattcttggcaaatagcaacttcttggcaaaaccatggttcttggcaaacctgaggttcttggcaaagttactgttcttggcaaaaaggtgattcttggcaaagttggtggtgaggccctgggcaggctgctggtggtctacccttggacccagaggtcgactcggaccgatg

SEQ ID NO: 15703 - DNA, 203 bp, Artificial sequence
  synthetic
ggcgcgccagtcctgcctgcctgtctgacacattcttggcaaatagcaacttcttggcaaaaccatggttcttggcaaacctgaggttcttggcaaagttactgttcttggcaaaaaggtgattcttggcaaagttggtgttcttggcaaaggcaggcttcttggcaaatacccttggacccagaggtcgactcggaccgatg

SEQ ID NO: 15704 - DNA, 203 bp, Artificial sequence
  synthetic
ggcgcgccagtcctcaggcagtggctgacaccggcgggttcactagcaacctcaaacagacaccatggtgcatctgactcctgaggagaagtctgccgttactgccctgtggggcaaggtgaacgtggatgaagttggtggtgaggccctgggcaggctgctggtggtctacccttggaaccggccgtcgactcggaccgatg

SEQ ID NO: 15705 - DNA, 203 bp, Artificial sequence
  synthetic
ggcgcgccagtcctgactttaccgctgacatactcccgttcactagcaacctcaaacagacaccatggtgcatctgactcctgaggagaagtctgccgttactgccctgtggggcaaggtgaacgtggatgaagttggtggtgaggccctgggcaggctgctggtggtctacccttgttcttggcaaacgactcggaccgatg

SEQ ID NO: 15706 - DNA, 203 bp, Artificial sequence
  synthetic
ggcgcgccagtcctcggtacatgactgacattcttggcaaaactagcaacctcaaacagacaccatggtgcatctgactcctgaggagaagtctgccgttactgccctgtggggcaaggtgaacgtggatgaagttggtggtgaggccctgggcaggctgctggtggtctaccccgtcaattcctttacgactcggaccgatg

SEQ ID NO: 15707 - DNA, 203 bp, Artificial sequence
  synthetic
ggcgcgccagtcctcggtgtgaatctgacattcttggcaaaactagcaacctcaaacagacaccatggtgcatctgactcctgaggagaagtctgccgttactgccctgtggggcaaggtgaacgtggatgaagttggtggtgaggccctgggcaggctgctggtggtctacccttggacctactccccgactcggaccgatg

SEQ ID NO: 15708 - DNA, 203 bp, Artificial sequence
  synthetic
ggcgcgccagtcctcggtatctcactgcacggaatcgagaaactagcaacctcaaacagacaccatggtgcatctgactcctgaggagaagtctgccgttactgccctgtggggcaaggtgaacgtggatgaagttggtggtgaggccctgggcaggctgctggtggtctaccccgtcaattcctttacgactcggaccgatg

SEQ ID NO: 15709 - DNA, 203 bp, Artificial sequence
  synthetic
ggcgcgccagtcctcggctcaaatctgcctttagggcggagccggctcccaccggccgtagtctggggaccggccgtggacggtccaccggccgtcggccgtttaccggccgtgctggctgtaccggccgttcgcggccgaccggccgtcgctcctggaccggccgtagcgcgacaaccggccgtagccgactcggaccgatg

SEQ ID NO: 15710 - DNA, 203 bp, Artificial sequence
  synthetic
ggcgcgccagtcctcatgcgatttctgcctttagggcggagccggctcccgctctcctcagtctgcggcacggaatcgagaagtcccacggaatcgagaagtttcacggaatcgagaactgtcacggaatcgagaagccgcacggaatcgagaactggcacggaatcgagaagacaccatgtcggagccgactcggaccgatg

SEQ ID NO: 15711 - DNA, 203 bp, Artificial sequence
  synthetic
ggcgcgccagtcctcgcatggttactgcctttagggcggagccggctcccgctctcctcagtctgcggcgtcaattcctttagtcccgtcaattcctttagtttcgtcaattcctttactgtcgtcaattcctttagccgcgtcaattcctttactggcgtcaattcctttagacaccatgtcggagccgactcggaccgatg

SEQ ID NO: 15712 - DNA, 203 bp, Artificial sequence
  synthetic
ggcgcgccagtcctcgcatgatccctgcctttagggcggagccggctcccgctctcctcagtctgcggtactcccgcggacggtcctactcccggcggccgttttactcccttgctggctgttactcccagtcgcggccgtactcccatcgctcctggtactccccgagcgcgacatactcccggagccgactcggaccgatg

SEQ ID NO: 15713 - DNA, 203 bp, Artificial sequence
  synthetic
ggcgcgccagtccttcgcatgaatctgcctttagggcggagccggctcccgctctcctcagtctgcggtgggctagcggagggtccggcttccggcggccgtttaccggccgtgctggctgtaccggccgttcgcggccgaccggccgtcgctcctggaccggccgtagcgcgacaaccggccgtagccgactcggaccgatg

SEQ ID NO: 15714 - DNA, 203 bp, Artificial sequence
  synthetic
ggcgcgccagtccttcacgcatgtctgcctttagggcggagccggctcccgctctcctcagtctgcggtgggctagcggagggtccggcttccggcggccgtttctgtctcttgctggctgtcgtcaattcctttagccgcgtcaattcctttactggcgtcaattcctttagacaccatgtcggagccgactcggaccgatg

SEQ ID NO: 15715 - DNA, 203 bp, Artificial sequence
  synthetic
ggcgcgccagtcctcttgtcaattctgcctttagggcggagccggctcccgctctcctcagtctgcggtgggctagcggagggtccggcttccggcggccgtttctgtctcttgctggctgtctcgctgagtcgcggccgaccggccgtcgctcctggaccggccgtagcgcgacaaccggccgtagccgactcggaccgatg

SEQ ID NO: 15716 - DNA, 203 bp, Artificial sequence
  synthetic
ggcgcgccagtcctaattgacaacctgcctttagggcggagccggctcccgctctcctcagtctgcggtgggctagcggagggtccggcttccggcggccgtttctgtctcttgctggctgtctcgctgagtcgcggccgcacggaatcgagaactggcacggaatcgagaagacaccatgtcggagccgactcggaccgatg

SEQ ID NO: 15717 - DNA, 203 bp, Artificial sequence
  synthetic
ggcgcgccagtcctcattacgtttctgcctttagggcggagccggctcccgctctcctcagtctgcggtgggctagcggagggtccggcttccggcggccgtttctgtctcttgctggctgtctcgctgagtcgcggccgccttctcatcgctcctggaaggtcccgagcgcgacaaccggccgtagccgactcggaccgatg

SEQ ID NO: 15718 - DNA, 203 bp, Artificial sequence
  synthetic
ggcgcgccagtcctcctttacgttctgcctttagggcggagccggctcccgctctcctcagtctgcggtgggctagcggagggtccggcttccggcggccgtttctgtctcttgctggctgtctcgctgagtcgcggccgccttctcatcgctcctggaaggtcccgagcgcgacatactcccggagccgactcggaccgatg

SEQ ID NO: 15719 - DNA, 203 bp, Artificial sequence
  synthetic
ggcgcgccagtcctcacgtaagtactgcctttagggcggagccggctcccgctctcctcagtctgcggtgggctagcggagggtccggcttccggcggccgtttctgtctcttgctggctgtctcgctgagtcgcggccgccttctcatcgctcctggaccggccgtagcgcgacaaccggccgtagccgactcggaccgatg

SEQ ID NO: 15720 - DNA, 203 bp, Artificial sequence
  synthetic
ggcgcgccagtcctacgcacgtagctgcctttagggcggagccggctcccgctctcctcagtctgcggtgggctagcggagggtccggcttccggcggccgtttctgtctcttgctggctgtctcgctgagtcgcggccgccttctcatcgctcctggcgtcaattcctttagacaccatgtcggagccgactcggaccgatg

SEQ ID NO: 15721 - DNA, 203 bp, Artificial sequence
  synthetic
ggcgcgccagtcctcctcgcacgactgcctttagggcggagccggctcccgctctcctcagtctgcggtgggctagcggagggtccggcttccggcggccgtttctgtctcttgctggctgtctcgctgagtcgcggccgccttctcatcgctcctggtactccccgagcgcgacatactcccggagccgactcggaccgatg

SEQ ID NO: 15722 - DNA, 203 bp, Artificial sequence
  synthetic
ggcgcgccagtcctccgcacgatcctgcctttagggcggagccggctcccgctctcctcagtctgcggtgggctagcggagggtccggcttccggcggccgtttctgtctcttgctggctgtctcgctgagtcgcggccgcgtcaattcctttactggcgtcaattcctttagacaccatgtcggagccgactcggaccgatg

SEQ ID NO: 15723 - DNA, 203 bp, Artificial sequence
  synthetic
ggcgcgccagtcctcgcacgacggctgcctttagggcggagccggctcccgctctcctcagtctgcggtgggctagcggagggtccggcttccggcggccgtttctgtctcttgctggctgtctcgctgagtcgcggccgttcttggcaaactcctggttcttggcaaacgcgacattcttggcaaaccgactcggaccgatg

SEQ ID NO: 15724 - DNA, 203 bp, Artificial sequence
  synthetic
ggcgcgccagtcctcgtgcgttggctgcctttagggcggagccggctcccgctctcctcagtctgcggtgggctagcggagggtccggcttccggcggccgtttctgtctcttgctggctgtttcttggcaaagcggccgttcttggcaaactcctggttcttggcaaacgcgacattcttggcaaaccgactcggaccgatg

SEQ ID NO: 15725 - DNA, 203 bp, Artificial sequence
  synthetic
ggcgcgccagtccttaccgtgcgtctgcctttagggcggagccggctcccgctctcctcagtctgcggtgggctagcggagggtccggcttccggcggccgtttttcttggcaaatggctgtttcttggcaaagcggccgttcttggcaaactcctggttcttggcaaacgcgacattcttggcaaaccgactcggaccgatg

SEQ ID NO: 15726 - DNA, 203 bp, Artificial sequence
  synthetic
ggcgcgccagtcctgagacgtgcgctgcctttagggcggagccggctcccgctctcctcagtctgcggttcttggcaaaacggtccttcttggcaaagccgtttttcttggcaaatggctgtttcttggcaaagcggccgttcttggcaaactcctggttcttggcaaacgcgacattcttggcaaaccgactcggaccgatg

SEQ ID NO: 15727 - DNA, 203 bp, Artificial sequence
  synthetic
ggcgcgccagtcctcgtgcgtaacctgcctttagggcggagccggctccctactccctcagtctgcggtactcccgcggacggtcctactcccggcggccgttttactcccttgctggctgttactcccagtcgcggccgtactcccatcgctcctggtactccccgagcgcgacatactcccggagccgactcggaccgatg

SEQ ID NO: 15728 - DNA, 203 bp, Artificial sequence
  synthetic
ggcgcgccagtcctgattgtgaccctgccttttactcccagccggctccctactccctcagtctgcggtactcccgcggacggtcctactcccggcggccgttttactcccttgctggctgttactcccagtcgcggccgtactcccatcgctcctggtactccccgagcgcgacatactcccggagccgactcggaccgatg

SEQ ID NO: 15729 - DNA, 203 bp, Artificial sequence
  synthetic
ggcgcgccagtcctttcacaatgcctgcctttttcttggcaaaggctcccttcttggcaaatctgcggttcttggcaaaacggtccttcttggcaaagccgtttttcttggcaaatggctgtttcttggcaaagcggccgttcttggcaaactcctggttcttggcaaacgcgacattcttggcaaaccgactcggaccgatg

SEQ ID NO: 15730 - DNA, 203 bp, Artificial sequence
  synthetic
ggcgcgccagtcctgcgctgatcgctgcgtcaattcctttaactagcaacctcaaacagacaccatggtgcatctgactcctgaggagaagtctgccgttactgccctgtggggcaaggtgaacgtggatgaagttggtggtgaggccctgggcaggctgctggtggtctacccttggacccagaggtcgactcggaccgatg

SEQ ID NO: 15731 - DNA, 203 bp, Artificial sequence
  synthetic
ggcgcgccagtcctttcagcgctactgcgtcaattcctttaactagcaacctcaaacagacaccatggtgcatctgactcctgaggagaagtctgccgttactgccctgtggggcaaggtgaacgtggatgaagttggtggtgaggccctgggcaggctgctggtggtctacccttggacctactccccgactcggaccgatg

SEQ ID NO: 15732 - DNA, 203 bp, Artificial sequence
  synthetic
ggcgcgccagtcctggcgctgagtctgtactccctgtgttcactagcaacctcaaacagacaccatggtgcatctgactcctgaggagaagtctgccgttactgccctgtggggcaaggtgaacgtggatgaagttggtggtgaggccctgggcaggctgctggtggtctaccccacggaatcgagaacgactcggaccgatg

SEQ ID NO: 15733 - DNA, 203 bp, Artificial sequence
  synthetic
ggcgcgccagtcctcgcgctgtccctgtactccctgtgttcactagcaacctcaaacagacaccatggtgcatctgactcctgaggagaagtctgccgttactgccctgtggggcaaggtgaacgtggatgaagttggtggtgaggccctgggcaggctgctggtggtctaccccgtcaattcctttacgactcggaccgatg

SEQ ID NO: 15734 - DNA, 203 bp, Artificial sequence
  synthetic
ggcgcgccagtcctcgtcgaatccgaacaaaaccggcgggtaaaacaagaccggcgggtggaagaaaaccggcgggttacacaaaaccggcgggtgaaaaaaggccggcgggtaaaacggagccggcgggtaaaatttaaccggcgggtgaatttaaaccggcgggtaacaccaagccggcgggtaaacgactcggaccgatg

SEQ ID NO: 15735 - DNA, 203 bp, Artificial sequence
  synthetic
ggcgcgccagtccttcaaattcgagaacaaaagcaaaaacaaaaacaagaacaaaaaagggaagaaaaacaaaagtatacacaaaaaccaaaaaagaaaaaaggccagagacaaaaacggagccggcgggtaaaatttaaccggcgggtgaatttaaaccggcgggtaacaccaagccggcgggtaaacgactcggaccgatg

SEQ ID NO: 15736 - DNA, 203 bp, Artificial sequence
  synthetic
ggcgcgccagtcctgtgctaccgagaacaaaagcaaaaacaaaaacaagaacaaaaaagggaagaaaaacaaaagtatacacaaaaaccaaaaaagaaaaaaggtactccccaaaaacggagtactccccaaaaatttaatactccccagaatttaaatactccctaaacaccaagtactccccaaaacgactcggaccgatg

SEQ ID NO: 15737 - DNA, 203 bp, Artificial sequence
  synthetic
ggcgcgccagtcctgctggaccgagaacaaaagcaaaaacaaaaacaagaacaaaaaagggaagaaaaacaaaagtatacacaaaacacggaatcgagaaaaggcacggaatcgagaaggagcacggaatcgagaattaacacggaatcgagaataaacacggaatcgagaacaagatagagacaaaacgactcggaccgatg

SEQ ID NO: 15738 - DNA, 203 bp, Artificial sequence
  synthetic
ggcgcgccagtcctgggcactcgggaacaaaagcaaaaacaaaaacaagaacaaaaaagggaagaaaatactccctatacacaaaatactcccaagaaaaaaggtactccccaaaaacggagtactccccaaaaatttaatactccccagaatttaaatactccctaaacaccaagtactccccaaaacgactcggaccgatg

SEQ ID NO: 15739 - DNA, 203 bp, Artificial sequence
  synthetic
ggcgcgccagtcctccctgtgcccgaacaaaagcaaaaacaaaaacaagaacaaaaaagggaagaaaattcttggcaaacacaaaattcttggcaaaaaaaaggttcttggcaaaaacggagttcttggcaaaaatttaattcttggcaaaatttaaattcttggcaaacaccaagttcttggcaaaacgactcggaccgatg

SEQ ID NO: 15740 - DNA, 203 bp, Artificial sequence
  synthetic
ggcgcgccagtcctagtgccctgcgaacaaaagcaaaaacaaaaacaagacacggaatcgagaaaaaacacggaatcgagaaaaaacacggaatcgagaaaaggcacggaatcgagaaggagcacggaatcgagaattaacacggaatcgagaataaacacggaatcgagaacaagatagagacaaaacgactcggaccgatg

SEQ ID NO: 15741 - DNA, 203 bp, Artificial sequence
  synthetic
ggcgcgccagtcctactaagtcccgaacaaaagcaaaaacaaaaacaagattcttggcaaaaagaaaattcttggcaaacacaaaattcttggcaaaaaaaaggttcttggcaaaaacggagttcttggcaaaaatttaattcttggcaaaatttaaattcttggcaaacaccaagttcttggcaaaacgactcggaccgatg

SEQ ID NO: 15742 - DNA, 203 bp, Artificial sequence
  synthetic
ggcgcgccagtccttggacttaaagaacaaaattcttggcaaaaacaagattcttggcaaaaagaaaattcttggcaaacacaaaattcttggcaaaaaaaaggttcttggcaaaaacggagttcttggcaaaaatttaattcttggcaaaatttaaattcttggcaaacaccaagttcttggcaaaacgactcggaccgatg

SEQ ID NO: 15743 - DNA, 203 bp, Artificial sequence
  synthetic
ggcgcgccagtcctagggacttacgagatacacacggaatcgagaaactccacggaatcgagaaaactcacggaatcgagaacggacacggaatcgagaaaattcacggaatcgagaataggcacggaatcgagaaaatccacggaatcgagaagatccacggaatcgagaaccagaatcatacaatccgactcggaccgatg

SEQ ID NO: 15744 - DNA, 203 bp, Artificial sequence
  synthetic
ggcgcgccagtccttaatcccagtgagatacaccggcgggtcacacactcccggcgggtaatcaaactccggcgggttcattgggaccggcgggtctcataattccggcgggtaatcataggccggcgggtttagaaatcccggcgggtttcgtgatcccggcgggtccacaccagccggcgggtatccgactcggaccgatg

SEQ ID NO: 15745 - DNA, 203 bp, Artificial sequence
  synthetic
ggcgcgccagtcctgttaatcccagagatacacgtcaattcctttaactccgtcaattcctttaaactcgtcaattcctttacggacgtcaattcctttaaattcgtcaattcctttataggcgtcaattcctttaaatccgtcaattcctttagatccgtcaattcctttaccagaatcatacaatccgactcggaccgatg

SEQ ID NO: 15746 - DNA, 203 bp, Artificial sequence
  synthetic
ggcgcgccagtcctagggattagggagatacagctgccactcacacactcaccggccgtaatcaaactaccggccgttcattcggaaccggccgtctcataattaccggccgtaatcataggaccggccgtttagaaatcaccggccgtttcgtgatcaccggccgtccacaccagaccggccgtatccgactcggaccgatg

SEQ ID NO: 15747 - DNA, 203 bp, Artificial sequence
  synthetic
ggcgcgccagtccttaccagggacgagatacagctgccactcacacactcatccagacaaatcaaactagactcacatcattcggaaacaattctctcataatttaaagaaaaaatcataggccggacgggttagaaatcccggcgggtttcgtgatcccggcgggtccacaccagccggcgggtatccgactcggaccgatg

SEQ ID NO: 15748 - DNA, 203 bp, Artificial sequence
  synthetic
ggcgcgccagtccttccagggtcggagatacagctgccactcacacactcatccagacaaatcaaactagactcacatcattcggaaacaattctctcataatttaaagaaaaaatcataggccggacgggttagaaatccggtgcttgttcgtgatcaccggccgtccacaccagaccggccgtatccgactcggaccgatg

SEQ ID NO: 15749 - DNA, 203 bp, Artificial sequence
  synthetic
ggcgcgccagtccttccctggtaagagatacagctgccactcacacactcatccagacaaatcaaactagactcacatcattcggaaacaattctctcataatttaaagaaaaaatcataggccggacgggttagaaatccggtgcttgttcgtgatccacggaatcgagaaccagaatcatacaatccgactcggaccgatg

SEQ ID NO: 15750 - DNA, 203 bp, Artificial sequence
  synthetic
ggcgcgccagtccttctaggctgggagatacagctgccactcacacactcatccagacaaatcaaactagactcacatcattcggaaacaattctctcataatttaaagaaaaaatcataggccggacgggttagaaatccgtcaattcctttagatccgtcaattcctttaccagaatcatacaatccgactcggaccgatg

SEQ ID NO: 15751 - DNA, 203 bp, Artificial sequence
  synthetic
ggcgcgccagtcctggtgacgttagagatacagctgccactcacacactcatccagacaaatcaaactagactcacatcattcggaaacaattctctcataatttaaagaaaaaatcataggccggacgggttagaaatcttcttggcaaacgtgatcttcttggcaaaacaccagttcttggcaaaccgactcggaccgatg

SEQ ID NO: 15752 - DNA, 203 bp, Artificial sequence
  synthetic
ggcgcgccagtcctggctgggtaagagatacagctgccactcacacactcatccagacaaatcaaactagactcacatcattcggaaacaattctctcataatttaaagaaaaaatcataggccggcgggtttagaaatcccggcgggtttcgtgatcccggcgggtccacaccagccggcgggtatccgactcggaccgatg

SEQ ID NO: 15753 - DNA, 203 bp, Artificial sequence
  synthetic
ggcgcgccagtcctttacccagctgagatacagctgccactcacacactcatccagacaaatcaaactagactcacatcattcggaaacaattctctcataatttaaagaaaaaatcataggcgtcaattcctttaaatccgtcaattcctttagatccgtcaattcctttaccagaatcatacaatccgactcggaccgatg

SEQ ID NO: 15754 - DNA, 203 bp, Artificial sequence
  synthetic
ggcgcgccagtccttgcctgcagcgagatacagctgccactcacacactcatccagacaaatcaaactagactcacatcattcggaaacaattctctcataatttactcccaaaatcataggtactcccggttagaaatctactccctgttcgtgatctactcccctccacaccagtactccccaatccgactcggaccgatg

SEQ ID NO: 15755 - DNA, 203 bp, Artificial sequence
  synthetic
ggcgcgccagtccttcacacgaccgagatacagctgccactcacacactcatccagacaaatcaaactagactcacatcattcggacacggaatcgagaaaattcacggaatcgagaataggcacggaatcgagaaaatccacggaatcgagaagatccacggaatcgagaaccagaatcatacaatccgactcggaccgatg

SEQ ID NO: 15756 - DNA, 203 bp, Artificial sequence
  synthetic
ggcgcgccagtcctactcacacgtgagatacagctgccactcacacactcatccagacaaatcaaactagactcacatcattcggacgtcaattcctttaaattcgtcaattcctttataggcgtcaattcctttaaatccgtcaattcctttagatccgtcaattcctttaccagaatcatacaatccgactcggaccgatg

SEQ ID NO: 15757 - DNA, 203 bp, Artificial sequence
  synthetic
ggcgcgccagtcctgcgcacacgcgagatacagctgccactcacacactcatccagacaaatcaaactccggcgggttcattgggaccggcgggtctcataattccggcgggtaatcataggccggcgggtttagaaatcccggcgggtttcgtgatcccggcgggtccacaccagccggcgggtatccgactcggaccgatg

SEQ ID NO: 15758 - DNA, 203 bp, Artificial sequence
  synthetic
ggcgcgccagtcctatacacacgcgagatacagctgccactcacacactcatccagacaaatcaaactcgtcaattcctttacggacgtcaattcctttaaattcgtcaattcctttataggcgtcaattcctttaaatccgtcaattcctttagatccgtcaattcctttaccagaatcatacaatccgactcggaccgatg

SEQ ID NO: 15759 - DNA, 203 bp, Artificial sequence
  synthetic
ggcgcgccagtcctcgtgtgtgctgagatacagctgccactcacacactcatccagacaaatcaaacttactccccatcattcggatactcccctctcataatttactcccaaaatcataggtactcccggttagaaatctactccctgttcgtgatctactcccctccacaccagtactccccaatccgactcggaccgatg

SEQ ID NO: 15760 - DNA, 203 bp, Artificial sequence
  synthetic
ggcgcgccagtcctcgtgtgacgagagatacattcttggcaaacacactcttcttggcaaatcaaactttcttggcaaaattcggattcttggcaaacataattttcttggcaaatcataggttcttggcaaaagaaatcttcttggcaaacgtgatcttcttggcaaaacaccagttcttggcaaaccgactcggaccgatg

SEQ ID NO: 15761 - DNA, 203 bp, Artificial sequence
  synthetic
ggcgcgccagtcctagcgtgtgcagatgccggcacggaatcgagaacgtccacggaatcgagaaccctcacggaatcgagaaattacacggaatcgagaacggacacggaatcgagaaccgacacggaatcgagaactggcacggaatcgagaattcgcacggaatcgagaacaagtaagacccaatccgactcggaccgatg

SEQ ID NO: 15762 - DNA, 203 bp, Artificial sequence
  synthetic
ggcgcgccagtcctatcgtgtggtgatgccggccggcgggtaccgccgtcccggcgggtcggttccctccggcgggttcccgattaccggcgggtccgcagggaccggcgggtaccacccgaccggcgggtgactcctggccggcgggtctcatttcgccggcgggtttactcaagccggcgggtatccgactcggaccgatg

SEQ ID NO: 15763 - DNA, 203 bp, Artificial sequence
  synthetic
ggcgcgccagtcctgacatattgcgatgccggcctccgtggaccgccgtcccctgtaaccggttccctcacggaatcgagaaattacacggaatcgagaacggacacggaatcgagaaccgacacggaatcgagaactggcacggaatcgagaattcgcacggaatcgagaacaagtaagacccaatccgactcggaccgatg

SEQ ID NO: 15764 - DNA, 203 bp, Artificial sequence
  synthetic
ggcgcgccagtcctagaagccgctgatgccggcctccgtggaccgccgtcccctgtaaccggttccctgcacggccgtcccgattaaccgattccccgcacggaaccggccgtaccacccgaaccggccgtgactcctggaccggccgtctcatttcgaccggccgtttactcaagaccggccgtatccgactcggaccgatg

SEQ ID NO: 15765 - DNA, 203 bp, Artificial sequence
  synthetic
ggcgcgccagtcctctcaagccgcgatgccggcctccgtggaccgccgtcccctgtaaccggttccctgcacggccgtcccgattaaccgattccccgcacggacgtcaattcctttaccgacgtcaattcctttactggcgtcaattcctttattcgcgtcaattcctttacaagtaagacccaatccgactcggaccgatg

SEQ ID NO: 15766 - DNA, 203 bp, Artificial sequence
  synthetic
ggcgcgccagtcctgccgcaatgcgatgccggcctccgtggaccgccgtcccctgtaaccggttccctgcacggccgtcccgattaaccgattccccgcacggagcaccgcggaccacccgaaccggccgtgactcctggaccggccgtctcatttcgaccggccgtttactcaagaccggccgtatccgactcggaccgatg

SEQ ID NO: 15767 - DNA, 203 bp, Artificial sequence
  synthetic
ggcgcgccagtcctccctgccgctgatgccggcctccgtggaccgccgtcccctgtaaccggttccctgcacggccgtcccgattaaccgattccccgcacggagcaccgcggaccacccgaccgcgagccgactcctggaccggccgtctcatttcgaccggccgtttactcaagaccggccgtatccgactcggaccgatg

SEQ ID NO: 15768 - DNA, 203 bp, Artificial sequence
  synthetic
ggcgcgccagtcctcgtgccgccagatgccggcctccgtggaccgccgtcccctgtaaccggttccctgcacggccgtcccgattaaccgattccccgcacggagcaccgcggaccacccgaccgcgagccgactcctggagttcgttcctcatttcgacggcggcattactcaagtaagacccaatccgactcggaccgatg

SEQ ID NO: 15769 - DNA, 203 bp, Artificial sequence
  synthetic
ggcgcgccagtcctatgccgctaagatgccggcctccgtggaccgccgtcccctgtaaccggttccctgcacggccgtcccgattaaccgattccccgcacggagcaccgcggaccacccgaccgcgagccgactcctggagttcgttcctcatttcgacggcggcattactcaagttcttggcaaaccgactcggaccgatg

SEQ ID NO: 15770 - DNA, 203 bp, Artificial sequence
  synthetic
ggcgcgccagtcctcgccgcatatgatgccggcctccgtggaccgccgtcccctgtaaccggttccctgcacggccgtcccgattaaccgattccccgcacggagcaccgcggaccacccgaccgcgagccgactcctggagttcgttcctcatttcgcacggaatcgagaacaagtaagacccaatccgactcggaccgatg

SEQ ID NO: 15771 - DNA, 203 bp, Artificial sequence
  synthetic
ggcgcgccagtcctctaagccgccgatgccggcctccgtggaccgccgtcccctgtaaccggttccctgcacggccgtcccgattaaccgattccccgcacggagcaccgcggaccacccgaccgcgagccgactcctggcacggaatcgagaattcgcacggaatcgagaacaagtaagacccaatccgactcggaccgatg

SEQ ID NO: 15772 - DNA, 203 bp, Artificial sequence
  synthetic
ggcgcgccagtcctgccgcggtcagatgccggcctccgtggaccgccgtcccctgtaaccggttccctgcacggccgtcccgattaaccgattccccgcacggagcaccgcggaccacccgaccgcgagccgactcctggcgtcaattcctttattcgcgtcaattcctttacaagtaagacccaatccgactcggaccgatg

SEQ ID NO: 15773 - DNA, 203 bp, Artificial sequence
  synthetic
ggcgcgccagtcctagctgccgccgatgccggcctccgtggaccgccgtcccctgtaaccggttccctgcacggccgtcccgattaaccgattccccgcacggagcaccgcggaccacccgaccgcgagccgactcctggttcttggcaaacatttcgttcttggcaaaactcaagttcttggcaaaccgactcggaccgatg

SEQ ID NO: 15774 - DNA, 203 bp, Artificial sequence
  synthetic
ggcgcgccagtcctgccgcatgaggatgccggcctccgtggaccgccgtcccctgtaaccggttccctgcacggccgtcccgattaaccgattccccgcacggagcaccgcggaccacccgaccggcgggtgactcctggccggcgggtctcatttcgccggcgggtttactcaagccggcgggtatccgactcggaccgatg

SEQ ID NO: 15775 - DNA, 203 bp, Artificial sequence
  synthetic
ggcgcgccagtcctgccgcaaacggatgccggcctccgtggaccgccgtcccctgtaaccggttccctgcacggccgtcccgattaaccgattccccgcacggagcaccgcggaccacccgacgtcaattcctttactggcgtcaattcctttattcgcgtcaattcctttacaagtaagacccaatccgactcggaccgatg

SEQ ID NO: 15776 - DNA, 203 bp, Artificial sequence
  synthetic
ggcgcgccagtccttttgccgctagatgccggcctccgtggaccgccgtcccctgtaaccggttccctgcacggccgtcccgattaaccgattccccgcacggagcaccgcggaccacccgatactcccccgactcctggtactccctcctcatttcgtactccccattactcaagtactccccaatccgactcggaccgatg

SEQ ID NO: 15777 - DNA, 203 bp, Artificial sequence
  synthetic
ggcgcgccagtcctgtgcggcaacgatgccggcctccgtggaccgccgtcccctgtaaccggttccctgcacggccgtcccgattaaccgattccccgcacggatactcccggaccacccgatactcccccgactcctggtactccctcctcatttcgtactccccattactcaagtactccccaatccgactcggaccgatg

SEQ ID NO: 15778 - DNA, 203 bp, Artificial sequence
  synthetic
ggcgcgccagtccttggcggctcagatgccggcctccgtggaccgccgtcccctgtaaccggttccctgcacggccgtcccgattaccggcgggtccgcagggaccggcgggtaccacccgaccggcgggtgactcctggccggcgggtctcatttcgccggcgggtttactcaagccggcgggtatccgactcggaccgatg

SEQ ID NO: 15779 - DNA, 203 bp, Artificial sequence
  synthetic
ggcgcgccagtccttgcggcgaacgatgccggcctccgtggaccgccgtcccctgtaaccggttccctgcacggccgtcccgattacgtcaattcctttacggacgtcaattcctttaccgacgtcaattcctttactggcgtcaattcctttattcgcgtcaattcctttacaagtaagacccaatccgactcggaccgatg

SEQ ID NO: 15780 - DNA, 203 bp, Artificial sequence
  synthetic
ggcgcgccagtcctcgctgcggcagatgccggcctccgtggaccgccgtcccctgtaaccggttccctgcacggccgtcccgattattcttggcaaagcacggattcttggcaaacacccgattcttggcaaactcctggttcttggcaaacatttcgttcttggcaaaactcaagttcttggcaaaccgactcggaccgatg

SEQ ID NO: 15781 - DNA, 203 bp, Artificial sequence
  synthetic
ggcgcgccagtcctagagcggcacgatgccggcctccgtggaccgccgtctactcccaccggttcccttactccccgtcccgattatactcccccccgcacggatactcccggaccacccgatactcccccgactcctggtactccctcctcatttcgtactccccattactcaagtactccccaatccgactcggaccgatg

SEQ ID NO: 15782 - DNA, 203 bp, Artificial sequence
  synthetic
ggcgcgccagtcctgctaagcggcgatgcgggaccggccgtaccgccgtcaccggccgtcggttccctaccggccgttcccgattaaccggccgtccgcacggaaccggccgtaccacccgaaccggccgtgactcctggaccggccgtctcatttcgaccggccgtttactcaagaccggccgtatccgactcggaccgatg

SEQ ID NO: 15783 - DNA, 203 bp, Artificial sequence
  synthetic
ggcgcgccagtccttgcggcactcgcagtcctcacggaatcgagaagcagcacggaatcgagaattcccacggaatcgagaatccgcacggaatcgagaagctgcacggaatcgagaaagtgcacggaatcgagaaccttcacggaatcgagaacgtgcacggaatcgagaacgacggcgaggtccgacgactcggaccgatg

SEQ ID NO: 15784 - DNA, 203 bp, Artificial sequence
  synthetic
ggcgcgccagtcctaaaggcggcagcagtcctgggctgtacccggcgcagaccggccgtgctgcttccaccggccgtgtatctccgaccggccgtgggctgctgaccggccgtgaggaagtgaccggccgtgccgaccttaccggccgtctgggcgtgaccggccgtgcctccgacaccggccgtcgacgactcggaccgatg

SEQ ID NO: 15785 - DNA, 203 bp, Artificial sequence
  synthetic
ggcgcgccagtcctcgaggcggctgcagtcctgggctgtacccggcgcagcacggaatcgagaattcccacggaatcgagaatccgcacggaatcgagaagctgcacggaatcgagaaagtgcacggaatcgagaaccttcacggaatcgagaacgtgcacggaatcgagaacgacggcgaggtccgacgactcggaccgatg

SEQ ID NO: 15786 - DNA, 203 bp, Artificial sequence
  synthetic
ggcgcgccagtcctggatctagtagcagtcctgggctgtacccggcgcagctgggagcggctgcttcccgtcaattcctttatccgcgtcaattcctttagctgcgtcaattcctttaagtgcgtcaattcctttaccttcgtcaattcctttacgtgcgtcaattcctttacgacggcgaggtccgacgactcggaccgatg

SEQ ID NO: 15787 - DNA, 203 bp, Artificial sequence
  synthetic
ggcgcgccagtcctactagatcctgcagtcctgggctgtacccggcgcagctgggagcggctgcttcctactccctcgtatctccgtactccctggggctgctgtactcccgcgaggaagtgtactcccccgccgacctttactccctgctgggcgtgtactcccaggcctccgactactccctccgacgactcggaccgatg

SEQ ID NO: 15788 - DNA, 203 bp, Artificial sequence
  synthetic
ggcgcgccagtcctgacccgctgagcagtcctgggctgtacccggcgcagctgggagcggctgcttcctccggggtcgtatctccgcccggcatggggctgctgcacggaatcgagaaagtgcacggaatcgagaaccttcacggaatcgagaacgtgcacggaatcgagaacgacggcgaggtccgacgactcggaccgatg

SEQ ID NO: 15789 - DNA, 203 bp, Artificial sequence
  synthetic
ggcgcgccagtccttgcgtcgattgcagtcctgggctgtacccggcgcagctgggagcggctgcttcctccggggtcgtatctccgcccggcatggggctgctggacctttgcgaggaagtgtactcccccgccgacctttactccctgctgggcgtgtactcccaggcctccgactactccctccgacgactcggaccgatg

SEQ ID NO: 15790 - DNA, 203 bp, Artificial sequence
  synthetic
ggcgcgccagtcctctacgtcaccgcagtcctgggctgtacccggcgcagctgggagcggctgcttcctccggggtcgtatctccgcccggcatggggctgctggacctttgcgaggaagtgttcggcaccgccgaccttaccggccgtctgggcgtgaccggccgtgcctccgacaccggccgtcgacgactcggaccgatg

SEQ ID NO: 15791 - DNA, 203 bp, Artificial sequence
  synthetic
ggcgcgccagtccttgacgtagtggcagtcctgggctgtacccggcgcagctgggagcggctgcttcctccggggtcgtatctccgcccggcatggggctgctggacctttgcgaggaagtgttcggcaccgccgaccttcacggaatcgagaacgtgcacggaatcgagaacgacggcgaggtccgacgactcggaccgatg

SEQ ID NO: 15792 - DNA, 203 bp, Artificial sequence
  synthetic
ggcgcgccagtcctccaagcgcctgcagtcctgggctgtacccggcgcagctgggagcggctgcttcctccggggtcgtatctccgcccggcatggggctgctggacctttgcgaggaagtgttcggcaccgccgacctttaccgggtgctgggcgtgcgacgcgaggcctccgacttcttggcaaaacgactcggaccgatg

SEQ ID NO: 15793 - DNA, 203 bp, Artificial sequence
  synthetic
ggcgcgccagtccttctcaggcgcgcagtcctgggctgtacccggcgcagctgggagcggctgcttcctccggggtcgtatctccgcccggcatggggctgctggacctttgcgaggaagtgttcggcaccgccgacctttaccgggtgctgggcgtgtactcccaggcctccgactactccctccgacgactcggaccgatg

SEQ ID NO: 15794 - DNA, 203 bp, Artificial sequence
  synthetic
ggcgcgccagtcctacaggcgctggcagtcctgggctgtacccggcgcagctgggagcggctgcttcctccggggtcgtatctccgcccggcatggggctgctggacctttgcgaggaagtgttcggcaccgccgaccttttcttggcaaagggcgtgttcttggcaaactccgacttcttggcaaaacgactcggaccgatg

SEQ ID NO: 15795 - DNA, 203 bp, Artificial sequence
  synthetic
ggcgcgccagtcctttagcgctaggcagtcctgggctgtacccggcgcagctgggagcggctgcttcctccggggtcgtatctccgcccggcatggggctgctggacctttgcgaggaagtgttcttggcaaacgaccttttcttggcaaagggcgtgttcttggcaaactccgacttcttggcaaaacgactcggaccgatg

SEQ ID NO: 15796 - DNA, 203 bp, Artificial sequence
  synthetic
ggcgcgccagtcctagtcctatcggcagtcctgggctgtacccggcgcagctgggagcggctgcttcctccggggtcgtatctccgtactccctggggctgctgtactcccgcgaggaagtgtactcccccgccgacctttactccctgctgggcgtgtactcccaggcctccgactactccctccgacgactcggaccgatg

SEQ ID NO: 15797 - DNA, 203 bp, Artificial sequence
  synthetic
ggcgcgccagtcctacctatcttagcagtcctgggctgtacccggcgcagctgggagcggctgcttcctccggggtcgtatctccgttcttggcaaagctgctgttcttggcaaaggaagtgttcttggcaaacgaccttttcttggcaaagggcgtgttcttggcaaactccgacttcttggcaaaacgactcggaccgatg

SEQ ID NO: 15798 - DNA, 203 bp, Artificial sequence
  synthetic
ggcgcgccagtcctctatggtcaggcagtccttactcccacccggcgcagtactccccggctgcttcctactccctcgtatctccgtactccctggggctgctgtactcccgcgaggaagtgtactcccccgccgacctttactccctgctgggcgtgtactcccaggcctccgactactccctccgacgactcggaccgatg

SEQ ID NO: 15799 - DNA, 203 bp, Artificial sequence
  synthetic
ggcgcgccagtcctaggctatgtagcagtcctttcttggcaaaggcgcagttcttggcaaatgcttccttcttggcaaaatctccgttcttggcaaagctgctgttcttggcaaaggaagtgttcttggcaaacgaccttttcttggcaaagggcgtgttcttggcaaactccgacttcttggcaaaacgactcggaccgatg

SEQ ID NO: 15800 - DNA, 203 bp, Artificial sequence
  synthetic
ggcgcgccagtcctaacctctatcgcccgttaaccggccgtgcaaacgacaccggccgtcggtccacgaccggccgtaatgtctctaccggccgttaggcgtagaccggccgttgacaaggaaccggccgtgccgggggcaccggccgtgactccaagaccggccgttcccggtggaccggccgttgccgactcggaccgatg

SEQ ID NO: 15801 - DNA, 203 bp, Artificial sequence
  synthetic
ggcgcgccagtcctctatccaaatgcccgttacccacctgggcaaacgacgcccacgtacggtccacgtactccctcaatgtctcttactcccaataggcgtagtactcccgttgacaaggatactcccgggccgggggctactcccgggactccaagtactccccttcccggtggtactcccaatgccgactcggaccgatg

SEQ ID NO: 15802 - DNA, 203 bp, Artificial sequence
  synthetic
ggcgcgccagtcctactatctggtgcccgttacccacctgggcaaacgacgcccacgtacggtccacgtcgcccttcaatgtctctaccggccgttaggcgtagaccggccgttgacaaggaaccggccgtgccgggggcaccggccgtgactccaagaccggccgttcccggtggaccggccgttgccgactcggaccgatg

SEQ ID NO: 15803 - DNA, 203 bp, Artificial sequence
  synthetic
ggcgcgccagtccttgctatgtaagcccgttacccacctgggcaaacgacgcccacgtacggtccacgtcgcccttcaatgtctctcgtcaattcctttagtagcgtcaattcctttaaggacgtcaattcctttagggccgtcaattcctttacaagcgtcaattcctttagtgggccgggaaatgccgactcggaccgatg

SEQ ID NO: 15804 - DNA, 203 bp, Artificial sequence
  synthetic
ggcgcgccagtcctgtcattctatgcccgttacccacctgggcaaacgacgcccacgtacggtccacgtcgcccttcaatgtctctcttgaccaataggcgtagaccggccgttgacaaggaaccggccgtgccgggggcaccggccgtgactccaagaccggccgttcccggtggaccggccgttgccgactcggaccgatg

SEQ ID NO: 15805 - DNA, 203 bp, Artificial sequence
  synthetic
ggcgcgccagtcctactatgtatcgcccgttacccacctgggcaaacgacgcccacgtacggtccacgtcgcccttcaatgtctctcttgaccaataggcgtagcacggaatcgagaaaggacacggaatcgagaagggccacggaatcgagaacaagcacggaatcgagaagtgggccgggaaatgccgactcggaccgatg

SEQ ID NO: 15806 - DNA, 203 bp, Artificial sequence
  synthetic
ggcgcgccagtccttagtagctatgcccgttacccacctgggcaaacgacgcccacgtacggtccacgtcgcccttcaatgtctctcttgaccaataggcgtagccggcgagttgacaaggaaccggccgtgccgggggcaccggccgtgactccaagaccggccgttcccggtggaccggccgttgccgactcggaccgatg

SEQ ID NO: 15807 - DNA, 203 bp, Artificial sequence
  synthetic
ggcgcgccagtcctcggccctattgcccgttacccacctgggcaaacgacgcccacgtacggtccacgtcgcccttcaatgtctctcttgaccaataggcgtagccggcgagttgacaaggaccagtgggggccgggggcccggcgggtgactccaagccggcgggttcccggtggccggcgggttgccgactcggaccgatg

SEQ ID NO: 15808 - DNA, 203 bp, Artificial sequence
  synthetic
ggcgcgccagtccttgctattgacgcccgttacccacctgggcaaacgacgcccacgtacggtccacgtcgcccttcaatgtctctcttgaccaataggcgtagccggcgagttgacaaggaccagtgggggccgggggcttggagagggactccaagcgtcaattcctttagtgggccgggaaatgccgactcggaccgatg

SEQ ID NO: 15809 - DNA, 203 bp, Artificial sequence
  synthetic
ggcgcgccagtcctcctgggctatgcccgttacccacctgggcaaacgacgcccacgtacggtccacgtcgcccttcaatgtctctcttgaccaataggcgtagccggcgagttgacaaggaccagtgggggccgggggcttggagagggactccaagtcccgcccttcccggtggaccggccgttgccgactcggaccgatg

SEQ ID NO: 15810 - DNA, 203 bp, Artificial sequence
  synthetic
ggcgcgccagtcctgaccctattggcccgttacccacctgggcaaacgacgcccacgtacggtccacgtcgcccttcaatgtctctcttgaccaataggcgtagccggcgagttgacaaggaccagtgggggccgggggcttggagagggactccaagtcccgcccttcccggtggccggcgggttgccgactcggaccgatg

SEQ ID NO: 15811 - DNA, 203 bp, Artificial sequence
  synthetic
ggcgcgccagtccttctatgtgcagcccgttacccacctgggcaaacgacgcccacgtacggtccacgtcgcccttcaatgtctctcttgaccaataggcgtagccggcgagttgacaaggaccagtgggggccgggggcttggagagggactccaagtcccgcccttcccggtgggccgggaaatgccgactcggaccgatg

SEQ ID NO: 15812 - DNA, 203 bp, Artificial sequence
  synthetic
ggcgcgccagtcctgtaggctatcgcccgttacccacctgggcaaacgacgcccacgtacggtccacgtcgcccttcaatgtctctcttgaccaataggcgtagccggcgagttgacaaggaccagtgggggccgggggcttggagagggactccaagtcccgcccttcccggtggtactcccaatgccgactcggaccgatg

SEQ ID NO: 15813 - DNA, 203 bp, Artificial sequence
  synthetic
ggcgcgccagtcctttctatgacagcccgttacccacctgggcaaacgacgcccacgtacggtccacgtcgcccttcaatgtctctcttgaccaataggcgtagccggcgagttgacaaggacgtcaattcctttagggccgtcaattcctttacaagcgtcaattcctttagtgggccgggaaatgccgactcggaccgatg

SEQ ID NO: 15814 - DNA, 203 bp, Artificial sequence
  synthetic
ggcgcgccagtcctcactctattcgcccgttacccacctgggcaaacgacgcccacgtacggtccacgtcgcccttcaatgtctctcttgaccaataggcgtagccggcgagttgacaaggatactcccgggccgggggctactcccgggactccaagtactccccttcccggtggtactcccaatgccgactcggaccgatg

SEQ ID NO: 15815 - DNA, 203 bp, Artificial sequence
  synthetic
ggcgcgccagtcctatgctatcgggcccgttacccacctgggcaaacgacgcccacgtacggtccacgtcgcccttcaatgtctctcttgaccaataggcgtagttcttggcaaaacaaggattcttggcaaacgggggcttcttggcaaactccaagttcttggcaaaccggtggttcttggcaaaccgactcggaccgatg

SEQ ID NO: 15816 - DNA, 203 bp, Artificial sequence
  synthetic
ggcgcgccagtcctatgactatccgcccgttacccacctgggcaaacgacgcccacgtacggtccacgtcgcccttcaatgtctcttactcccaataggcgtagtactcccgttgacaaggatactcccgggccgggggctactcccgggactccaagtactccccttcccggtggtactcccaatgccgactcggaccgatg

SEQ ID NO: 15817 - DNA, 203 bp, Artificial sequence
  synthetic
ggcgcgccagtcctcctatcctttgcccgttacccacctgggcaaacgactactccctacggtccacgtactccctcaatgtctcttactcccaataggcgtagtactcccgttgacaaggatactcccgggccgggggctactcccgggactccaagtactccccttcccggtggtactcccaatgccgactcggaccgatg

SEQ ID NO: 15818 - DNA, 203 bp, Artificial sequence
  synthetic
ggcgcgccagtccttcgactatgtgcccgttatactcccgggcaaacgactactccctacggtccacgtactccctcaatgtctcttactcccaataggcgtagtactcccgttgacaaggatactcccgggccgggggctactcccgggactccaagtactccccttcccggtggtactcccaatgccgactcggaccgatg

SEQ ID NO: 15819 - DNA, 203 bp, Artificial sequence
  synthetic
ggcgcgccagtcctgtaacctattgcccgttattcttggcaaaaaacgacttcttggcaaagtccacgttcttggcaaatgtctctttcttggcaaaggcgtagttcttggcaaaacaaggattcttggcaaacgggggcttcttggcaaactccaagttcttggcaaaccggtggttcttggcaaaccgactcggaccgatg

SEQ ID NO: 15820 - DNA, 203 bp, Artificial sequence
  synthetic
ggcgcgccagtcctagcactatgtggacccgccaccccagagtcaagctgagggcatcggcatgccgcaccggccgtgatcaggacaccggccgttcgggcagtaccggccgtggccttttcaccggccgttccttccgcaccggccgtactctcagcaccggccgtctgattgtcaccggccgtatacgactcggaccgatg

SEQ ID NO: 15821 - DNA, 203 bp, Artificial sequence
  synthetic
ggcgcgccagtcctctgctatggtggacccgccaccccagagtcaagctgagggcatcggcatgccgcagggaagacgatcaggactgtttttaatcgggcagtcacggaatcgagaatttccacggaatcgagaaccgccacggaatcgagaacagccacggaatcgagaatgtcctgggtcacatacgactcggaccgatg

SEQ ID NO: 15822 - DNA, 203 bp, Artificial sequence
  synthetic
ggcgcgccagtcctgctatcgcatggacccgccaccccagagtcaagctgagggcatcggcatgccgcagggaagacgatcaggactgtttttaatcgggcagtcgcgcggatggccttttcaccggccgttccttccgcaccggccgtactctcagcaccggccgtctgattgtcaccggccgtatacgactcggaccgatg

SEQ ID NO: 15823 - DNA, 203 bp, Artificial sequence
  synthetic
ggcgcgccagtcctctattcgttcggacccgccaccccagagtcaagctgagggcatcggcatgccgcagggaagacgatcaggactgtttttaatcgggcagtcgcgcggatggccttttcccggcgggttccttccgcccggcgggtactctcagcccggcgggtctgattgtcccggcgggtatacgactcggaccgatg

SEQ ID NO: 15824 - DNA, 203 bp, Artificial sequence
  synthetic
ggcgcgccagtccttctcgctatgggacccgccaccccagagtcaagctgagggcatcggcatgccgcagggaagacgatcaggactgtttttaatcgggcagtcgcgcggatggccttttccctctcgcctccttccgcaccggccgtactctcagcaccggccgtctgattgtcaccggccgtatacgactcggaccgatg

SEQ ID NO: 15825 - DNA, 203 bp, Artificial sequence
  synthetic
ggcgcgccagtcctaactatggatggacccgccaccccagagtcaagctgagggcatcggcatgccgcagggaagacgatcaggactgtttttaatcgggcagtcgcgcggatggccttttccctctcgcctccttccgccacggaatcgagaacagccacggaatcgagaatgtcctgggtcacatacgactcggaccgatg

SEQ ID NO: 15826 - DNA, 203 bp, Artificial sequence
  synthetic
ggcgcgccagtcctcctatgaaggggacccgccaccccagagtcaagctgagggcatcggcatgccgcagggaagacgatcaggactgtttttaatcgggcagtcgcgcggatggccttttccctctcgcctccttccgccccgcccccactctcagcaccggccgtctgattgtcaccggccgtatacgactcggaccgatg

SEQ ID NO: 15827 - DNA, 203 bp, Artificial sequence
  synthetic
ggcgcgccagtcctccctatgtgtggacccgccaccccagagtcaagctgagggcatcggcatgccgcagggaagacgatcaggactgtttttaatcgggcagtcgcgcggatggccttttccctctcgcctccttccgccccgcccccactctcagccacggaatcgagaatgtcctgggtcacatacgactcggaccgatg

SEQ ID NO: 15828 - DNA, 203 bp, Artificial sequence
  synthetic
ggcgcgccagtcctactatgttggggacccgccaccccagagtcaagctgagggcatcggcatgccgcagggaagacgatcaggactgtttttaatcgggcagtcgcgcggatggccttttccctctcgcctccttccgccccgcccccactctcagcccggcgggtctgattgtcccggcgggtatacgactcggaccgatg

SEQ ID NO: 15829 - DNA, 203 bp, Artificial sequence
  synthetic
ggcgcgccagtcctcactatgattggacccgccaccccagagtcaagctgagggcatcggcatgccgcagggaagacgatcaggactgtttttaatcgggcagtcgcgcggatggccttttccctctcgcctccttccgccgtcaattcctttacagccgtcaattcctttatgtcctgggtcacatacgactcggaccgatg

SEQ ID NO: 15830 - DNA, 203 bp, Artificial sequence
  synthetic
ggcgcgccagtcctctatctgattggacccgccaccccagagtcaagctgagggcatcggcatgccgctactcccacgatcaggactactcccaatcgggcagttactcccatggccttttctactccccctccttccgctactcccccactctcagctactccccgctgattgtctactcccacatacgactcggaccgatg

SEQ ID NO: 15831 - DNA, 203 bp, Artificial sequence
  synthetic
ggcgcgccagtcctgaacgctattggacccgccaccccagagtcaagctgccggcgggtgcatgccgcccggcgggtgatcaggacccggcgggttcgggcagtccggcgggtggccttttcccggcgggttccttccgcccggcgggtactctcagcccggcgggtctgattgtcccggcgggtatacgactcggaccgatg

SEQ ID NO: 15832 - DNA, 203 bp, Artificial sequence
  synthetic
ggcgcgccagtcctgctctatccaggacccgccaccccagagtcaagctgcgtcaattcctttaccgccgtcaattcctttaggaccgtcaattcctttacagtcgtcaattcctttatttccgtcaattcctttaccgccgtcaattcctttacagccgtcaattcctttatgtcctgggtcacatacgactcggaccgatg

SEQ ID NO: 15833 - DNA, 203 bp, Artificial sequence
  synthetic
ggcgcgccagtcctctattctcaaggacccgccgtcaattcctttagctgcgtcaattcctttaccgccgtcaattcctttaggaccgtcaattcctttacagtcgtcaattcctttatttccgtcaattcctttaccgccgtcaattcctttacagccgtcaattcctttatgtcctgggtcacatacgactcggaccgatg

SEQ ID NO: 15834 - DNA, 203 bp, Artificial sequence
  synthetic
ggcgcgccagtcctctattgagcgggacccgctactcccgagtcaagctgtactccccggcatgccgctactcccacgatcaggactactcccaatcgggcagttactcccatggccttttctactccccctccttccgctactcccccactctcagctactccccgctgattgtctactcccacatacgactcggaccgatg

SEQ ID NO: 15835 - DNA, 203 bp, Artificial sequence
  synthetic
ggcgcgccagtcctgcttctatgagggccgcgaccggccgtcgcttccgcaccggccgtggcgggggaaccggccgtcggtctcagaccggccgtccagctctcaccggccgttcttccgccaccggccgttcgcgtttcaccggccgtcgcaatggaaccggccgtcgccgcgctaccggccgtcaacgactcggaccgatg

SEQ ID NO: 15836 - DNA, 203 bp, Artificial sequence
  synthetic
ggcgcgccagtcctgacctattcggggccgcgcgcgcgcgccgcgtaggagaggagcgagcgaccaaaggaaccataactgatttaatgagccattcgcagtttcactgtaccggccgtgcgtactcagacatgcatggcttaatctttgagacaagcatatgctactggcaggatcaaccaggacaacgactcggaccgatg

SEQ ID NO: 15837 - DNA, 203 bp, Artificial sequence
  synthetic
ggcgcgccagtcctctttctatgtgggccgcgcgcgcgcgccgctaagccgcaggctccactcctggtggtgcccttccgtcaattcctttaagtttcagctttgcaaccatactccccccggaacccaaagactttggtttcccggaagctgcccggcgggtcatgggaataacgccgccgcgacaacgactcggaccgatg

SEQ ID NO: 15838 - DNA, 203 bp, Artificial sequence
  synthetic
ggcgcgccagtcctcgctattcgggggccgcgcgcgcgcgccgctcggaactacgacggtatctgatcgtcttcgaacctccgactttcgttcttgattaatgaaaacattcttggcaaatgctttcgctctggtccgtcttgcgccggtccaagaatttcacctctagcggcgcaatacgaatacaacgactcggaccgatg

SEQ ID NO: 15839 - DNA, 203 bp, Artificial sequence
  synthetic
ggcgcgccagtcctgatcatagtcgggccgcgcgcgcgcgccgcttcaagtttcagctttgcaaccatactccccccggaacccaaagactttggtttcccggaagctgcccggcgggtcatgggaataacgccgccgcatcgccggtcggcatcgtttatggtcggaactacgacggtatttgacaacgactcggaccgatg

SEQ ID NO: 15840 - DNA, 203 bp, Artificial sequence
  synthetic
ggcgcgccagtcctttgggatagagggccgcgcgcgcgcgccgcttccaactacgacggtatctgatcgtcttcgaacctccgactttcgttcttgattaatgaaaacattcttggcaaatgctttcgctctggtccgtcttgcgccggtccaagaatttcacctctagcggcgcaatacattgacaacgactcggaccgatg

SEQ ID NO: 15841 - DNA, 203 bp, Artificial sequence
  synthetic
ggcgcgccagtcctatagtagctcgggccgcgcgcgcgcgccgcttccagtttcagctttgcaaccatactccccccggaacccaaagactttggtttcccggaagctgcccggcgggtcatgggaataacgccgccgcatcgccggtcggcatcgtttatggtcggaactacgacggtaattgacaacgactcggaccgatg

SEQ ID NO: 15842 - DNA, 203 bp, Artificial sequence
  synthetic
ggcgcgccagtccttaatcatagggggccgcgcgcgcgcgccgcttccgagaggagcgagcgaccaaaggaaccataactgatttaatgagccattcgcagtttcactgtaccggccgtgcgtactcagacatgcatggcttaatctttgagacaagcatatgctactggcaggatcaacattgacaacgactcggaccgatg

SEQ ID NO: 15843 - DNA, 203 bp, Artificial sequence
  synthetic
ggcgcgccagtcctcatagagtgtgggccgcgcgcgcgcgccgcttccgcaggtttcccgtgttgagtcaaattaagccgcaggctccactcctggtggtgcccttccgtcaattcctttaagtttcagctttgcaaccatactccccccggaacccaaagactttggtttcccggaatcattgacaacgactcggaccgatg

SEQ ID NO: 15844 - DNA, 203 bp, Artificial sequence
  synthetic
ggcgcgccagtccttgagatagacgggccgcgcgcgcgcgccgcttccgccacggaatcgagaagggacacggaatcgagaatcagcacggaatcgagaatctccacggaatcgagaacgcccacggaatcgagaatttccacggaatcgagaatggacacggaatcgagaacgctggtcattgacaacgactcggaccgatg

SEQ ID NO: 15845 - DNA, 203 bp, Artificial sequence
  synthetic
ggcgcgccagtcctacgggatagcgggccgcgcgcgcgcgccgcttccgcgcaggctccactcctggtggtgcccttccgtcaattcctttaagtttcagctttgcaaccatactccccccggaacccaaagactttggtttcccggaagctgcccggcgggtcatgggaataacgccgcattgacaacgactcggaccgatg

SEQ ID NO: 15846 - DNA, 203 bp, Artificial sequence
  synthetic
ggcgcgccagtccttcataggatcgggccgcgcgcgcgcgccgcttccgctactcccacggcgggggatactcccgtcggtctcagtactccctgccagctctctactcccgttcttccgcctactccccgtcgcgtttctactcccgtcgcaatggatactcccatcgccgcgcttactcccgacaacgactcggaccgatg

SEQ ID NO: 15847 - DNA, 203 bp, Artificial sequence
  synthetic
ggcgcgccagtcctgttgagataggggccgcgcgcgcgcgccgcttccgcttaaaaattaaccagacaaatcgctccaccaactaagaacggccatgcaccaccacccacggaatcgagaaagagctatcaatctgtcaatcctgtccgtgtccgggccgggtgaggtttcccgctggtcattgacaacgactcggaccgatg

SEQ ID NO: 15848 - DNA, 203 bp, Artificial sequence
  synthetic
ggcgcgccagtcctaatagctacggggccgcgcgcgcgcgccgcttccgcttaaaacggtatctgatcgtcttcgaacctccgactttcgttcttgattaatgaaaacattcttggcaaatgctttcgctctggtccgtcttgcgccggtccaagaatttcacctctagcggcgctggtcattgacaacgactcggaccgatg

SEQ ID NO: 15849 - DNA, 203 bp, Artificial sequence
  synthetic
ggcgcgccagtcctccaggatagagggccgcgcgcgcgcgccgcttccgcttaaactccactcctggtggtgcccttccgtcaattcctttaagtttcagctttgcaaccatactccccccggaacccaaagactttggtttcccggaagctgcccggcgggtcatgggaatagctggtcattgacaacgactcggaccgatg

SEQ ID NO: 15850 - DNA, 203 bp, Artificial sequence
  synthetic
ggcgcgccagtccttaacgcataggggccgcgcgcgcgcgccgcttccgcttaaataacggcaaccatactccccccggaacccaaagactttggtttcccggaagctgcccggcgggtcatgggaataacgccgccgcatcgccggtcggcatcgtttatggtcggcgccgcgctggtcattgacaacgactcggaccgatg

SEQ ID NO: 15851 - DNA, 203 bp, Artificial sequence
  synthetic
ggcgcgccagtcctatagctcttagggccgcgcgcgcgcgccgcttccgcttaaataacggcaccaaaggaaccataactgatttaatgagccattcgcagtttcactgtaccggccgtgcgtactcagacatgcatggcttaatctttgagacaagcatatgctatcgccgcgctggtcattgacaacgactcggaccgatg

SEQ ID NO: 15852 - DNA, 203 bp, Artificial sequence
  synthetic
ggcgcgccagtcctggatagtctagggccgcgcgcgcgcgccgcttccgcttaaataacggcgaccatactccccccggaacccaaagactttggtttcccggaagctgcccggcgggtcatgggaataacgccgccgcatcgccggtcggcatcgtttatggtcatcgccgcgctggtcattgacaacgactcggaccgatg

SEQ ID NO: 15853 - DNA, 203 bp, Artificial sequence
  synthetic
ggcgcgccagtcctatagtgcgaggggccgcgcgcgcgcgccgcttccgcttaaataacggcgggaaaggaaccataactgatttaatgagccattcgcagtttcactgtaccggccgtgcgtactcagacatgcatggcttaatctttgagacaagcatatgagatcgccgcgctggtcattgacaacgactcggaccgatg

SEQ ID NO: 15854 - DNA, 203 bp, Artificial sequence
  synthetic
ggcgcgccagtcctaataggactagggccgcgcgcgcgcgccgcttccgcttaaataacggcgggacaaatcgctccaccaactaagaacggccatgcaccaccacccacggaatcgagaaagagctatcaatctgtcaatcctgtccgtgtccgggccgggtggatcgccgcgctggtcattgacaacgactcggaccgatg

SEQ ID NO: 15855 - DNA, 203 bp, Artificial sequence
  synthetic
ggcgcgccagtcctacatagtcgcgggccgcgcgcgcgcgccgcttccgcttaaataacggcgggcatactccccccggaacccaaagactttggtttcccggaagctgcccggcgggtcatgggaataacgccgccgcatcgccggtcggcatcgtttatggagatcgccgcgctggtcattgacaacgactcggaccgatg

SEQ ID NO: 15856 - DNA, 203 bp, Artificial sequence
  synthetic
ggcgcgccagtcctcaataggtctgggccgcgcgcgcgcgccgcttccgcttaaataacggcggggaaggaaccataactgatttaatgagccattcgcagtttcactgtaccggccgtgcgtactcagacatgcatggcttaatctttgagacaagcatatgagatcgccgcgctggtcattgacaacgactcggaccgatg

SEQ ID NO: 15857 - DNA, 203 bp, Artificial sequence
  synthetic
ggcgcgccagtcctgtgagatagcgggccgcgcgcgcgcgccgcttccgcttaaataacggcggggcaaatcgctccaccaactaagaacggccatgcaccaccacccacggaatcgagaaagagctatcaatctgtcaatcctgtccgtgtccgggccggggagatcgccgcgctggtcattgacaacgactcggaccgatg

SEQ ID NO: 15858 - DNA, 203 bp, Artificial sequence
  synthetic
ggcgcgccagtcctatagcatagtgggccgcgcgcgcgcgccgcttccgcttaaataacggcgggggaactccccccggaacccaaagactttggtttcccggaagctgcccggcgggtcatgggaataacgccgccgcatcgccggtcggcatcgtttaaagagatcgccgcgctggtcattgacaacgactcggaccgatg

SEQ ID NO: 15859 - DNA, 203 bp, Artificial sequence
  synthetic
ggcgcgccagtccttcatagcactgggccgcgcgcgcgcgccgcttccgcttaaataacggcgggggacaaattaagccgcaggctccactcctggtggtgcccttccgtcaattcctttaagtttcagctttgcaaccatactccccccggaacccaaaaagagatcgccgcgctggtcattgacaacgactcggaccgatg

SEQ ID NO: 15860 - DNA, 203 bp, Artificial sequence
  synthetic
ggcgcgccagtcctatagatacccgggccgcgcgcgcgcgccgcttccgcttaaataacggcgggggaccggcgggtcggtctcagccggcgggtccagctctcccggcgggttcttccgccccggcgggttcgcgtttcccggcgggtcgcaatggaccggcgggtcgccgcgctccggcgggtcaacgactcggaccgatg

SEQ ID NO: 15861 - DNA, 203 bp, Artificial sequence
  synthetic
ggcgcgccagtcctctcaatagttgggccgcgcgcgcgcgccgcttccgcttaaataacggcgggggagatcgctccaccaactaagaacggccatgcaccaccacccacggaatcgagaaagagctatcaatctgtcaatcctgtccgtgtccgggccgaagagatcgccgcgctggtcattgacaacgactcggaccgatg

SEQ ID NO: 15862 - DNA, 203 bp, Artificial sequence
  synthetic
ggcgcgccagtcctcatagcctaggggccgcgcgcgcgcgccgcttccgcttaaataacggcgggggaggccgcataactgatttaatgagccattcgcagtttcactgtaccggccgtgcgtactcagacatgcatggcttaatctttgagacaggaagaagagatcgccgcgctggtcattgacaacgactcggaccgatg

SEQ ID NO: 15863 - DNA, 203 bp, Artificial sequence
  synthetic
ggcgcgccagtcctaagaagataggggccgcgcgcgcgcgccgcttccgcttaaataacggcgggggaggccgccccggaacccaaagactttggtttcccggaagctgcccggcgggtcatgggaataacgccgccgcatcgccggtcggcatcggaagaagagatcgccgcgctggtcattgacaacgactcggaccgatg

SEQ ID NO: 15864 - DNA, 203 bp, Artificial sequence
  synthetic
ggcgcgccagtcctatagagcatggggccgcgcgcgcgcgccgcttccgcttaaataacggcgggggaggccgcgaacctccgactttcgttcttgattaatgaaaacattcttggcaaatgctttcgctctggtccgtcttgcgccggtccaatggaagaagagatcgccgcgctggtcattgacaacgactcggaccgatg

SEQ ID NO: 15865 - DNA, 203 bp, Artificial sequence
  synthetic
ggcgcgccagtccttgcttcataggggccgcgcgcgcgcgccgcttccgcttaaataacggcgggggaggccgcgccggaacccaaagactttggtttcccggaagctgcccggcgggtcatgggaataacgccgccgcatcgccggtcggcaatggaagaagagatcgccgcgctggtcattgacaacgactcggaccgatg

SEQ ID NO: 15866 - DNA, 203 bp, Artificial sequence
  synthetic
ggcgcgccagtcctcagttcataggggccgcgcgcgcgcgccgcttccgcttaaataacggcgggggaggccgcggcaccaactaagaacggccatgcaccaccacccacggaatcgagaaagagctatcaatctgtcaatcctgtccgtgtaatggaagaagagatcgccgcgctggtcattgacaacgactcggaccgatg

SEQ ID NO: 15867 - DNA, 203 bp, Artificial sequence
  synthetic
ggcgcgccagtcctaatagtgccagggccgcgcgcgcgcgccgcttccgcttaaataacggcgggggaggccgcgggccgcaggctccactcctggtggtgcccttccgtcaattcctttaagtttcagctttgcaaccatactccccccggaatggaagaagagatcgccgcgctggtcattgacaacgactcggaccgatg

SEQ ID NO: 15868 - DNA, 203 bp, Artificial sequence
  synthetic
ggcgcgccagtcctatagcgggttgggccgcgcgcgcgcgccgcttccgcttaaataacggcgggggaggccgcggtcggaactaagaacggccatgcaccaccacccacggaatcgagaaagagctatcaatctgtcaatcctgtcctcgcaatggaagaagagatcgccgcgctggtcattgacaacgactcggaccgatg

SEQ ID NO: 15869 - DNA, 203 bp, Artificial sequence
  synthetic
ggcgcgccagtcctatagggacaagggccgcgcgcgcgcgccgcttccgcttaaataacggcgggggaggccgcggtcggcaggctccactcctggtggtgcccttccgtcaattcctttaagtttcagctttgcaaccatactcccctcgcaatggaagaagagatcgccgcgctggtcattgacaacgactcggaccgatg

SEQ ID NO: 15870 - DNA, 203 bp, Artificial sequence
  synthetic
ggcgcgccagtcctcaatagagtggggccgcgcgcgcgcgccgcttccgcttaaataacggcgggggaggccgcggtcgggatttaatgagccattcgcagtttcactgtaccggccgtgcgtactcagacatgcatggcttaatctttcgcaatggaagaagagatcgccgcgctggtcattgacaacgactcggaccgatg

SEQ ID NO: 15871 - DNA, 203 bp, Artificial sequence
  synthetic
ggcgcgccagtcctcatagtacaagggccgcgcgcgcgcgccgcttccgcttaaataacggcgggggaggccgcggtcggtactaagaacggccatgcaccaccacccacggaatcgagaaagagctatcaatctgtcaatcctgtcgtcgcaatggaagaagagatcgccgcgctggtcattgacaacgactcggaccgatg

SEQ ID NO: 15872 - DNA, 203 bp, Artificial sequence
  synthetic
ggcgcgccagtcctataggtcctggggccgcgcgcgcgcgccgcttccgcttaaataacggcgggggaggccgcggtcggtaggctccactcctggtggtgcccttccgtcaattcctttaagtttcagctttgcaaccatactcccgtcgcaatggaagaagagatcgccgcgctggtcattgacaacgactcggaccgatg

SEQ ID NO: 15873 - DNA, 203 bp, Artificial sequence
  synthetic
ggcgcgccagtcctgcacataggagggccgcgcgcgcgcgccgcttccgcttaaataacggcgggggaggccgcggtcggtatttaatgagccattcgcagtttcactgtaccggccgtgcgtactcagacatgcatggcttaatctgtcgcaatggaagaagagatcgccgcgctggtcattgacaacgactcggaccgatg

SEQ ID NO: 15874 - DNA, 203 bp, Artificial sequence
  synthetic
ggcgcgccagtcctaatagtaatcgggccgcgcgcgcgcgccgcttccgcttaaataacggcgggggaggccgcggtcggtctcagaccggccgtccagctctcaccggccgttcttccgccaccggccgttcgcgtttcaccggccgtcgcaatggaaccggccgtcgccgcgctaccggccgtcaacgactcggaccgatg

SEQ ID NO: 15875 - DNA, 203 bp, Artificial sequence
  synthetic
ggcgcgccagtcctatagtagggagggccgcgcgcgcgcgccgcttccgcttaaataacggcgggggaggccgcggtcggtctcagaccggccgtccagctctcaccggccgttcttccgccaccggccgttcgcgtttcaccggccgtcgcaatggaaccggccgtcgccgcgctggtcattgacaacgactcggaccgatg

SEQ ID NO: 15876 - DNA, 203 bp, Artificial sequence
  synthetic
ggcgcgccagtcctccgatttggggggccgcgcgcgcgcgccgcttccgcttaaataacggcgggggaggccgcggtcggtctcagatgagccattcgcagtttcactgtaccggccgtgcgtactcagacatgcatggctttgccggtcgcaatggaagaagagatcgccgcgctggtcattgacaacgactcggaccgatg

SEQ ID NO: 15877 - DNA, 203 bp, Artificial sequence
  synthetic
ggcgcgccagtcctcacacgtcaagggccgcgcgcgcgcgccgcttccgcttaaataacggcgggggaggccgcggtcggtctcagccggcgggtccagctctcccggcgggttcttccgccccggcgggttcgcgtttcccggcgggtcgcaatggaccggcgggtcgccgcgctggtcattgacaacgactcggaccgatg

SEQ ID NO: 15878 - DNA, 203 bp, Artificial sequence
  synthetic
ggcgcgccagtcctcgtgacgtgtgggccgcgcgcgcgcgccgcttccgcttaaataacggcgggggaggccgcggtcggtctcaggggagtatgccagctctcgggagtagttcttccgccgggagtacgtcgcgtttcgggagtagtcgcaatggagggagtaatcgccgcgctggtcattgacaacgactcggaccgatg

SEQ ID NO: 15879 - DNA, 203 bp, Artificial sequence
  synthetic
ggcgcgccagtcctacagttactagggccgcgcgcgcgcgccgcttccgcttaaataacggcgggggaggccgcggtcggtctcagtactccctgccagctctctactcccgttcttccgcctactccccgtcgcgtttctactcccgtcgcaatggatactcccatcgccgcgctggtcattgacaacgactcggaccgatg

SEQ ID NO: 15880 - DNA, 203 bp, Artificial sequence
  synthetic
ggcgcgccagtccttggttaccatgggccgcgcgcgcgcgccgcttccgcttaaataacggcgggggaggccgcggtcggtctcagtactccctgccagctctctactcccgttcttccgcctactccccgtcgcgtttctactcccgtcgcaatggatactcccatcgccgcgcttactcccgacaacgactcggaccgatg

SEQ ID NO: 15881 - DNA, 203 bp, Artificial sequence
  synthetic
ggcgcgccagtccttgtagtaacagggccgcgcgcgcgcgccgcttccgcttaaataacggcgggggaggccgcggtcggtctcagtcactttggtttcccggaagctgcccggcgggtcatgggaataacgccgccgcatctgccggtcgcaatggaagaagagatcgccgcgctggtcattgacaacgactcggaccgatg

SEQ ID NO: 15882 - DNA, 203 bp, Artificial sequence
  synthetic
ggcgcgccagtcctgtattgtaaagggccgcgcgcgcgcgccgcttccgcttaaataacggcgggggaggccgcggtcggtctcagtcgccaagtttcagctttgcaaccatactccccccggaacccaaagactttttctctgccggtcgcaatggaagaagagatcgccgcgctggtcattgacaacgactcggaccgatg

SEQ ID NO: 15883 - DNA, 203 bp, Artificial sequence
  synthetic
ggcgcgccagtcctgctattgtaagggccgcgcgcgcgcgccgcttccgcttaaataacggcgggggaggccgcggtcggtctcagtcgcccctggtggtgcccttccgtcaattcctttaagtttcagctttgcaattctctgccggtcgcaatggaagaagagatcgccgcgctggtcattgacaacgactcggaccgatg

SEQ ID NO: 15884 - DNA, 203 bp, Artificial sequence
  synthetic
ggcgcgccagtcctgccttgcgcggggccgcgcgcgcgcgccgcttccgcttaaataacggcgggggaggccgcggtcggtctcagtcgccgctatgcaccaccacccacggaatcgagaaagagctatcaatccgtttctctgccggtcgcaatggaagaagagatcgccgcgctggtcattgacaacgactcggaccgatg

SEQ ID NO: 15885 - DNA, 203 bp, Artificial sequence
  synthetic
ggcgcgccagtcctctcaaatacagggccgcgcgcgcgcgccgcttccgcttaaataacggcgggggaggccgcggtcggtctcagtcgccgctgccagcgtttcactgtaccggccgtgcgtactcaccgtcgcgtttctctgccggtcgcaatggaagaagagatcgccgcgctggtcattgacaacgactcggaccgatg

SEQ ID NO: 15886 - DNA, 203 bp, Artificial sequence
  synthetic
ggcgcgccagtcctgtcaaaataggggccgcgcgcgcgcgccgcttccgcttaaataacggcgggggaggccgcggtcggtctcagtcgccgctgccagctcccacccacggaatcgagaaagagccgccgtcgcgtttctctgccggtcgcaatggaagaagagatcgccgcgctggtcattgacaacgactcggaccgatg

SEQ ID NO: 15887 - DNA, 203 bp, Artificial sequence
  synthetic
ggcgcgccagtcctgcaaatacatgggccgcgcgcgcgcgccgcttccgcttaaataacggcgggggaggccgcggtcggtctcagtcgccgctgccagctcccttccgtcaattcctttaagtttcgccgtcgcgtttctctgccggtcgcaatggaagaagagatcgccgcgctggtcattgacaacgactcggaccgatg

SEQ ID NO: 15888 - DNA, 203 bp, Artificial sequence
  synthetic
ggcgcgccagtcctcaaatattgagggccgcgcgcgcgcgccgcttccgcttaaataacggcgggggaggccgcggtcggtctcagtcgccgctgccagctctcaaacattcttggcaaatgcttccgccgtcgcgtttctctgccggtcgcaatggaagaagagatcgccgcgctggtcattgacaacgactcggaccgatg

SEQ ID NO: 15889 - DNA, 203 bp, Artificial sequence
  synthetic
ggcgcgccagtcctactaaatacggggccgcgcgcgcgcgccgcttccgcttaaataacggcgggggaggccgcggtcggtctcagtcgccgctgccagctctcacccacggaatcgagaaagatccgccgtcgcgtttctctgccggtcgcaatggaagaagagatcgccgcgctggtcattgacaacgactcggaccgatg

SEQ ID NO: 15890 - DNA, 203 bp, Artificial sequence
  synthetic
ggcgcgccagtcctgggtaaatatgggccgcgcgcgcgcgccgcttccgcttaaataacggcgggggaggccgcggtcggtctcagtcgccgctgccagctctcaccggccgttcttccgccaccggccgttcgcgtttcaccggccgtcgcaatggaaccggccgtcgccgcgctaccggccgtcaacgactcggaccgatg

SEQ ID NO: 15891 - DNA, 203 bp, Artificial sequence
  synthetic
ggcgcgccagtcctcaaatactaggggccgcgcgcgcgcgccgcttccgcttaaataacggcgggggaggccgcggtcggtctcagtcgccgctgccagctctcaccggccgttcttccgccaccggccgttcgcgtttcaccggccgtcgcaatggaaccggccgtcgccgcgctggtcattgacaacgactcggaccgatg

SEQ ID NO: 15892 - DNA, 203 bp, Artificial sequence
  synthetic
ggcgcgccagtcctccctaaatacgggccgcgcgcgcgcgccgcttccgcttaaataacggcgggggaggccgcggtcggtctcagtcgccgctgccagctctcacggccggttcttccgccacggccggttcgcgtttcacggccggtcgcaatggaacggccggtcgccgcgctggtcattgacaacgactcggaccgatg

SEQ ID NO: 15893 - DNA, 203 bp, Artificial sequence
  synthetic
ggcgcgccagtcctggcctaaatagggccgcgcgcgcgcgccgcttccgcttaaataacggcgggggaggccgcggtcggtctcagtcgccgctgccagctctcccggcgggttcttccgccccggcgggttcgcgtttcccggcgggtcgcaatggaccggcgggtcgccgcgctccggcgggtcaacgactcggaccgatg

SEQ ID NO: 15894 - DNA, 203 bp, Artificial sequence
  synthetic
ggcgcgccagtccttatttagcgcgggccgcgcgcgcgcgccgcttccgcttaaataacggcgggggaggccgcggtcggtctcagtcgccgctgccagctctcgcaaccatactcccccccgctccgccgtcgcgtttctctgccggtcgcaatggaagaagagatcgccgcgctggtcattgacaacgactcggaccgatg

SEQ ID NO: 15895 - DNA, 203 bp, Artificial sequence
  synthetic
ggcgcgccagtccttacgctatttgggccgcgcgcgcgcgccgcttccgcttaaataacggcgggggaggccgcggtcggtctcagtcgccgctgccagctctcgcacgcccggcgggtcccgctccgccgtcgcgtttctctgccggtcgcaatggaagaagagatcgccgcgctggtcattgacaacgactcggaccgatg

SEQ ID NO: 15896 - DNA, 203 bp, Artificial sequence
  synthetic
ggcgcgccagtcctcgggttggacgggccgcgcgcgcgcgccgcttccgcttaaataacggcgggggaggccgcggtcggtctcagtcgccgctgccagctctcgcactctgattctccgccgctccgccgtcgcgtttctctgccggtcgcaatggaagaagagatcgccgcgctggtcattgacaacgactcggaccgatg

SEQ ID NO: 15897 - DNA, 203 bp, Artificial sequence
  synthetic
ggcgcgccagtcctgactcgtaccgggccgcgcgcgcgcgccgcttccgcttaaataacggcgggggaggccgcggtcggtctcagtcgccgctgccagctctcgcactctgttcttccgccgctccgccgtcgcgtttcttcttggcaaacaatggattcttggcaaaccgcgctttcttggcaaaacgactcggaccgatg

SEQ ID NO: 15898 - DNA, 203 bp, Artificial sequence
  synthetic
ggcgcgccagtcctctcgtacacggggccgcgcgcgcgcgccgcttccgcttaaataacggcgggggaggccgcggtcggtctcagtcgccgctgccagctctcgcactctgttcttccgcctactccccgtcgcgtttctactcccgtcgcaatggatactcccatcgccgcgcttactcccgacaacgactcggaccgatg

SEQ ID NO: 15899 - DNA, 203 bp, Artificial sequence
  synthetic
ggcgcgccagtcctagtcgtacgtgggccgcgcgcgcgcgccgcttccgcttaaataacggcgggggaggccgcggtcggtctcagtcgccgctgccagctctcgcactctgttcttccgccttcttggcaaagcgtttcttcttggcaaacaatggattcttggcaaaccgcgctttcttggcaaaacgactcggaccgatg

SEQ ID NO: 15900 - DNA, 203 bp, Artificial sequence
  synthetic
ggcgcgccagtcctgtacggttctgggccgcgcgcgcgcgccgcttccgcttaaataacggcgggggaggccgcggtcggtctcagtcgccgctgccagctctcttcttggcaaattccgccttcttggcaaagcgtttcttcttggcaaacaatggattcttggcaaaccgcgctttcttggcaaaacgactcggaccgatg

SEQ ID NO: 15901 - DNA, 203 bp, Artificial sequence
  synthetic
ggcgcgccagtcctgtctgaaccggggccgcgcgcgcgcgccgcttccgcttaaataacggcgggggaggccgcggtcggtctcagtcgccgctgccagctcttcactgtaccggccgtgcgtacccgccgtcgcgtttctctgccggtcgcaatggaagaagagatcgccgcgctggtcattgacaacgactcggaccgatg

SEQ ID NO: 15902 - DNA, 203 bp, Artificial sequence
  synthetic
ggcgcgccagtcctacgagaaccggggccgcgcgcgcgcgccgcttccgcttaaataacggcgggggaggccgcggtcggtctcagtcgccgctgccagctcttcactgtaccggccgtgcgtactcgccgtcgcgtttctctgccggtcgcaatggaagaagagatcgccgcgctggtcattgacaacgactcggaccgatg

SEQ ID NO: 15903 - DNA, 203 bp, Artificial sequence
  synthetic
ggcgcgccagtcctgtgaaccgcggggccgcgcgcgcgcgccgcttccgcttaaataacggcgggggaggccgcggtcggtctcagtcgccgctgccagctggaagctgcccggcgggtcatgggaagccgtcgcgtttctctgccggtcgcaatggaagaagagatcgccgcgctggtcattgacaacgactcggaccgatg

SEQ ID NO: 15904 - DNA, 203 bp, Artificial sequence
  synthetic
ggcgcgccagtcctgagccgacgcgggccgcgcgcgcgcgccgcttccgcttaaataacggcgggggaggccgcggtcggtctcagtcgccgctgccagtgcccttccgtcaattcctttaagtttcagcgtcgcgtttctctgccggtcgcaatggaagaagagatcgccgcgctggtcattgacaacgactcggaccgatg

SEQ ID NO: 15905 - DNA, 203 bp, Artificial sequence
  synthetic
ggcgcgccagtcctagccgacgttgggccgcgcgcgcgcgccgcttccgcttaaataacggcgggggaggccgcggtcggtctcagtcgccgctgccataatgaaaacattcttggcaaatgctttcgctgtcgcgtttctctgccggtcgcaatggaagaagagatcgccgcgctggtcattgacaacgactcggaccgatg

SEQ ID NO: 15906 - DNA, 203 bp, Artificial sequence
  synthetic
ggcgcgccagtcctagtgccgaaggggccgcgcgcgcgcgccgcttccgcttaaataacggcgggggaggccgcggtcggtctcagtcgccgctgccgcagtttcactgtaccggccgtgcgtactcagactcgcgtttctctgccggtcgcaatggaagaagagatcgccgcgctggtcattgacaacgactcggaccgatg

SEQ ID NO: 15907 - DNA, 203 bp, Artificial sequence
  synthetic
ggcgcgccagtccttttcgccgaagggccgcgcgcgcgcgccgcttccgcttaaataacggcgggggaggccgcggtcggtctcagtcgccgctgcctcccggaagctgcccggcgggtcatgggaataactcgcgtttctctgccggtcgcaatggaagaagagatcgccgcgctggtcattgacaacgactcggaccgatg

SEQ ID NO: 15908 - DNA, 203 bp, Artificial sequence
  synthetic
ggcgcgccagtcctagccgattgagggccgcgcgcgcgcgccgcttccgcttaaataacggcgggggaggccgcggtcggtctcagtcgccgctgccttaatgaaaacattcttggcaaatgctttcgctctcgcgtttctctgccggtcgcaatggaagaagagatcgccgcgctggtcattgacaacgactcggaccgatg

SEQ ID NO: 15909 - DNA, 203 bp, Artificial sequence
  synthetic
ggcgcgccagtcctacgtgccgaagggccgcgcgcgcgcgccgcttccgcttaaataacggcgggggaggccgcggtcggtctcagtcgccgctgcgcaccaccacccacggaatcgagaaagagctatcaacgcgtttctctgccggtcgcaatggaagaagagatcgccgcgctggtcattgacaacgactcggaccgatg

SEQ ID NO: 15910 - DNA, 203 bp, Artificial sequence
  synthetic
ggcgcgccagtccttcgccgagtggggccgcgcgcgcgcgccgcttccgcttaaataacggcgggggaggccgcggtcggtctcagtcgccgctgctggtgcccttccgtcaattcctttaagtttcagcttcgcgtttctctgccggtcgcaatggaagaagagatcgccgcgctggtcattgacaacgactcggaccgatg

SEQ ID NO: 15911 - DNA, 203 bp, Artificial sequence
  synthetic
ggcgcgccagtccttgtcagccgagggccgcgcgcgcgcgccgcttccgcttaaataacggcgggggaggccgcggtcggtctcagtcgccgctgcttcccggaagctgcccggcgggtcatgggaataacgcgcgtttctctgccggtcgcaatggaagaagagatcgccgcgctggtcattgacaacgactcggaccgatg

SEQ ID NO: 15912 - DNA, 203 bp, Artificial sequence
  synthetic
ggcgcgccagtcctgccgagttcggggccgcgcgcgcgcgccgcttccgcttaaataacggcgggggaggccgcggtcggtctcagtcgccgctggattaatgaaaacattcttggcaaatgctttcgctctggcgtttctctgccggtcgcaatggaagaagagatcgccgcgctggtcattgacaacgactcggaccgatg

SEQ ID NO: 15913 - DNA, 203 bp, Artificial sequence
  synthetic
ggcgcgccagtcctttagccgactgggccgcgcgcgcgcgccgcttccgcttaaataacggcgggggaggccgcggtcggtctcagtcgccgctggtggtgcccttccgtcaattcctttaagtttcagctttgcatttctctgccggtcgcaatggaagaagagatcgccgcgctggtcattgacaacgactcggaccgatg

SEQ ID NO: 15914 - DNA, 203 bp, Artificial sequence
  synthetic
ggcgcgccagtcctgccgaatagggggccgcgcgcgcgcgccgcttccgcttaaataacggcgggggaggccgcggtcggtctcagtcgccgctttcgcagtttcactgtaccggccgtgcgtactcagacatgcgtttctctgccggtcgcaatggaagaagagatcgccgcgctggtcattgacaacgactcggaccgatg

SEQ ID NO: 15915 - DNA, 203 bp, Artificial sequence
  synthetic
ggcgcgccagtcctgaaagccgatgggccgcgcgcgcgcgccgcttccgcttaaataacggcgggggaggccgcggtcggtctcagtcgccgtggtttcccggaagctgcccggcgggtcatgggaataacgccgctttctctgccggtcgcaatggaagaagagatcgccgcgctggtcattgacaacgactcggaccgatg

SEQ ID NO: 15916 - DNA, 203 bp, Artificial sequence
  synthetic
ggcgcgccagtcctgccgatcagtgggccgcgcgcgcgcgccgcttccgcttaaataacggcgggggaggccgcggtcggtctcagtcgcctcttgattaatgaaaacattcttggcaaatgctttcgctctggtccttctctgccggtcgcaatggaagaagagatcgccgcgctggtcattgacaacgactcggaccgatg

SEQ ID NO: 15917 - DNA, 203 bp, Artificial sequence
  synthetic
ggcgcgccagtccttgccgaaaatgggccgcgcgcgcgcgccgcttccgcttaaataacggcgggggaggccgcggtcggtctcagtcgcggccatgcaccaccacccacggaatcgagaaagagctatcaatctgtcactctgccggtcgcaatggaagaagagatcgccgcgctggtcattgacaacgactcggaccgatg

SEQ ID NO: 15918 - DNA, 203 bp, Artificial sequence
  synthetic
ggcgcgccagtccttcggcagagtgggccgcgcgcgcgcgccgcttccgcttaaataacggcgggggaggccgcggtcggtctcagtcgctttggtttcccggaagctgcccggcgggtcatgggaataacgccgccgtctctgccggtcgcaatggaagaagagatcgccgcgctggtcattgacaacgactcggaccgatg

SEQ ID NO: 15919 - DNA, 203 bp, Artificial sequence
  synthetic
ggcgcgccagtcctgtcggcatacgggccgcgcgcgcgcgccgcttccgcttaaataacggcgggggaggccgcggtcggtctcagtttgccaagaaagctctctttgccaagaattccgcctttgccaagaagcgtttctttgccaagaacaatggatttgccaagaaccgcgctggtcattgacaacgactcggaccgatg

SEQ ID NO: 15920 - DNA, 203 bp, Artificial sequence
  synthetic
ggcgcgccagtcctaagtcggcatgggccgcgcgcgcgcgccgcttccgcttaaataacggcgggggaggccgcggtcggtctcttcctttaagtttcagctttgcaaccatactccccccggaacccaaagactttggtttccccggtcgcaatggaagaagagatcgccgcgctggtcattgacaacgactcggaccgatg

SEQ ID NO: 15921 - DNA, 203 bp, Artificial sequence
  synthetic
ggcgcgccagtcctgtcggctacggggccgcgcgcgcgcgccgcttccgcttaaataacggcgggggaggccgcggtcgtgatttaatgagccattcgcagtttcactgtaccggccgtgcgtactcagacatgcatggcttaatctttcgcaatggaagaagagatcgccgcgctggtcattgacaacgactcggaccgatg

SEQ ID NO: 15922 - DNA, 203 bp, Artificial sequence
  synthetic
ggcgcgccagtcctacacctcggcgggccgcgcgcgcgcgccgcttccgcttaaataacggcgggggaggccgcggtggaacccaaagactttggtttcccggaagctgcccggcgggtcatgggaataacgccgccgcatcgccggtcggcaatggaagaagagatcgccgcgctggtcattgacaacgactcggaccgatg

SEQ ID NO: 15923 - DNA, 203 bp, Artificial sequence
  synthetic
ggcgcgccagtccttgggctcggcgggccgcgcgcgcgcgccgcttccgcttaaataacggcgggggaggccgtaagccgcaggctccactcctggtggtgcccttccgtcaattcctttaagtttcagctttgcaaccatactccccccggaacggaagaagagatcgccgcgctggtcattgacaacgactcggaccgatg

SEQ ID NO: 15924 - DNA, 203 bp, Artificial sequence
  synthetic
ggcgcgccagtccttatcggcaaggggccgcgcgcgcgcgccgcttccgcttaaataacggcgggggaggcgcccttccgtcaattcctttaagtttcagctttgcaaccatactccccccggaacccaaagactttggtttcccggaagctgcccgaagaagagatcgccgcgctggtcattgacaacgactcggaccgatg

SEQ ID NO: 15925 - DNA, 203 bp, Artificial sequence
  synthetic
ggcgcgccagtcctgcttcggcacgggccgcgcgcgcgcgccgcttccgcttaaataacggcgggggaggcttcgaacctccgactttcgttcttgattaatgaaaacattcttggcaaatgctttcgctctggtccgtcttgcgccggtccaagaatagaagagatcgccgcgctggtcattgacaacgactcggaccgatg

SEQ ID NO: 15926 - DNA, 203 bp, Artificial sequence
  synthetic
ggcgcgccagtcctcccgctaccggggccgcgcgcgcgcgccgcttccgcttaaataacggcgggggtggtgcccttccgtcaattcctttaagtttcagctttgcaaccatactccccccggaacccaaagactttggtttcccggaagctgcccggcggagagatcgccgcgctggtcattgacaacgactcggaccgatg

SEQ ID NO: 15927 - DNA, 203 bp, Artificial sequence
  synthetic
ggcgcgccagtcctcacacccttagggccgcgcgcgcgcgccgcttccgcttaaataacggcgggggtggtgcccttccgtcaattcctttaagtttcagctttgcaaccatactccccccggaacccaaagactttggtttcccggaagctgcccggcgggtagatcgccgcgctggtcattgacaacgactcggaccgatg

SEQ ID NO: 15928 - DNA, 203 bp, Artificial sequence
  synthetic
ggcgcgccagtcctaaagcccgttgggccgcgcgcgcgcgccgcttccgcttaaataacggcgtgagtcaaattaagccgcaggctccactcctggtggtgcccttccgtcaattcctttaagtttcagctttgcaaccatactccccccggaacccaaagacttatcgccgcgctggtcattgacaacgactcggaccgatg

SEQ ID NO: 15929 - DNA, 203 bp, Artificial sequence
  synthetic
ggcgcgccagtcctgttcgggcttgggccgcgcgcgcgcgccgcttccgcttaaataacgggaccaaaggaaccataactgatttaatgagccattcgcagtttcactgtaccggccgtgcgtactcagacatgcatggcttaatctttgagacaagcatatgctaccgccgcgctggtcattgacaacgactcggaccgatg

SEQ ID NO: 15930 - DNA, 203 bp, Artificial sequence
  synthetic
ggcgcgccagtcctctttctcgcggggccgcgcgcgcgcgccgcttccgcttaaataacgtgttgagtcaaattaagccgcaggctccactcctggtggtgcccttccgtcaattcctttaagtttcagctttgcaaccatactccccccggaacccaaagactttggttcgcgctggtcattgacaacgactcggaccgatg

SEQ ID NO: 15931 - DNA, 203 bp, Artificial sequence
  synthetic
ggcgcgccagtcctcacctcgcgggggccgcgcgcgcgcgccgcttccgcttaaataactgcaaccatactccccccggaacccaaagactttggtttcccggaagctgcccggcgggtcatgggaataacgccgccgcatcgccggtcggcatcgtttatggtcggaaccgcgctggtcattgacaacgactcggaccgatg

SEQ ID NO: 15932 - DNA, 203 bp, Artificial sequence
  synthetic
ggcgcgccagtcctgaccgcgagagggccgcgcgcgcgcgccgcttccgcttaaataccactcctggtggtgcccttccgtcaattcctttaagtttcagctttgcaaccatactccccccggaacccaaagactttggtttcccggaagctgcccggcgggtcatgggaagcgctggtcattgacaacgactcggaccgatg

SEQ ID NO: 15933 - DNA, 203 bp, Artificial sequence
  synthetic
ggcgcgccagtcctacgcgagtgagggccgcgcgcgcgcgccgcttccgcttaaataccgtgttgagtcaaattaagccgcaggctccactcctggtggtgcccttccgtcaattcctttaagtttcagctttgcaaccatactccccccggaacccaaagactttggtttgcgctggtcattgacaacgactcggaccgatg

SEQ ID NO: 15934 - DNA, 203 bp, Artificial sequence
  synthetic
ggcgcgccagtcctacgcgagaacgggccgcgcgcgcgcgccgcttccgcttaaatagagcgaccaaaggaaccataactgatttaatgagccattcgcagtttcactgtaccggccgtgcgtactcagacatgcatggcttaatctttgagacaagcatatgctactggcgcgctggtcattgacaacgactcggaccgatg

SEQ ID NO: 15935 - DNA, 203 bp, Artificial sequence
  synthetic
ggcgcgccagtcctgacacaccatgggccgcgcgcgcgcgccgcttccgcttaaatcccgtgttgagtcaaattaagccgcaggctccactcctggtggtgcccttccgtcaattcctttaagtttcagctttgcaaccatactccccccggaacccaaagactttggtttccgctggtcattgacaacgactcggaccgatg

SEQ ID NO: 15936 - DNA, 203 bp, Artificial sequence
  synthetic
ggcgcgccagtcctgtgtcagtaggggccgcgcgcgcgcgccgcttccgcttaaatcgagcgaccaaaggaaccataactgatttaatgagccattcgcagtttcactgtaccggccgtgcgtactcagacatgcatggcttaatctttgagacaagcatatgctactggcacgctggtcattgacaacgactcggaccgatg

SEQ ID NO: 15937 - DNA, 203 bp, Artificial sequence
  synthetic
ggcgcgccagtcctacaggtgtcagggccgcgcgcgcgcgccgcttccgcttaagacggtatctgatcgtcttcgaacctccgactttcgttcttgattaatgaaaacattcttggcaaatgctttcgctctggtccgtcttgcgccggtccaagaatttcacctctagcggcgctggtcattgacaacgactcggaccgatg

SEQ ID NO: 15938 - DNA, 203 bp, Artificial sequence
  synthetic
ggcgcgccagtccttgtgtcaccggggccgcgcgcgcgcgccgcttccgcttacagctttgcaaccatactccccccggaacccaaagactttggtttcccggaagctgcccggcgggtcatgggaataacgccgccgcatcgccggtcggcatcgtttatggtcggaactacgatggtcattgacaacgactcggaccgatg

SEQ ID NO: 15939 - DNA, 203 bp, Artificial sequence
  synthetic
ggcgcgccagtcctttgacaccacgggccgcgcgcgcgcgccgcttccgcttacgacggtatctgatcgtcttcgaacctccgactttcgttcttgattaatgaaaacattcttggcaaatgctttcgctctggtccgtcttgcgccggtccaagaatttcacctctagcggcgctggtcattgacaacgactcggaccgatg

SEQ ID NO: 15940 - DNA, 203 bp, Artificial sequence
  synthetic
ggcgcgccagtcctatgacactgcgggccgcgcgcgcgcgccgcttccgcttagagcgagcgaccaaaggaaccataactgatttaatgagccattcgcagtttcactgtaccggccgtgcgtactcagacatgcatggcttaatctttgagacaagcatatgctactggcaggatggtcattgacaacgactcggaccgatg

SEQ ID NO: 15941 - DNA, 203 bp, Artificial sequence
  synthetic
ggcgcgccagtcctgcgcaggacggggccgcgcgcgcgcgccgcttccggaggtttcccgtgttgagtcaaattaagccgcaggctccactcctggtggtgcccttccgtcaattcctttaagtttcagctttgcaaccatactccccccggaacccaaagactttggtttcccggaagcattgacaacgactcggaccgatg

SEQ ID NO: 15942 - DNA, 203 bp, Artificial sequence
  synthetic
ggcgcgccagtcctagcgcaggccgggccgcgcgcgcgcgccgcttcctgaggtttcccgtgttgagtcaaattaagccgcaggctccactcctggtggtgcccttccgtcaattcctttaagtttcagctttgcaaccatactccccccggaacccaaagactttggtttcccggaagcattgacaacgactcggaccgatg

SEQ ID NO: 15943 - DNA, 203 bp, Artificial sequence
  synthetic
ggcgcgccagtcctattctgcgccgggccgcgcgcgcgcgccgcttcgtgaggtttcccgtgttgagtcaaattaagccgcaggctccactcctggtggtgcccttccgtcaattcctttaagtttcagctttgcaaccatactccccccggaacccaaagactttggtttcccggaagctttgacaacgactcggaccgatg

SEQ ID NO: 15944 - DNA, 203 bp, Artificial sequence
  synthetic
ggcgcgccagtccttatgctgcgcgggccgcgcgcgcgcgccgcttggtgaggtttcccgtgttgagtcaaattaagccgcaggctccactcctggtggtgcccttccgtcaattcctttaagtttcagctttgcaaccatactccccccggaacccaaagactttggtttcccggaagctgtgacaacgactcggaccgatg

SEQ ID NO: 15945 - DNA, 203 bp, Artificial sequence
  synthetic
ggcgcgccagtcctccagtgggtggggccgcgcgtcaattcctttaccgccgtcaattcctttagggacgtcaattcctttatcagcgtcaattcctttatctccgtcaattcctttacgcccgtcaattcctttatttccgtcaattcctttatggacgtcaattcctttacgctggtcattgacaacgactcggaccgatg

SEQ ID NO: 15946 - DNA, 203 bp, Artificial sequence
  synthetic
ggcgcgccagtcctaagtgggtcagggccgcgtactcccgccgcttccgctactcccacggcgggggatactcccgtcggtctcagtactccctgccagctctctactcccgttcttccgcctactccccgtcgcgtttctactcccgtcgcaatggatactcccatcgccgcgcttactcccgacaacgactcggaccgatg

SEQ ID NO: 15947 - DNA, 203 bp, Artificial sequence
  synthetic
ggcgcgccagtcctcccactgcgtgttgtgttagttgtgttagtgtaggagaggagcgagcgaccaaaggaaccataactgatttaatgagccattcgcagtttcactgtaccggccgtgcgtactcagacatgcatggcttaatctttgagacaagcatatgctactggcaggatcaaccaggtagtcgactcggaccgatg

SEQ ID NO: 15948 - DNA, 203 bp, Artificial sequence
  synthetic
ggcgcgccagtcctcgatagtggggttgtgttagttgtgttagttaagccgcaggctccactcctggtggtgcccttccgtcaattcctttaagtttcagctttgcaaccatactccccccggaacccaaagactttggtttcccggaagctgcccggcgggtcatgggaataacgccgccgcatagtcgactcggaccgatg

SEQ ID NO: 15949 - DNA, 203 bp, Artificial sequence
  synthetic
ggcgcgccagtcctcgggcccactgttgtgttagttgtgttagttaagccgcaggctccactcctggtggtgcccttccgtcaattcctttaagtttcagctttgcaaccatactccccccggaacccaaagactttggtttcccggaagctgcccggcgggtcatgggaataacgccgccgcttagtcgactcggaccgatg

SEQ ID NO: 15950 - DNA, 203 bp, Artificial sequence
  synthetic
ggcgcgccagtcctaagcccacttgttgtgttagttgtgttagttcggaactacgacggtatctgatcgtcttcgaacctccgactttcgttcttgattaatgaaaacattcttggcaaatgctttcgctctggtccgtcttgcgccggtccaagaatttcacctctagcggcgcaatacgaattagtcgactcggaccgatg

SEQ ID NO: 15951 - DNA, 203 bp, Artificial sequence
  synthetic
ggcgcgccagtcctagtgggacttgttgtgttagttgtgttagttgggaactacgacggtatctgatcgtcttcgaacctccgactttcgttcttgattaatgaaaacattcttggcaaatgctttcgctctggtccgtcttgcgccggtccaagaatttcacctctagcggcgcaatacgagttagtcgactcggaccgatg

SEQ ID NO: 15952 - DNA, 203 bp, Artificial sequence
  synthetic
ggcgcgccagtcctacgcgctgacgttgtgttagttgtgttagttgtaagtttcagctttgcaaccatactccccccggaacccaaagactttggtttcccggaagctgcccggcgggtcatgggaataacgccgccgcatcgccggtcggcatcgtttatggtcggaactacgacggtatcgttagtcgactcggaccgatg

SEQ ID NO: 15953 - DNA, 203 bp, Artificial sequence
  synthetic
ggcgcgccagtccttcgccctagagttgtgttagttgtgttagttgtgccgcaggctccactcctggtggtgcccttccgtcaattcctttaagtttcagctttgcaaccatactccccccggaacccaaagactttggtttcccggaagctgcccggcgggtcatgggaataacgccgcgtgttagtcgactcggaccgatg

SEQ ID NO: 15954 - DNA, 203 bp, Artificial sequence
  synthetic
ggcgcgccagtcctaccggtgctagttgtgttagttgtgttagttgtgtgtttcagctttgcaaccatactccccccggaacccaaagactttggtttcccggaagctgcccggcgggtcatgggaataacgccgccgcatcgccggtcggcatcgtttatggtcggaactacgacggttgtgttagtcgactcggaccgatg

SEQ ID NO: 15955 - DNA, 203 bp, Artificial sequence
  synthetic
ggcgcgccagtccttcgtgcgtcagttgtgttagttgtgttagttgtgttagacgacggtatctgatcgtcttcgaacctccgactttcgttcttgattaatgaaaacattcttggcaaatgctttcgctctggtccgtcttgcgccggtccaagaatttcacctctagcggcgcaagttgtgttagtcgactcggaccgatg

SEQ ID NO: 15956 - DNA, 203 bp, Artificial sequence
  synthetic
ggcgcgccagtccttgcgtcacgagttgtgttagttgtgttagttgtgttagggagcgagcgaccaaaggaaccataactgatttaatgagccattcgcagtttcactgtaccggccgtgcgtactcagacatgcatggcttaatctttgagacaagcatatgctactggcaggatagttgtgttagtcgactcggaccgatg

SEQ ID NO: 15957 - DNA, 203 bp, Artificial sequence
  synthetic
ggcgcgccagtcctgcgtgacgctgttgtgttagttgtgttagttgtgttagtcagctttgcaaccatactccccccggaacccaaagactttggtttcccggaagctgcccggcgggtcatgggaataacgccgccgcatcgccggtcggcatcgtttatggtcggaactacgatagttgtgttagtcgactcggaccgatg

SEQ ID NO: 15958 - DNA, 203 bp, Artificial sequence
  synthetic
ggcgcgccagtcctcaagcgtcacgttgtgttagttgtgttagttgtgttagtcgacggtatctgatcgtcttcgaacctccgactttcgttcttgattaatgaaaacattcttggcaaatgctttcgctctggtccgtcttgcgccggtccaagaatttcacctctagcggcgctagttgtgttagtcgactcggaccgatg

SEQ ID NO: 15959 - DNA, 203 bp, Artificial sequence
  synthetic
ggcgcgccagtcctgtgacgcagagttgtgttagttgtgttagttgtgttagttgaattaaccagacaaatcgctccaccaactaagaacggccatgcaccaccacccacggaatcgagaaagagctatcaatctgtcaatcctgtccgtgtccgggccgggtgaggtttcccgttagttgtgttagtcgactcggaccgatg

SEQ ID NO: 15960 - DNA, 203 bp, Artificial sequence
  synthetic
ggcgcgccagtcctctctcgcgttgttgtgttagttgtgttagttgtgttagttggctttgcaaccatactccccccggaacccaaagactttggtttcccggaagctgcccggcgggtcatgggaataacgccgccgcatcgccggtcggcatcgtttatggtcggaactacgttagttgtgttagtcgactcggaccgatg

SEQ ID NO: 15961 - DNA, 203 bp, Artificial sequence
  synthetic
ggcgcgccagtccttctaacgcgggttgtgttagttgtgttagttgtgttagttgtcgagcgaccaaaggaaccataactgatttaatgagccattcgcagtttcactgtaccggccgtgcgtactcagacatgcatggcttaatctttgagacaagcatatgctactggcatgttagttgtgttagtcgactcggaccgatg

SEQ ID NO: 15962 - DNA, 203 bp, Artificial sequence
  synthetic
ggcgcgccagtccttaacgcgagtgttgtgttagttgtgttagttgtgttagttgtctttgcaaccatactccccccggaacccaaagactttggtttcccggaagctgcccggcgggtcatgggaataacgccgccgcatcgccggtcggcatcgtttatggtcggaactatgttagttgtgttagtcgactcggaccgatg

SEQ ID NO: 15963 - DNA, 203 bp, Artificial sequence
  synthetic
ggcgcgccagtcctcgcaacgcgggttgtgttagttgtgttagttgtgttagttgtgccactcctggtggtgcccttccgtcaattcctttaagtttcagctttgcaaccatactccccccggaacccaaagactttggtttcccggaagctgcccggcgggtcatgggaagtgttagttgtgttagtcgactcggaccgatg

SEQ ID NO: 15964 - DNA, 203 bp, Artificial sequence
  synthetic
ggcgcgccagtccttcaacgcgcagttgtgttagttgtgttagttgtgttagttgtgccgtgttgagtcaaattaagccgcaggctccactcctggtggtgcccttccgtcaattcctttaagtttcagctttgcaaccatactccccccggaacccaaagactttggtttgtgttagttgtgttagtcgactcggaccgatg

SEQ ID NO: 15965 - DNA, 203 bp, Artificial sequence
  synthetic
ggcgcgccagtccttggcgcaggagttgtgttagttgtgttagttgtgttagttgtgttaaccagacaaatcgctccaccaactaagaacggccatgcaccaccacccacggaatcgagaaagagctatcaatctgtcaatcctgtccgtgtccgggccgggtgaggtttcgtgttagttgtgttagtcgactcggaccgatg

SEQ ID NO: 15966 - DNA, 203 bp, Artificial sequence
  synthetic
ggcgcgccagtccttggcgcgttagttgtgttagttgtgttagttgtgttagttgtgttaaccagacaaatcgctccaccaactaagaacggccatgcaccaccacccacggaatcgagaaagagctatcaatctgtcaatcctgtccgtgtccgggccgggtgaggttttgtgttagttgtgttagtcgactcggaccgatg

SEQ ID NO: 15967 - DNA, 203 bp, Artificial sequence
  synthetic
ggcgcgccagtccttgtgccacgtgttgtgttagttgtgttagttgtgttagttgtgttaatctgatcgtcttcgaacctccgactttcgttcttgattaatgaaaacattcttggcaaatgctttcgctctggtccgtcttgcgccggtccaagaatttcacctctagttgtgttagttgtgttagtcgactcggaccgatg

SEQ ID NO: 15968 - DNA, 203 bp, Artificial sequence
  synthetic
ggcgcgccagtcctgtatgccaccgttgtgttagttgtgttagttgtgttagttgtgttacgaccaaaggaaccataactgatttaatgagccattcgcagtttcactgtaccggccgtgcgtactcagacatgcatggcttaatctttgagacaagcatatgctactgttgtgttagttgtgttagtcgactcggaccgatg

SEQ ID NO: 15969 - DNA, 203 bp, Artificial sequence
  synthetic
ggcgcgccagtcctgaagtggctcgttgtgttagttgtgttagttgtgttagttgtgttagcaaccatactccccccggaacccaaagactttggtttcccggaagctgcccggcgggtcatgggaataacgccgccgcatcgccggtcggcatcgtttatggtcggagttgtgttagttgtgttagtcgactcggaccgatg

SEQ ID NO: 15970 - DNA, 203 bp, Artificial sequence
  synthetic
ggcgcgccagtcctgccaccatttgttgtgttagttgtgttagttgtgttagttgtgttagtcagacaaatcgctccaccaactaagaacggccatgcaccaccacccacggaatcgagaaagagctatcaatctgtcaatcctgtccgtgtccgggccgggtgagtagttgtgttagttgtgttagtcgactcggaccgatg

SEQ ID NO: 15971 - DNA, 203 bp, Artificial sequence
  synthetic
ggcgcgccagtcctagccacgccggttgtgttagttgtgttagttgtgttagttgtgttagtcctggtggtgcccttccgtcaattcctttaagtttcagctttgcaaccatactccccccggaacccaaagactttggtttcccggaagctgcccggcgggtcattagttgtgttagttgtgttagtcgactcggaccgatg

SEQ ID NO: 15972 - DNA, 203 bp, Artificial sequence
  synthetic
ggcgcgccagtcctagtggcattcgttgtgttagttgtgttagttgtgttagttgtgttagttagacaaatcgctccaccaactaagaacggccatgcaccaccacccacggaatcgagaaagagctatcaatctgtcaatcctgtccgtgtccgggccgggtgattagttgtgttagttgtgttagtcgactcggaccgatg

SEQ ID NO: 15973 - DNA, 203 bp, Artificial sequence
  synthetic
ggcgcgccagtcctaagtggccctgttgtgttagttgtgttagttgtgttagttgtgttagttgcaaaggaaccataactgatttaatgagccattcgcagtttcactgtaccggccgtgcgtactcagacatgcatggcttaatctttgagacaagcatatgcgttagttgtgttagttgtgttagtcgactcggaccgatg

SEQ ID NO: 15974 - DNA, 203 bp, Artificial sequence
  synthetic
ggcgcgccagtcctggtggccctagttgtgttagttgtgttagttgtgttagttgtgttagttggacaaatcgctccaccaactaagaacggccatgcaccaccacccacggaatcgagaaagagctatcaatctgtcaatcctgtccgtgtccgggccgggtggttagttgtgttagttgtgttagtcgactcggaccgatg

SEQ ID NO: 15975 - DNA, 203 bp, Artificial sequence
  synthetic
ggcgcgccagtcctgggccaccttgttgtgttagttgtgttagttgtgttagttgtgttagttgtgatactccccccggaacccaaagactttggtttcccggaagctgcccggcgggtcatgggaataacgccgccgcatcgccggtcggcatcgtttatggtgttagttgtgttagttgtgttagtcgactcggaccgatg

SEQ ID NO: 15976 - DNA, 203 bp, Artificial sequence
  synthetic
ggcgcgccagtcctcctagccactgttgtgttagttgtgttagttgtgttagttgtgttagttgtggtggtgcccttccgtcaattcctttaagtttcagctttgcaaccatactccccccggaacccaaagactttggtttcccggaagctgcccggcgggttgttagttgtgttagttgtgttagtcgactcggaccgatg

SEQ ID NO: 15977 - DNA, 203 bp, Artificial sequence
  synthetic
ggcgcgccagtcctgtggcacttcgttgtgttagttgtgttagttgtgttagttgtgttagttgtgtaggaaccataactgatttaatgagccattcgcagtttcactgtaccggccgtgcgtactcagacatgcatggcttaatctttgagacaagcatatgtgttagttgtgttagttgtgttagtcgactcggaccgatg

SEQ ID NO: 15978 - DNA, 203 bp, Artificial sequence
  synthetic
ggcgcgccagtcctccagtggcccgttgtgttagttgtgttagttgtgttagttgtgttagttgtgtcgtcttcgaacctccgactttcgttcttgattaatgaaaacattcttggcaaatgctttcgctctggtccgtcttgcgccggtccaagaatttcagtgttagttgtgttagttgtgttagtcgactcggaccgatg

SEQ ID NO: 15979 - DNA, 203 bp, Artificial sequence
  synthetic
ggcgcgccagtcctatcgtggcaggttgtgttagttgtgttagttgtgttagttgtgttagttgtgttaatcgctccaccaactaagaacggccatgcaccaccacccacggaatcgagaaagagctatcaatctgtcaatcctgtccgtgtccgggccgttgtgttagttgtgttagttgtgttagtcgactcggaccgatg

SEQ ID NO: 15980 - DNA, 203 bp, Artificial sequence
  synthetic
ggcgcgccagtcctaccgagtggcgttgtgttagttgtgttagttgtgttagttgtgttagttgtgttaccggccgtagttgtgttaccggccgtagttgtgttaccggccgtagttgtgttaccggccgtagttgtgttaccggccgtagttgtgttaccggccgtagttgtgttaccggccgtagtcgactcggaccgatg

SEQ ID NO: 15981 - DNA, 203 bp, Artificial sequence
  synthetic
ggcgcgccagtcctccttagtggcgttgtgttagttgtgttagttgtgttagttgtgttagttgtgttagaaccataactgatttaatgagccattcgcagtttcactgtaccggccgtgcgtactcagacatgcatggcttaatctttgagacaagcagttgtgttagttgtgttagttgtgttagtcgactcggaccgatg

SEQ ID NO: 15982 - DNA, 203 bp, Artificial sequence
  synthetic
ggcgcgccagtcctgcagtgccacgttgtgttagttgtgttagttgtgttagttgtgttagttgtgttagtattaagccgcaggctccactcctggtggtgcccttccgtcaattcctttaagtttcagctttgcaaccatactccccccggaaccctagttgtgttagttgtgttagttgtgttagtcgactcggaccgatg

SEQ ID NO: 15983 - DNA, 203 bp, Artificial sequence
  synthetic
ggcgcgccagtcctcgaagtggccgttgtgttagttgtgttagttgtgttagttgtgttagttgtgttagtccccccggaacccaaagactttggtttcccggaagctgcccggcgggtcatgggaataacgccgccgcatcgccggtcggcatcgttagttgtgttagttgtgttagttgtgttagtcgactcggaccgatg

SEQ ID NO: 15984 - DNA, 203 bp, Artificial sequence
  synthetic
ggcgcgccagtccttacccgtggcgttgtgttagttgtgttagttgtgttagttgtgttagttgtgttagtgcccttccgtcaattcctttaagtttcagctttgcaaccatactccccccggaacccaaagactttggtttcccggaagctgcccggagttgtgttagttgtgttagttgtgttagtcgactcggaccgatg

SEQ ID NO: 15985 - DNA, 203 bp, Artificial sequence
  synthetic
ggcgcgccagtccttttacgtggcgttgtgttagttgtgttagttgtgttagttgtgttagttgtgttagtgcccttccgtcaattcctttaagtttcagctttgcaaccatactccccccggaacccaaagactttggtttcccggaagctgcccgtagttgtgttagttgtgttagttgtgttagtcgactcggaccgatg

SEQ ID NO: 15986 - DNA, 203 bp, Artificial sequence
  synthetic
ggcgcgccagtcctcatgggtggcgttgtgttagttgtgttagttgtgttagttgtgttagttgtgttagttccataactgatttaatgagccattcgcagtttcactgtaccggccgtgcgtactcagacatgcatggcttaatctttgagacaattagttgtgttagttgtgttagttgtgttagtcgactcggaccgatg

SEQ ID NO: 15987 - DNA, 203 bp, Artificial sequence
  synthetic
ggcgcgccagtccttagccaccctgttgtgttagttgtgttagttgtgttagttgtgttagttgtgttagttcccccggaacccaaagactttggtttcccggaagctgcccggcgggtcatgggaataacgccgccgcatcgccggtcggcatcgttagttgtgttagttgtgttagttgtgttagtcgactcggaccgatg

SEQ ID NO: 15988 - DNA, 203 bp, Artificial sequence
  synthetic
ggcgcgccagtccttcgaactacggttgtgttagttgtgttagttgtgttagttgtgttagttgtgttagttcccttccgtcaattcctttaagtttcagctttgcaaccatactccccccggaacccaaagactttggtttcccggaagctgcccttagttgtgttagttgtgttagttgtgttagtcgactcggaccgatg

SEQ ID NO: 15989 - DNA, 203 bp, Artificial sequence
  synthetic
ggcgcgccagtccttcgaacgtttgttgtgttagttgtgttagttgtgttagttgtgttagttgtgttagttgcgaacctccgactttcgttcttgattaatgaaaacattcttggcaaatgctttcgctctggtccgtcttgcgccggtccaaggttagttgtgttagttgtgttagttgtgttagtcgactcggaccgatg

SEQ ID NO: 15990 - DNA, 203 bp, Artificial sequence
  synthetic
ggcgcgccagtccttcgaacctgagttgtgttagttgtgttagttgtgttagttgtgttagttgtgttagttgtaagccgcaggctccactcctggtggtgcccttccgtcaattcctttaagtttcagctttgcaaccatactccccccggaacgttagttgtgttagttgtgttagttgtgttagtcgactcggaccgatg

SEQ ID NO: 15991 - DNA, 203 bp, Artificial sequence
  synthetic
ggcgcgccagtcctctgttcgactgttgtgttagttgtgttagttgtgttagttgtgttagttgtgttagttgtgaacctccgactttcgttcttgattaatgaaaacattcttggcaaatgctttcgctctggtccgtcttgcgccggtccagtgttagttgtgttagttgtgttagttgtgttagtcgactcggaccgatg

SEQ ID NO: 15992 - DNA, 203 bp, Artificial sequence
  synthetic
ggcgcgccagtcctgtccgtcccggttgtgttagttgtgttagttgtgttagttgtgttagttgtgttagttgtgtaactgatttaatgagccattcgcagtttcactgtaccggccgtgcgtactcagacatgcatggcttaatctttgagtgtgttagttgtgttagttgtgttagttgtgttagtcgactcggaccgatg

SEQ ID NO: 15993 - DNA, 203 bp, Artificial sequence
  synthetic
ggcgcgccagtccttgtccggtcggttgtgttagttgtgttagttgtgttagttgtgttagttgtgttagttgtgtacctccgactttcgttcttgattaatgaaaacattcttggcaaatgctttcgctctggtccgtcttgcgccggtcctgtgttagttgtgttagttgtgttagttgtgttagtcgactcggaccgatg

SEQ ID NO: 15994 - DNA, 203 bp, Artificial sequence
  synthetic
ggcgcgccagtcctagctgtccgagttgtgttagttgtgttagttgtgttagttgtgttagttgtgttagttgtgtcggaacccaaagactttggtttcccggaagctgcccggcgggtcatgggaataacgccgccgcatcgccggtcggctgtgttagttgtgttagttgtgttagttgtgttagtcgactcggaccgatg

SEQ ID NO: 15995 - DNA, 203 bp, Artificial sequence
  synthetic
ggcgcgccagtcctaagtccggttgttgtgttagttgtgttagttgtgttagttgtgttagttgtgttagttgtgtgccgcaggctccactcctggtggtgcccttccgtcaattcctttaagtttcagctttgcaaccatactccccccggtgtgttagttgtgttagttgtgttagttgtgttagtcgactcggaccgatg

SEQ ID NO: 15996 - DNA, 203 bp, Artificial sequence
  synthetic
ggcgcgccagtcctcgtccgctaggttgtgttagttgtgttagttgtgttagttgtgttagttgtgttagttgtgttaccaactaagaacggccatgcaccaccacccacggaatcgagaaagagctatcaatctgtcaatcctgtccgtgttgtgttagttgtgttagttgtgttagttgtgttagtcgactcggaccgatg

SEQ ID NO: 15997 - DNA, 203 bp, Artificial sequence
  synthetic
ggcgcgccagtcctggtccgtggcgttgtgttagttgtgttagttgtgttagttgtgttagttgtgttagttgtgttacgcaggctccactcctggtggtgcccttccgtcaattcctttaagtttcagctttgcaaccatactccccccgttgtgttagttgtgttagttgtgttagttgtgttagtcgactcggaccgatg

SEQ ID NO: 15998 - DNA, 203 bp, Artificial sequence
  synthetic
ggcgcgccagtcctgtggtccgccgttgtgttagttgtgttagttgtgttagttgtgttagttgtgttagttgtgttactccgactttcgttcttgattaatgaaaacattcttggcaaatgctttcgctctggtccgtcttgcgccggtgttgtgttagttgtgttagttgtgttagttgtgttagtcgactcggaccgatg

SEQ ID NO: 15999 - DNA, 203 bp, Artificial sequence
  synthetic
ggcgcgccagtcctacagcgtccggttgtgttagttgtgttagttgtgttagttgtgttagttgtgttagttgtgttactgatttaatgagccattcgcagtttcactgtaccggccgtgcgtactcagacatgcatggcttaatctttggttgtgttagttgtgttagttgtgttagttgtgttagtcgactcggaccgatg

SEQ ID NO: 16000 - DNA, 203 bp, Artificial sequence
  synthetic
ggcgcgccagtcctagtccgaaaggttgtgttagttgtgttagttgtgttagttgtgttagttgtgttagttgtgttagaacccaaagactttggtttcccggaagctgcccggcgggtcatgggaataacgccgccgcatcgccggtcagttgtgttagttgtgttagttgtgttagttgtgttagtcgactcggaccgatg

SEQ ID NO: 16001 - DNA, 203 bp, Artificial sequence
  synthetic
ggcgcgccagtcctgcgtccgttggttgtgttagttgtgttagttgtgttagttgtgttagttgtgttagttgtgttaggcaggctccactcctggtggtgcccttccgtcaattcctttaagtttcagctttgcaaccatactcccccagttgtgttagttgtgttagttgtgttagttgtgttagtcgactcggaccgatg

SEQ ID NO: 16002 - DNA, 203 bp, Artificial sequence
  synthetic
ggcgcgccagtccttgtccgagctgttgtgttagttgtgttagttgtgttagttgtgttagttgtgttagttgtgttaggtcaattcctttaagtttcagctttgcaaccatactccccccggaacccaaagactttggtttcccggaaagttgtgttagttgtgttagttgtgttagttgtgttagtcgactcggaccgatg

SEQ ID NO: 16003 - DNA, 203 bp, Artificial sequence
  synthetic
ggcgcgccagtcctttgtccgatagttgtgttagttgtgttagttgtgttagttgtgttagttgtgttagttgtgttagtaactaagaacggccatgcaccaccacccacggaatcgagaaagagctatcaatctgtcaatcctgtcctagttgtgttagttgtgttagttgtgttagttgtgttagtcgactcggaccgatg

SEQ ID NO: 16004 - DNA, 203 bp, Artificial sequence
  synthetic
ggcgcgccagtcctgtccgggacggttgtgttagttgtgttagttgtgttagttgtgttagttgtgttagttgtgttagtacccaaagactttggtttcccggaagctgcccggcgggtcatgggaataacgccgccgcatcgccggttagttgtgttagttgtgttagttgtgttagttgtgttagtcgactcggaccgatg

SEQ ID NO: 16005 - DNA, 203 bp, Artificial sequence
  synthetic
ggcgcgccagtcctacagtccgctgttgtgttagttgtgttagttgtgttagttgtgttagttgtgttagttgtgttagtcaggctccactcctggtggtgcccttccgtcaattcctttaagtttcagctttgcaaccatactcccctagttgtgttagttgtgttagttgtgttagttgtgttagtcgactcggaccgatg

SEQ ID NO: 16006 - DNA, 203 bp, Artificial sequence
  synthetic
ggcgcgccagtcctccgtccgggagttgtgttagttgtgttagttgtgttagttgtgttagttgtgttagttgtgttagtccgactttcgttcttgattaatgaaaacattcttggcaaatgctttcgctctggtccgtcttgcgccggagttgtgttagttgtgttagttgtgttagttgtgttagtcgactcggaccgatg

SEQ ID NO: 16007 - DNA, 203 bp, Artificial sequence
  synthetic
ggcgcgccagtcctcaattgtccggttgtgttagttgtgttagttgtgttagttgtgttagttgtgttagttgtgttagtgatttaatgagccattcgcagtttcactgtaccggccgtgcgtactcagacatgcatggcttaatctttagttgtgttagttgtgttagttgtgttagttgtgttagtcgactcggaccgatg

SEQ ID NO: 16008 - DNA, 203 bp, Artificial sequence
  synthetic
ggcgcgccagtcctgcagtccgtggttgtgttagttgtgttagttgtgttagttgtgttagttgtgttagttgtgttagttactaagaacggccatgcaccaccacccacggaatcgagaaagagctatcaatctgtcaatcctgtcttagttgtgttagttgtgttagttgtgttagttgtgttagtcgactcggaccgatg

SEQ ID NO: 16009 - DNA, 203 bp, Artificial sequence
  synthetic
ggcgcgccagtcctgagagtccgtgttgtgttagttgtgttagttgtgttagttgtgttagttgtgttagttgtgttagttaggctccactcctggtggtgcccttccgtcaattcctttaagtttcagctttgcaaccatactcccttagttgtgttagttgtgttagttgtgttagttgtgttagtcgactcggaccgatg

SEQ ID NO: 16010 - DNA, 203 bp, Artificial sequence
  synthetic
ggcgcgccagtcctgacgtccgcagttgtgttagttgtgttagttgtgttagttgtgttagttgtgttagttgtgttagttcaattcctttaagtttcagctttgcaaccatactccccccggaacccaaagactttggtttcccggttagttgtgttagttgtgttagttgtgttagttgtgttagtcgactcggaccgatg

SEQ ID NO: 16011 - DNA, 203 bp, Artificial sequence
  synthetic
ggcgcgccagtcctgtgttgtccggttgtgttagttgtgttagttgtgttagttgtgttagttgtgttagttgtgttagttgggctccactcctggtggtgcccttccgtcaattcctttaagtttcagctttgcaaccatactccgttagttgtgttagttgtgttagttgtgttagttgtgttagtcgactcggaccgatg

SEQ ID NO: 16012 - DNA, 203 bp, Artificial sequence
  synthetic
ggcgcgccagtcctgtccgaggctgttgtgttagttgtgttagttgtgttagttgtgttagttgtgttagttgtgttagttgtattcctttaagtttcagctttgcaaccatactccccccggaacccaaagactttggtttccctgttagttgtgttagttgtgttagttgtgttagttgtgttagtcgactcggaccgatg

SEQ ID NO: 16013 - DNA, 203 bp, Artificial sequence
  synthetic
ggcgcgccagtccttacggacccggttgtgttagttgtgttagttgtgttagttgtgttagttgtgttagttgtgttagttgtgaagaacggccatgcaccaccacccacggaatcgagaaagagctatcaatctgtcaatcctgtgttagttgtgttagttgtgttagttgtgttagttgtgttagtcgactcggaccgatg

SEQ ID NO: 16014 - DNA, 203 bp, Artificial sequence
  synthetic
ggcgcgccagtcctacggacaggggttgtgttagttgtgttagttgtgttagttgtgttagttgtgttagttgtgttagttgtgctccactcctggtggtgcccttccgtcaattcctttaagtttcagctttgcaaccatactctgttagttgtgttagttgtgttagttgtgttagttgtgttagtcgactcggaccgatg

SEQ ID NO: 16015 - DNA, 203 bp, Artificial sequence
  synthetic
ggcgcgccagtcctagctacggacgttgtgttagttgtgttagttgtgttagttgtgttagttgtgttagttgtgttagttgtgctccactcctggtggtgcccttccgtcaattcctttaagtttcagctttgcaaccatactgtgttagttgtgttagttgtgttagttgtgttagttgtgttagtcgactcggaccgatg

SEQ ID NO: 16016 - DNA, 203 bp, Artificial sequence
  synthetic
ggcgcgccagtcctcggactaaccgttgtgttagttgtgttagttgtgttagttgtgttagttgtgttagttgtgttagttgtgctttcgttcttgattaatgaaaacattcttggcaaatgctttcgctctggtccgtcttgcgtgttagttgtgttagttgtgttagttgtgttagttgtgttagtcgactcggaccgatg

SEQ ID NO: 16017 - DNA, 203 bp, Artificial sequence
  synthetic
ggcgcgccagtcctacggaccacggttgtgttagttgtgttagttgtgttagttgtgttagttgtgttagttgtgttagttgtgtaagactttggtttcccggaagctgcccggcgggtcatgggaataacgccgccgcatcgtgtgttagttgtgttagttgtgttagttgtgttagttgtgttagtcgactcggaccgatg

SEQ ID NO: 16018 - DNA, 203 bp, Artificial sequence
  synthetic
ggcgcgccagtccttgcggacgctgttgtgttagttgtgttagttgtgttagttgtgttagttgtgttagttgtgttagttgtgtaatgagccattcgcagtttcactgtaccggccgtgcgtactcagacatgcatggcttatgtgttagttgtgttagttgtgttagttgtgttagttgtgttagtcgactcggaccgatg

SEQ ID NO: 16019 - DNA, 203 bp, Artificial sequence
  synthetic
ggcgcgccagtccttgttcggacagttgtgttagttgtgttagttgtgttagttgtgttagttgtgttagttgtgttagttgtgtagaacggccatgcaccaccacccacggaatcgagaaagagctatcaatctgtcaatcctgtgttagttgtgttagttgtgttagttgtgttagttgtgttagtcgactcggaccgatg

SEQ ID NO: 16020 - DNA, 203 bp, Artificial sequence
  synthetic
ggcgcgccagtccttagcggacgtgttgtgttagttgtgttagttgtgttagttgtgttagttgtgttagttgtgttagttgtgttaaacggccatgcaccaccacccacggaatcgagaaagagctatcaatctgtcaatgttgtgttagttgtgttagttgtgttagttgtgttagttgtgttagtcgactcggaccgatg

SEQ ID NO: 16021 - DNA, 203 bp, Artificial sequence
  synthetic
ggcgcgccagtcctaaccggaccagttgtgttagttgtgttagttgtgttagttgtgttagttgtgttagttgtgttagttgtgttacactcctggtggtgcccttccgtcaattcctttaagtttcagctttgcaaccatgttgtgttagttgtgttagttgtgttagttgtgttagttgtgttagtcgactcggaccgatg

SEQ ID NO: 16022 - DNA, 203 bp, Artificial sequence
  synthetic
ggcgcgccagtcctcggacgagttgttgtgttagttgtgttagttgtgttagttgtgttagttgtgttagttgtgttagttgtgttacccgccggagttgtgttacccgccggagttgtgttacccgccggagttgtgttacccgccggagttgtgttacccgccggagttgtgttagttgtgttagtcgactcggaccgatg

SEQ ID NO: 16023 - DNA, 203 bp, Artificial sequence
  synthetic
ggcgcgccagtcctctatcggacggttgtgttagttgtgttagttgtgttagttgtgttagttgtgttagttgtgttagttgtgttagtcggccatgcaccaccacccacggaatcgagaaagagctatcaatctgtcatagttgtgttagttgtgttagttgtgttagttgtgttagttgtgttagtcgactcggaccgatg

SEQ ID NO: 16024 - DNA, 203 bp, Artificial sequence
  synthetic
ggcgcgccagtcctacggacgttagttgtgttagttgtgttagttgtgttagttgtgttagttgtgttagttgtgttagttgtgttagttgaagtttcagctttgcaaccatactccccccggaacccaaagactttgttagttgtgttagttgtgttagttgtgttagttgtgttagttgtgttagtcgactcggaccgatg

SEQ ID NO: 16025 - DNA, 203 bp, Artificial sequence
  synthetic
ggcgcgccagtcctcaccggacttgttgtgttagttgtgttagttgtgttagttgtgttagttgtgttagttgtgttagttgtgttagttgcctggtggtgcccttccgtcaattcctttaagtttcagctttgcaagttagttgtgttagttgtgttagttgtgttagttgtgttagttgtgttagtcgactcggaccgatg

SEQ ID NO: 16026 - DNA, 203 bp, Artificial sequence
  synthetic
ggcgcgccagtcctgcggcggactgttgtgttagttgtgttagttgtgttagttgtgttagttgtgttagttgtgttagttgtgttagttggccatgcaccaccacccacggaatcgagaaagagctatcaatctgtcttagttgtgttagttgtgttagttgtgttagttgtgttagttgtgttagtcgactcggaccgatg

SEQ ID NO: 16027 - DNA, 203 bp, Artificial sequence
  synthetic
ggcgcgccagtcctcgtcacggacgttgtgttagttgtgttagttgtgttagttgtgttagttgtgttagttgtgttagttgtgttagttgtagtttcagctttgcaaccatactccccccggaacccaaagactttgttagttgtgttagttgtgttagttgtgttagttgtgttagttgtgttagtcgactcggaccgatg

SEQ ID NO: 16028 - DNA, 203 bp, Artificial sequence
  synthetic
ggcgcgccagtcctcaacggacgagttgtgttagttgtgttagttgtgttagttgtgttagttgtgttagttgtgttagttgtgttagttgtcattcgcagtttcactgtaccggccgtgcgtactcagacatgcatgttagttgtgttagttgtgttagttgtgttagttgtgttagttgtgttagtcgactcggaccgatg

SEQ ID NO: 16029 - DNA, 203 bp, Artificial sequence
  synthetic
ggcgcgccagtcctcaaagcggacgttgtgttagttgtgttagttgtgttagttgtgttagttgtgttagttgtgttagttgtgttagttgtctggtggtgcccttccgtcaattcctttaagtttcagctttgcatgttagttgtgttagttgtgttagttgtgttagttgtgttagttgtgttagtcgactcggaccgatg

SEQ ID NO: 16030 - DNA, 203 bp, Artificial sequence
  synthetic
ggcgcgccagtcctaatgcggacggttgtgttagttgtgttagttgtgttagttgtgttagttgtgttagttgtgttagttgtgttagttgtgcatgcaccaccacccacggaatcgagaaagagctatcaatctgtgttagttgtgttagttgtgttagttgtgttagttgtgttagttgtgttagtcgactcggaccgatg

SEQ ID NO: 16031 - DNA, 203 bp, Artificial sequence
  synthetic
ggcgcgccagtcctagtacgcacagttgtgttagttgtgttagttgtgttagttgtgttagttgtgttagttgtgttagttgtgttagttgtgtatgcaccaccacccacggaatcgagaaagagctatcaatctgtgttagttgtgttagttgtgttagttgtgttagttgtgttagttgtgttagtcgactcggaccgatg

SEQ ID NO: 16032 - DNA, 203 bp, Artificial sequence
  synthetic
ggcgcgccagtcctacgcacagaagttgtgttagttgtgttagttgtgttagttgtgttagttgtgttagttgtgttagttgtgttagttgtgtggtggtgcccttccgtcaattcctttaagtttcagctttgcgtgttagttgtgttagttgtgttagttgtgttagttgtgttagttgtgttagtcgactcggaccgatg

SEQ ID NO: 16033 - DNA, 203 bp, Artificial sequence
  synthetic
ggcgcgccagtccttaattagtccgttgtgttagttgtgttagttgtgttagttgtgttagttgtgttagttgtgttagttgtgttagttgtgttaggcagtttcactgtaccggccgtgcgtactcagacagttgtgttagttgtgttagttgtgttagttgtgttagttgtgttagttgtgttagtcgactcggaccgatg

SEQ ID NO: 16034 - DNA, 203 bp, Artificial sequence
  synthetic
ggcgcgccagtcctgttaatttctgttgtgttagttgtgttagttgtgttagttgtgttagttgtgttagttgtgttagttgtgttagttgtgttagggtgcccttccgtcaattcctttaagtttcagctagttgtgttagttgtgttagttgtgttagttgtgttagttgtgttagttgtgttagtcgactcggaccgatg

SEQ ID NO: 16035 - DNA, 203 bp, Artificial sequence
  synthetic
ggcgcgccagtcctttcgtaattagttgtgttagttgtgttagttgtgttagttgtgttagttgtgttagttgtgttagttgtgttagttgtgttagttccggaagctgcccggcgggtcatgggaatattagttgtgttagttgtgttagttgtgttagttgtgttagttgtgttagttgtgttagtcgactcggaccgatg

SEQ ID NO: 16036 - DNA, 203 bp, Artificial sequence
  synthetic
ggcgcgccagtcctgcgttaatttgttgtgttagttgtgttagttgtgttagttgtgttagttgtgttagttgtgttagttgtgttagttgtgttagttgctttgcaaccatactccccccggaacccgttagttgtgttagttgtgttagttgtgttagttgtgttagttgtgttagttgtgttagtcgactcggaccgatg

SEQ ID NO: 16037 - DNA, 203 bp, Artificial sequence
  synthetic
ggcgcgccagtcctctctaattttgttgtgttagttgtgttagttgtgttagttgtgttagttgtgttagttgtgttagttgtgttagttgtgttagttgtgccacccacggaatcgagaaagagcgtgttagttgtgttagttgtgttagttgtgttagttgtgttagttgtgttagttgtgttagtcgactcggaccgatg

SEQ ID NO: 16038 - DNA, 203 bp, Artificial sequence
  synthetic
ggcgcgccagtccttaatttcacggttgtgttagttgtgttagttgtgttagttgtgttagttgtgttagttgtgttagttgtgttagttgtgttagttgtgccttccgtcaattcctttaagtttgtgttagttgtgttagttgtgttagttgtgttagttgtgttagttgtgttagttgtgttagtcgactcggaccgatg

SEQ ID NO: 16039 - DNA, 203 bp, Artificial sequence
  synthetic
ggcgcgccagtcctctcttagatcgttgtgttagttgtgttagttgtgttagttgtgttagttgtgttagttgtgttagttgtgttagttgtgttagttgtgtaaaacattcttggcaaatgctttgtgttagttgtgttagttgtgttagttgtgttagttgtgttagttgtgttagttgtgttagtcgactcggaccgatg

SEQ ID NO: 16040 - DNA, 203 bp, Artificial sequence
  synthetic
ggcgcgccagtcctagggcgttaggttgtgttagttgtgttagttgtgttagttgtgttagttgtgttagttgtgttagttgtgttagttgtgttagttgtgttacaaccatactccccccgggttgtgttagttgtgttagttgtgttagttgtgttagttgtgttagttgtgttagttgtgttagtcgactcggaccgatg

SEQ ID NO: 16041 - DNA, 203 bp, Artificial sequence
  synthetic
ggcgcgccagtcctagaggcgttagttgtgttagttgtgttagttgtgttagttgtgttagttgtgttagttgtgttagttgtgttagttgtgttagttgtgttacccacggaatcgagaaaggttgtgttagttgtgttagttgtgttagttgtgttagttgtgttagttgtgttagttgtgttagtcgactcggaccgatg

SEQ ID NO: 16042 - DNA, 203 bp, Artificial sequence
  synthetic
ggcgcgccagtccttcaggctccagttgtgttagttgtgttagttgtgttagttgtgttagttgtgttagttgtgttagttgtgttagttgtgttagttgtgttaccggccgtagttgtgttaccggccgtagttgtgttaccggccgtagttgtgttaccggccgtagttgtgttagttgtgttagtcgactcggaccgatg

SEQ ID NO: 16043 - DNA, 203 bp, Artificial sequence
  synthetic
ggcgcgccagtcctcgctccactcgttgtgttagttgtgttagttgtgttagttgtgttagttgtgttagttgtgttagttgtgttagttgtgttagttgtgttagccgtcaattcctttaaagttgtgttagttgtgttagttgtgttagttgtgttagttgtgttagttgtgttagttgtgttagtcgactcggaccgatg

SEQ ID NO: 16044 - DNA, 203 bp, Artificial sequence
  synthetic
ggcgcgccagtcctctccagcgctgttgtgttagttgtgttagttgtgttagttgtgttagttgtgttagttgtgttagttgtgttagttgtgttagttgtgttagctgcccggcgggtcatagttgtgttagttgtgttagttgtgttagttgtgttagttgtgttagttgtgttagttgtgttagtcgactcggaccgatg

SEQ ID NO: 16045 - DNA, 203 bp, Artificial sequence
  synthetic
ggcgcgccagtcctgaatgctccagttgtgttagttgtgttagttgtgttagttgtgttagttgtgttagttgtgttagttgtgttagttgtgttagttgtgttagctgtaccggccgtgcgagttgtgttagttgtgttagttgtgttagttgtgttagttgtgttagttgtgttagttgtgttagtcgactcggaccgatg

SEQ ID NO: 16046 - DNA, 203 bp, Artificial sequence
  synthetic
ggcgcgccagtcctgtctccacatgttgtgttagttgtgttagttgtgttagttgtgttagttgtgttagttgtgttagttgtgttagttgtgttagttgtgttagttgcccggcgggtgttagttgtgttagttgtgttagttgtgttagttgtgttagttgtgttagttgtgttagttgtgttagtcgactcggaccgatg

SEQ ID NO: 16047 - DNA, 203 bp, Artificial sequence
  synthetic
ggcgcgccagtcctgctccaggtcgttgtgttagttgtgttagttgtgttagttgtgttagttgtgttagttgtgttagttgtgttagttgtgttagttgtgttagttgtatactccctgttagttgtgttagttgtgttagttgtgttagttgtgttagttgtgttagttgtgttagttgtgttagtcgactcggaccgatg

SEQ ID NO: 16048 - DNA, 203 bp, Artificial sequence
  synthetic
ggcgcgccagtccttctccagctggttgtgttagttgtgttagttgtgttagttgtgttagttgtgttagttgtgttagttgtgttagttgtgttagttgtgttagttgtcaattccttgttagttgtgttagttgtgttagttgtgttagttgtgttagttgtgttagttgtgttagttgtgttagtcgactcggaccgatg

SEQ ID NO: 16049 - DNA, 203 bp, Artificial sequence
  synthetic
ggcgcgccagtcctgctcctgtcggttgtgttagttgtgttagttgtgttagttgtgttagttgtgttagttgtgttagttgtgttagttgtgttagttgtgttagttgtccggcgggtgttagttgtgttagttgtgttagttgtgttagttgtgttagttgtgttagttgtgttagttgtgttagtcgactcggaccgatg

SEQ ID NO: 16050 - DNA, 203 bp, Artificial sequence
  synthetic
ggcgcgccagtcctgcagctccctgttgtgttagttgtgttagttgtgttagttgtgttagttgtgttagttgtgttagttgtgttagttgtgttagttgtgttagttgtgcggcgggtgttagttgtgttagttgtgttagttgtgttagttgtgttagttgtgttagttgtgttagttgtgttagtcgactcggaccgatg

SEQ ID NO: 16051 - DNA, 203 bp, Artificial sequence
  synthetic
ggcgcgccagtcctatctccaccggttgtgttagttgtgttagttgtgttagttgtgttagttgtgttagttgtgttagttgtgttagttgtgttagttgtgttagttgtgcttggcgtgttagttgtgttagttgtgttagttgtgttagttgtgttagttgtgttagttgtgttagttgtgttagtcgactcggaccgatg

SEQ ID NO: 16052 - DNA, 203 bp, Artificial sequence
  synthetic
ggcgcgccagtcctagctcctcacgttgtgttagttgtgttagttgtgttagttgtgttagttgtgttagttgtgttagttgtgttagttgtgttagttgtgttagttgtggaatcggtgttagttgtgttagttgtgttagttgtgttagttgtgttagttgtgttagttgtgttagttgtgttagtcgactcggaccgatg

SEQ ID NO: 16053 - DNA, 203 bp, Artificial sequence
  synthetic
ggcgcgccagtcctctccataccagttgtgttagttgtgttagttgtgttagttgtgttagttgtgttagttgtgttagttgtgttagttgtgttagttgtgttagttgtgtactctgtgttagttgtgttagttgtgttagttgtgttagttgtgttagttgtgttagttgtgttagttgtgttagtcgactcggaccgatg

SEQ ID NO: 16054 - DNA, 203 bp, Artificial sequence
  synthetic
ggcgcgccagtcctctcctaacgggttgtgttagttgtgttagttgtgttagttgtgttagttgtgttagttgtgttagttgtgttagttgtgttagttgtgttagttgtgtattctgtgttagttgtgttagttgtgttagttgtgttagttgtgttagttgtgttagttgtgttagttgtgttagtcgactcggaccgatg

SEQ ID NO: 16055 - DNA, 203 bp, Artificial sequence
  synthetic
ggcgcgccagtcctaggtcactccgttgtgttagttgtgttagttgtgttagttgtgttagttgtgttagttgtgttagttgtgttagttgtgttagttgtgttagttgtgtcggctgtgttagttgtgttagttgtgttagttgtgttagttgtgttagttgtgttagttgtgttagttgtgttagtcgactcggaccgatg

SEQ ID NO: 16056 - DNA, 203 bp, Artificial sequence
  synthetic
ggcgcgccagtcctagtttgctccgttgtgttagttgtgttagttgtgttagttgtgttagttgtgttagttgtgttagttgtgttagttgtgttagttgtgttagttgtgttagttgtgttaccggccgtagttgtgttaccggccgtagttgtgttaccggccgtagttgtgttaccggccgtagtcgactcggaccgatg

SEQ ID NO: 16057 - DNA, 203 bp, Artificial sequence
  synthetic
ggcgcgccagtccttgctccaggagttgtgttagttgtgttagttgtgttagttgtgttagttgtgttagttgtgttagttgtgttagttgtgttagttgtgttagttgtgttagttgtgttacggccggtagttgtgttacggccggtagttgtgttacggccggtagttgtgttagttgtgttagtcgactcggaccgatg

SEQ ID NO: 16058 - DNA, 203 bp, Artificial sequence
  synthetic
ggcgcgccagtcctagtgctccaggttgtgttagttgtgttagttgtgttagttgtgttagttgtgttagttgtgttagttgtgttagttgtgttagttgtgttagttgtgttagttgtgttagttgtgttagttgtgttacccgccggagttgtgttacccgccggagttgtgttagttgtgttagtcgactcggaccgatg

SEQ ID NO: 16059 - DNA, 203 bp, Artificial sequence
  synthetic
ggcgcgccagtcctgatcgctcctgttgtgttagttgtgttagttgtgttagttgtgttagttgtgttagttgtgttagttgtgttagttgtgttagttgtgttagttgtgttagttgtgttagttgtgttagttgtgttaccggccgtagttgtgttaccggccgtagttgtgttaccggccgtagtcgactcggaccgatg

SEQ ID NO: 16060 - DNA, 203 bp, Artificial sequence
  synthetic
ggcgcgccagtcctgggctccattgttgtgttagttgtgttagttgtgttagttgtgttagttgtgttagttgtgttagttgtgttagttgtgttagttgtgttagttgtgttagttgtgttagttgtgttagttgtgttacggccggtagttgtgttacggccggtagttgtgttagttgtgttagtcgactcggaccgatg

SEQ ID NO: 16061 - DNA, 203 bp, Artificial sequence
  synthetic
ggcgcgccagtccttctccacgaggttgtgttagttgtgttagttgtgttagttgtgttagttgtgttagttgtgttagttgtgttagttgtgttagttgtgttagttgtgttagttgtgttagttgtgttagttgtgttagttgtgttagttgtgttaccggccgtagttgtgttaccggccgtagtcgactcggaccgatg

SEQ ID NO: 16062 - DNA, 203 bp, Artificial sequence
  synthetic
ggcgcgccagtccttctccatacggttgtgttagttgtgttagttgtgttagttgtgttagttgtgttagttgtgttagttgtgttagttgtgttagttgtgttagttgtgttagttgtgttagttgtgttagttgtgttagttgtgttagttgtgttccggcgggtagttgtgttccggcgggtagtcgactcggaccgatg

SEQ ID NO: 16063 - DNA, 203 bp, Artificial sequence
  synthetic
ggcgcgccagtcctgggtggctccgttgtgttagttgtgttagttgtgttagttgtgttagttgtgttagttgtgttagttgtgttagttgtgttagttgtgttagttgtgttagttgtgttagttgtgttagttgtgttagttgtgttagttgtgtttactcccttagttgtgttagttgtgttagtcgactcggaccgatg

SEQ ID NO: 16064 - DNA, 203 bp, Artificial sequence
  synthetic
ggcgcgccagtcctgctcctagaagttgtgttagttgtgttagttgtgttagttgtgttagttgtgttagttgtgttagttgtgttagttgtgttagttgtgttagttgtgttagttgtgttagttgtgttagttgtgttagttgtgttagttgtgtttactcccttagttgtgtttactcccttagtcgactcggaccgatg

SEQ ID NO: 16065 - DNA, 203 bp, Artificial sequence
  synthetic
ggcgcgccagtcctaggttctcccgttgtgttagttgtgttagttgtgttagttgtgttagttgtgttagttgtgttagttgtgttagttgtgttagttgtgttagttgtgttagttgtgttagttgtgttagttgtgttagttgtgttagttgtgttttcttggcaaattgtgttagttgtgttagtcgactcggaccgatg

SEQ ID NO: 16066 - DNA, 203 bp, Artificial sequence
  synthetic
ggcgcgccagtcctcaagctcctcgttgtgttagttgtgttagttgtgttagttgtgttagttgtgttagttgtgttagttgtgttagttgtgttagttgtgttagttgtgttagttgtgttagttgtgttagttgtgttcacggaatcgagaatgttcacggaatcgagaatgttagttgtgttagtcgactcggaccgatg

SEQ ID NO: 16067 - DNA, 203 bp, Artificial sequence
  synthetic
ggcgcgccagtcctctccaagtatgttgtgttagttgtgttagttgtgttagttgtgttagttgtgttagttgtgttagttgtgttagttgtgttagttgtgttagttgtgttagttgtgttagttgtgttagttgtgttccggcgggtagttgtgttccggcgggtagttgtgttccggcgggtagtcgactcggaccgatg

SEQ ID NO: 16068 - DNA, 203 bp, Artificial sequence
  synthetic
ggcgcgccagtcctatctccatgcgttgtgttagttgtgttagttgtgttagttgtgttagttgtgttagttgtgttagttgtgttagttgtgttagttgtgttagttgtgttagttgtgttagttgtgttagttgtgtttaaaggaattgacgtgtttaaaggaattgacgtgttagttgtgttagtcgactcggaccgatg

SEQ ID NO: 16069 - DNA, 203 bp, Artificial sequence
  synthetic
ggcgcgccagtccttacgcactccgttgtgttagttgtgttagttgtgttagttgtgttagttgtgttagttgtgttagttgtgttagttgtgttagttgtgttagttgtgttagttgtgttagttgtgttagttgtgtttactcccttagttgtgtttactcccttagttgtgttagttgtgttagtcgactcggaccgatg

SEQ ID NO: 16070 - DNA, 203 bp, Artificial sequence
  synthetic
ggcgcgccagtcctatctctccaagttgtgttagttgtgttagttgtgttagttgtgttagttgtgttagttgtgttagttgtgttagttgtgttagttgtgttagttgtgttagttgtgttagttgtgttagttgtgtttactcccttagttgtgtttactcccttagttgtgtttactcccttagtcgactcggaccgatg

SEQ ID NO: 16071 - DNA, 203 bp, Artificial sequence
  synthetic
ggcgcgccagtcctcctgctccacgttgtgttagttgtgttagttgtgttagttgtgttagttgtgttagttgtgttagttgtgttagttgtgttagttgtgttagttgtgttagttgtgttagttgtgttagttgtgttttctcgattccgtgtgttttctcgattccgtgtgttagttgtgttagtcgactcggaccgatg

SEQ ID NO: 16072 - DNA, 203 bp, Artificial sequence
  synthetic
ggcgcgccagtcctctcctctgacgttgtgttagttgtgttagttgtgttagttgtgttagttgtgttagttgtgttagttgtgttagttgtgttagttgtgttagttgtgttagttgtgttagttgtgttagttgtgttttcttggcaaattgtgttttcttggcaaattgtgttagttgtgttagtcgactcggaccgatg

SEQ ID NO: 16073 - DNA, 203 bp, Artificial sequence
  synthetic
ggcgcgccagtcctctcccagtgagttgtgttagttgtgttagttgtgttagttgtgttagttgtgttagttgtgttagttgtgttagttgtgttagttgtgttagttgtgttagttgtgtttaaaggaattgacgtgtttaaaggaattgacgtgtttaaaggaattgacgtgttagttgtgttagtcgactcggaccgatg

SEQ ID NO: 16074 - DNA, 203 bp, Artificial sequence
  synthetic
ggcgcgccagtcctctgccactccgttgtgttagttgtgttagttgtgttagttgtgttagttgtgttagttgtgttagttgtgttagttgtgttagttgtgttagttgtgttagttgtgttttcttggcaaattgtgttttcttggcaaattgtgttttcttggcaaattgtgttagttgtgttagtcgactcggaccgatg

SEQ ID NO: 16075 - DNA, 203 bp, Artificial sequence
  synthetic
ggcgcgccagtcctcagtggagacgttgtgttagttgtgttagttgtgttagttgtgttagttgtgttagttgtgttagttgtgttagttgtgttagttgtgttcactgtaccggccgtgcgtactgtgttagttgtgttagttgtgttagttgtgttagttgtgttagttgtgttagttgtgttagtcgactcggaccgatg

SEQ ID NO: 16076 - DNA, 203 bp, Artificial sequence
  synthetic
ggcgcgccagtcctggagcacgatgttgtgttagttgtgttagttgtgttagttgtgttagttgtgttagttgtgttagttgtgttagttgtgttagttgtgttcactgtaccggccgtgcgtattgtgttagttgtgttagttgtgttagttgtgttagttgtgttagttgtgttagttgtgttagtcgactcggaccgatg

SEQ ID NO: 16077 - DNA, 203 bp, Artificial sequence
  synthetic
ggcgcgccagtcctggagtgcgttgttgtgttagttgtgttagttgtgttagttgtgttagttgtgttagttgtgttagttgtgttagttgtgttagttgtgttttccgtcaattcctttaagtttgtgttagttgtgttagttgtgttagttgtgttagttgtgttagttgtgttagttgtgttagtcgactcggaccgatg

SEQ ID NO: 16078 - DNA, 203 bp, Artificial sequence
  synthetic
ggcgcgccagtcctgggaggccctgttgtgttagttgtgttagttgtgttagttgtgttagttgtgttagttgtgttagttgtgttagttgtgttagttgtgttttctcgattccgtgtgttttctcgattccgtgtgttttctcgattccgtgtgttttctcgattccgtgtgttagttgtgttagtcgactcggaccgatg

SEQ ID NO: 16079 - DNA, 203 bp, Artificial sequence
  synthetic
ggcgcgccagtcctgaggagctttgttgtgttagttgtgttagttgtgttagttgtgttagttgtgttagttgtgttagttgtgttagttgtgttagttgtgttttcttggcaaattgtgttttcttggcaaattgtgttttcttggcaaattgtgttttcttggcaaattgtgttagttgtgttagtcgactcggaccgatg

SEQ ID NO: 16080 - DNA, 203 bp, Artificial sequence
  synthetic
ggcgcgccagtcctcatacgggaggttgtgttagttgtgttagttgtgttagttgtgttagttgtgttagttgtgttagttgtgttagttgtgttagttgttttgcaaccatactccccccggaacctgttagttgtgttagttgtgttagttgtgttagttgtgttagttgtgttagttgtgttagtcgactcggaccgatg

SEQ ID NO: 16081 - DNA, 203 bp, Artificial sequence
  synthetic
ggcgcgccagtcctaacgggaggggttgtgttagttgtgttagttgtgttagttgtgttagttgtgttagttgtgttagttgtgttagttgtgttattcccggaagctgcccggcgggtcatgggaataacggttgtgttagttgtgttagttgtgttagttgtgttagttgtgttagttgtgttagtcgactcggaccgatg

SEQ ID NO: 16082 - DNA, 203 bp, Artificial sequence
  synthetic
ggcgcgccagtcctactgggagccgttgtgttagttgtgttagttgtgttagttgtgttagttgtgttagttgtgttagttgtgttagttgtgttgattaatgaaaacattcttggcaaatgctttcgctctgttgtgttagttgtgttagttgtgttagttgtgttagttgtgttagttgtgttagtcgactcggaccgatg

SEQ ID NO: 16083 - DNA, 203 bp, Artificial sequence
  synthetic
ggcgcgccagtcctgggagactgtgttgtgttagttgtgttagttgtgttagttgtgttagttgtgttagttgtgttagttgtgttagttgtgtttcgcagtttcactgtaccggccgtgcgtactcagacatgtgtgttagttgtgttagttgtgttagttgtgttagttgtgttagttgtgttagtcgactcggaccgatg

SEQ ID NO: 16084 - DNA, 203 bp, Artificial sequence
  synthetic
ggcgcgccagtcctggagctaatggttgtgttagttgtgttagttgtgttagttgtgttagttgtgttagttgtgttagttgtgttagttgtgtttcgcagtttcactgtaccggccgtgcgtactcagacatttgtgttagttgtgttagttgtgttagttgtgttagttgtgttagttgtgttagtcgactcggaccgatg

SEQ ID NO: 16085 - DNA, 203 bp, Artificial sequence
  synthetic
ggcgcgccagtcctaggagagggcgttgtgttagttgtgttagttgtgttagttgtgttagttgtgttagttgtgttagttgtgttagttgtgtttgcaccaccacccacggaatcgagaaagagctatcaatttgtgttagttgtgttagttgtgttagttgtgttagttgtgttagttgtgttagtcgactcggaccgatg

SEQ ID NO: 16086 - DNA, 203 bp, Artificial sequence
  synthetic
ggcgcgccagtcctaggtaggagcgttgtgttagttgtgttagttgtgttagttgtgttagttgtgttagttgtgttagttgtgttagttgtgtttttcccggaagctgcccggcgggtcatgggaataacgcttgtgttagttgtgttagttgtgttagttgtgttagttgtgttagttgtgttagtcgactcggaccgatg

SEQ ID NO: 16087 - DNA, 203 bp, Artificial sequence
  synthetic
ggcgcgccagtcctggagtcgcacgttgtgttagttgtgttagttgtgttagttgtgttagttgtgttagttgtgttagttgtgttagttgttggtttcccggaagctgcccggcgggtcatgggaataacgccgccgttagttgtgttagttgtgttagttgtgttagttgtgttagttgtgttagtcgactcggaccgatg

SEQ ID NO: 16088 - DNA, 203 bp, Artificial sequence
  synthetic
ggcgcgccagtccttgacaggagcgttgtgttagttgtgttagttgtgttagttgtgttagttgtgttagttgtgttagttgtgttagtttaagtttcagctttgcaaccatactccccccggaacccaaagactttgttagttgtgttagttgtgttagttgtgttagttgtgttagttgtgttagtcgactcggaccgatg

SEQ ID NO: 16089 - DNA, 203 bp, Artificial sequence
  synthetic
ggcgcgccagtcctccgaggagatgttgtgttagttgtgttagttgtgttagttgtgttagttgtgttagttgtgttagttgtgttagtttcctggtggtgcccttccgtcaattcctttaagtttcagctttgcaacttagttgtgttagttgtgttagttgtgttagttgtgttagttgtgttagtcgactcggaccgatg

SEQ ID NO: 16090 - DNA, 203 bp, Artificial sequence
  synthetic
ggcgcgccagtcctggagccgcttgttgtgttagttgtgttagttgtgttagttgtgttagttgtgttagttgtgttagttgtgttatcgttcttgattaatgaaaacattcttggcaaatgctttcgctctggtccgtctgttgtgttagttgtgttagttgtgttagttgtgttagttgtgttagtcgactcggaccgatg

SEQ ID NO: 16091 - DNA, 203 bp, Artificial sequence
  synthetic
ggcgcgccagtcctaggagctgcggttgtgttagttgtgttagttgtgttagttgtgttagttgtgttagttgtgttagttgtgttatgagccattcgcagtttcactgtaccggccgtgcgtactcagacatgcatggctgttgtgttagttgtgttagttgtgttagttgtgttagttgtgttagtcgactcggaccgatg

SEQ ID NO: 16092 - DNA, 203 bp, Artificial sequence
  synthetic
ggcgcgccagtcctttaggagcgcgttgtgttagttgtgttagttgtgttagttgtgttagttgtgttagttgtgttagttgtgttatgagccattcgcagtttcactgtaccggccgtgcgtactcagacatgcatggcttttgtgttagttgtgttagttgtgttagttgtgttagttgtgttagtcgactcggaccgatg

SEQ ID NO: 16093 - DNA, 203 bp, Artificial sequence
  synthetic
ggcgcgccagtcctcaataggagcgttgtgttagttgtgttagttgtgttagttgtgttagttgtgttagttgtgttagttgtgttcacggaatcgagaatgttcacggaatcgagaatgttcacggaatcgagaatgttcacggaatcgagaatgttcacggaatcgagaatgttagttgtgttagtcgactcggaccgatg

SEQ ID NO: 16094 - DNA, 203 bp, Artificial sequence
  synthetic
ggcgcgccagtcctgtccaaggaggttgtgttagttgtgttagttgtgttagttgtgttagttgtgttagttgtgttagttgtgttccactcctggtggtgcccttccgtcaattcctttaagtttcagctttgcaaccatattgtgttagttgtgttagttgtgttagttgtgttagttgtgttagtcgactcggaccgatg

SEQ ID NO: 16095 - DNA, 203 bp, Artificial sequence
  synthetic
ggcgcgccagtcctgctggagccggttgtgttagttgtgttagttgtgttagttgtgttagttgtgttagttgtgttagttgtgttccggcgggtagttgtgttccggcgggtagttgtgttccggcgggtagttgtgttccggcgggtagttgtgttccggcgggtagttgtgttagttgtgttagtcgactcggaccgatg

SEQ ID NO: 16096 - DNA, 203 bp, Artificial sequence
  synthetic
ggcgcgccagtcctgcaggagcatgttgtgttagttgtgttagttgtgttagttgtgttagttgtgttagttgtgttagttgtgttccggcgggtagttgtgttccggcgggtagttgtgttccggcgggtagttgtgttccggcgggtagttgtgttccggcgggtagttgtgttccggcgggtagtcgactcggaccgatg

SEQ ID NO: 16097 - DNA, 203 bp, Artificial sequence
  synthetic
ggcgcgccagtcctatggagaggtgttgtgttagttgtgttagttgtgttagttgtgttagttgtgttagttgtgttagttgtgttcctttaagtttcagctttgcaaccatactccccccggaacccaaagactttggtttttgtgttagttgtgttagttgtgttagttgtgttagttgtgttagtcgactcggaccgatg

SEQ ID NO: 16098 - DNA, 203 bp, Artificial sequence
  synthetic
ggcgcgccagtcctacgtcaggaggttgtgttagttgtgttagttgtgttagttgtgttagttgtgttagttgtgttagttgtgtttactcccttagttgtgtttactcccttagttgtgtttactcccttagttgtgtttactcccttagttgtgtttactcccttagttgtgttagttgtgttagtcgactcggaccgatg

SEQ ID NO: 16099 - DNA, 203 bp, Artificial sequence
  synthetic
ggcgcgccagtcctcatgtggagcgttgtgttagttgtgttagttgtgttagttgtgttagttgtgttagttgtgttagttgtttaatgagccattcgcagtttcactgtaccggccgtgcgtactcagacatgcatggcttaatcgttagttgtgttagttgtgttagttgtgttagttgtgttagtcgactcggaccgatg

SEQ ID NO: 16100 - DNA, 203 bp, Artificial sequence
  synthetic
ggcgcgccagtccttctggtggaggttgtgttagttgtgttagttgtgttagttgtgttagttgtgttagttgtgttccgtcaattcctttaagtttcagctttgcaaccatactccccccggaacccaaagactttggtttcccggaagctggtgttagttgtgttagttgtgttagttgtgttagtcgactcggaccgatg

SEQ ID NO: 16101 - DNA, 203 bp, Artificial sequence
  synthetic
ggcgcgccagtccttagcgcacaagttgtgttagttgtgttagttgtgttagttgtgttagttgtgttagttgttccaccaactaagaacggccatgcaccaccacccacggaatcgagaaagagctatcaatctgtcaatcctgtccgtgtcctgttagttgtgttagttgtgttagttgtgttagtcgactcggaccgatg

SEQ ID NO: 16102 - DNA, 203 bp, Artificial sequence
  synthetic
ggcgcgccagtccttgtgcgctacgttgtgttagttgtgttagttgtgttagttgtgttagttgtgttatcttcgaacctccgactttcgttcttgattaatgaaaacattcttggcaaatgctttcgctctggtccgtcttgcgccggtccaagaattgttgtgttagttgtgttagttgtgttagtcgactcggaccgatg

SEQ ID NO: 16103 - DNA, 203 bp, Artificial sequence
  synthetic
ggcgcgccagtccttcgtagcgcagttgtgttagttgtgttagttgtgttagttgtgttagttgtgttcaaattaagccgcaggctccactcctggtggtgcccttccgtcaattcctttaagtttcagctttgcaaccatactccccccggaacccaaagtgtgttagttgtgttagttgtgttagtcgactcggaccgatg

SEQ ID NO: 16104 - DNA, 203 bp, Artificial sequence
  synthetic
ggcgcgccagtcctcattgtatgcgttgtgttagttgtgttagttgtgttagttgtgttagttgtgttccggcgggtagttgtgttccggcgggtagttgtgttccggcgggtagttgtgttccggcgggtagttgtgttccggcgggtagttgtgttccggcgggtagttgtgttccggcgggtagtcgactcggaccgatg

SEQ ID NO: 16105 - DNA, 203 bp, Artificial sequence
  synthetic
ggcgcgccagtcctacattgtattgttgtgttagttgtgttagttgtgttagttgtgttagttgtgttggtgcccttccgtcaattcctttaagtttcagctttgcaaccatactccccccggaacccaaagactttggtttcccggaagctgcccggcggtgtgttagttgtgttagttgtgttagtcgactcggaccgatg

SEQ ID NO: 16106 - DNA, 203 bp, Artificial sequence
  synthetic
ggcgcgccagtcctatacaatcatgttgtgttagttgtgttagttgtgttagttgtgttagtttgatcgtcttcgaacctccgactttcgttcttgattaatgaaaacattcttggcaaatgctttcgctctggtccgtcttgcgccggtccaagaatttcacctttagttgtgttagttgtgttagtcgactcggaccgatg

SEQ ID NO: 16107 - DNA, 203 bp, Artificial sequence
  synthetic
ggcgcgccagtcctccaggtacaagttgtgttagttgtgttagttgtgttagttgtgtttatctgatcgtcttcgaacctccgactttcgttcttgattaatgaaaacattcttggcaaatgctttcgctctggtccgtcttgcgccggtccaagaatttcacctctagttgtgttagttgtgttagtcgactcggaccgatg

SEQ ID NO: 16108 - DNA, 203 bp, Artificial sequence
  synthetic
ggcgcgccagtcctacaggtaagcgttgtgttagttgtgttagttgtgttagttttcccgtgttgagtcaaattaagccgcaggctccactcctggtggtgcccttccgtcaattcctttaagtttcagctttgcaaccatactccccccggaacccaaagactttggtttcccgtagttgtgttagtcgactcggaccgatg

SEQ ID NO: 16109 - DNA, 203 bp, Artificial sequence
  synthetic
ggcgcgccagtcctagacaggtaggttgtgttagttgtgttagttgtgttatacgacggtatctgatcgtcttcgaacctccgactttcgttcttgattaatgaaaacattcttggcaaatgctttcgctctggtccgtcttgcgccggtccaagaatttcacctctagcggcgcaagttgtgttagtcgactcggaccgatg

SEQ ID NO: 16110 - DNA, 203 bp, Artificial sequence
  synthetic
ggcgcgccagtccttgccttttgggttgtgttagttgtgttagttgtgttcacggaatcgagaatgttcacggaatcgagaatgttcacggaatcgagaatgttcacggaatcgagaatgttcacggaatcgagaatgttcacggaatcgagaatgttcacggaatcgagaatgttagttgtgttagtcgactcggaccgatg

SEQ ID NO: 16111 - DNA, 203 bp, Artificial sequence
  synthetic
ggcgcgccagtcctcctcctctgcgttgtgttagttgtgttagttgtgttctacgacggtatctgatcgtcttcgaacctccgactttcgttcttgattaatgaaaacattcttggcaaatgctttcgctctggtccgtcttgcgccggtccaagaatttcacctctagcggcgcaatttgtgttagtcgactcggaccgatg

SEQ ID NO: 16112 - DNA, 203 bp, Artificial sequence
  synthetic
ggcgcgccagtcctaaggcagtctgttgtgttagttgtgttagttgtgttgcaggctccactcctggtggtgcccttccgtcaattcctttaagtttcagctttgcaaccatactccccccggaacccaaagactttggtttcccggaagctgcccggcgggtcatgggaataacgccttgtgttagtcgactcggaccgatg

SEQ ID NO: 16113 - DNA, 203 bp, Artificial sequence
  synthetic
ggcgcgccagtcctattgtgccacgttgtgttagttgtgttagttgtgtttactcccttagttgtgtttactcccttagttgtgtttactcccttagttgtgtttactcccttagttgtgtttactcccttagttgtgtttactcccttagttgtgtttactcccttagttgtgtttactcccttagtcgactcggaccgatg

SEQ ID NO: 16114 - DNA, 203 bp, Artificial sequence
  synthetic
ggcgcgccagtccttatgcctattgttgtgttagttgtgttagttgtgtttttcagctttgcaaccatactccccccggaacccaaagactttggtttcccggaagctgcccggcgggtcatgggaataacgccgccgcatcgccggtcggcatcgtttatggtcggaactacgacggttgtgttagtcgactcggaccgatg

SEQ ID NO: 16115 - DNA, 203 bp, Artificial sequence
  synthetic
ggcgcgccagtcctgactaggcaagttgtgttcgtcaattcctttatgttcgtcaattcctttatgttcgtcaattcctttatgttcgtcaattcctttatgttcgtcaattcctttatgttcgtcaattcctttatgttcgtcaattcctttatgttcgtcaattcctttatgttagttgtgttagtcgactcggaccgatg

SEQ ID NO: 16116 - DNA, 203 bp, Artificial sequence
  synthetic
ggcgcgccagtcctctcctcctatgttgtgtttactcccttagttgtgtttactcccttagttgtgtttactcccttagttgtgtttactcccttagttgtgtttactcccttagttgtgtttactcccttagttgtgtttactcccttagttgtgtttactcccttagttgtgtttactcccttagtcgactcggaccgatg

SEQ ID NO: 16117 - DNA, 203 bp, Artificial sequence
  synthetic
ggcgcgccagtcctttaggcagcctaccggccgtctgacatttctgacatttctgacatttctgacatttctgacatttctgacatttctgacatttctgacatttctgacatttctgacatttctgacatttctgacatttctgacatttctgacatttctgacatttctgacatttctgacatttccgactcggaccgatg

SEQ ID NO: 16118 - DNA, 203 bp, Artificial sequence
  synthetic
ggcgcgccagtcctcttacctgggtaccggccgtctgacatttctgacatttctgacatttctgacatttctgacatttctgacatttctgacatttctgacatttctgacatttctgacatttctgacatttctgacatttctgacatttctgacatttctgacatttctgacatttctgtactccccgactcggaccgatg

SEQ ID NO: 16119 - DNA, 203 bp, Artificial sequence
  synthetic
ggcgcgccagtcctgaccctcctataccggccgtctgacatttctgacatttctgacatttctgacatttctgacatttctgacatttctgacatttctgacatttctgacatttctgacatttctgacatttctgacatttctgacatttctgacatttctgacatttctgaccacggaatcgagaacgactcggaccgatg

SEQ ID NO: 16120 - DNA, 203 bp, Artificial sequence
  synthetic
ggcgcgccagtcctcctccatagctaccggccgtctgacatttctgacatttctgacatttctgacatttctgacatttctgacatttctgacatttctgacatttctgacatttctgacatttctgacatttctgacatttctgacatttctgacatttctgacatttctgaccgtcaattcctttacgactcggaccgatg

SEQ ID NO: 16121 - DNA, 203 bp, Artificial sequence
  synthetic
ggcgcgccagtcctatgcctatggtcacggaatcgagaaatttctgacatttctgacatttctgacatttctgacatttctgacatttctgacatttctgacatttctgacatttctgacatttctgacatttctgacatttctgacatttctgacatttctgacatttctgacatttcccggcgggtcgactcggaccgatg

SEQ ID NO: 16122 - DNA, 203 bp, Artificial sequence
  synthetic
ggcgcgccagtcctctgccttcaatcccactcaaaatccaaaatcactaccagccactatctgctagaccggcgggtcgaataggtccggcgggtcaaaatatgccggcgggtgacattagtccggcgggtatcaatctcccggcgggtttataccgcccggcgggtacatatactccggcgggtaaacgactcggaccgatg

SEQ ID NO: 16123 - DNA, 203 bp, Artificial sequence
  synthetic
ggcgcgccagtcctcaggaggtgttcccactcaaaatccaaaatcactaccagccactatctgctagacctagagtgcgaataggtaaataaaaccaaaatatgccggcgggtgacattagtccggcgggtatcaatctcccggcgggtttataccgcccggcgggtacatatactccggcgggtaaacgactcggaccgatg

SEQ ID NO: 16124 - DNA, 203 bp, Artificial sequence
  synthetic
ggcgcgccagtcctgcaatacctgtcccactcaaaatccaaaatcactaccagccactatctgctagacctagagtgcgaataggtaaataaaaccaaaatatggggtaaatagacattagtaccggccgtatcaatctcaccggccgtttataccgcaccggccgtacatatactaccggccgtaaacgactcggaccgatg

SEQ ID NO: 16125 - DNA, 203 bp, Artificial sequence
  synthetic
ggcgcgccagtcctttgcctacagtcccactcaaaatccaaaatcactaccagccactatctgctagacctagagtgcgaataggtaaataaaaccaaaatatggggtaaatagacattagttagagttcaatcaatctcaacaaccatttataccgcaccggccgtacatatactaccggccgtaaacgactcggaccgatg

SEQ ID NO: 16126 - DNA, 203 bp, Artificial sequence
  synthetic
ggcgcgccagtccttcaaggaggctcccactcaaaatccaaaatcactaccagccactatctgctagacctagagtgcgaataggtaaataaaaccaaaatatggggtaaatagacattagttagagttcaatcaatctcaacaaccatttataccgccaattcaatacatatactaccggccgtaaacgactcggaccgatg

SEQ ID NO: 16127 - DNA, 203 bp, Artificial sequence
  synthetic
ggcgcgccagtcctgtttacctgttcccactcaaaatccaaaatcactaccagccactatctgctagacctagagtgcgaataggtaaataaaaccaaaatatggggtaaatagacattagttagagttcaatcaatctcaacaaccatttataccgcccggcgggtacatatactccggcgggtaaacgactcggaccgatg

SEQ ID NO: 16128 - DNA, 203 bp, Artificial sequence
  synthetic
ggcgcgccagtcctcaaaggcaattcccactcaaaatccaaaatcactaccagccactatctgctagacctagagtgcgaataggtaaataaaaccaaaatatggggtaaatagacattagttagagttcaatcaatctccacggaatcgagaaccgccacggaatcgagaatactataaatcttaaacgactcggaccgatg

SEQ ID NO: 16129 - DNA, 203 bp, Artificial sequence
  synthetic
ggcgcgccagtcctagagtacctgtcccactcaaaatccaaaatcactaccagccactatctgctagacctagagtgcgaataggtaaataaaaccaaaatatggggtaaatagacattagttagagttcaatcaatctctactcccatttataccgctactcccatacatatacttactcccttaaacgactcggaccgatg

SEQ ID NO: 16130 - DNA, 203 bp, Artificial sequence
  synthetic
ggcgcgccagtcctacgtggaggatcccactcaaaatccaaaatcactaccagccactatctgctagacctagagtgcgaataggtaaataaaaccaaaatatggggtaaatagacattagttagagttcaatcaatctcttcttggcaaaataccgcttcttggcaaaatatactttcttggcaaaacgactcggaccgatg

SEQ ID NO: 16131 - DNA, 203 bp, Artificial sequence
  synthetic
ggcgcgccagtccttcaaaaggcatcccactcaaaatccaaaatcactaccagccactatctgctagacctagagtgcgaataggttactcccaccaaaatatgtactccctagacattagttactccccaatcaatctctactcccatttataccgctactcccatacatatacttactcccttaaacgactcggaccgatg

SEQ ID NO: 16132 - DNA, 203 bp, Artificial sequence
  synthetic
ggcgcgccagtcctaatcctccattcccactccacggaatcgagaactaccacggaatcgagaatagacacggaatcgagaaaggtcacggaatcgagaatatgcacggaatcgagaatagtcacggaatcgagaatctccacggaatcgagaaccgccacggaatcgagaatactataaatcttaaacgactcggaccgatg

SEQ ID NO: 16133 - DNA, 203 bp, Artificial sequence
  synthetic
ggcgcgccagtcctcggtttcatatccggcgggtctgacatttctgacatttctgacatttctgacatttctgacatttctgacatttctgacatttctgacatttctgacatttctgacatttctgacatttctgacatttctgacatttctgacatttctgacatttctgacatttctgtactccccgactcggaccgatg

SEQ ID NO: 16134 - DNA, 203 bp, Artificial sequence
  synthetic
ggcgcgccagtcctgggagttgcctccggcgggtctgacatttctgacatttctgacatttctgacatttctgacatttctgacatttctgacatttctgacatttctgacatttctgacatttctgacatttctgacatttctgacatttctgacatttctgacatttctgaccacggaatcgagaacgactcggaccgatg

SEQ ID NO: 16135 - DNA, 203 bp, Artificial sequence
  synthetic
ggcgcgccagtcctcacgggagtctccttcctaccggccgtgcctgggccaccggccgttgctgtggaaccggccgtggggccctgaccggccgtctgagcaccaccggccgtagcctgcctaccggccgtacccctagcaccggccgtggggaggcaaccggccgtaggccaggcaccggccgtggtcgactcggaccgatg

SEQ ID NO: 16136 - DNA, 203 bp, Artificial sequence
  synthetic
ggcgcgccagtcctcgacgggagttccttcctcacggaatcgagaaggcccacggaatcgagaatggacacggaatcgagaacctgcacggaatcgagaacacccacggaatcgagaagcctcacggaatcgagaatagccacggaatcgagaaggcacacggaatcgagaaaggctacctcgggggtcgactcggaccgatg

SEQ ID NO: 16137 - DNA, 203 bp, Artificial sequence
  synthetic
ggcgcgccagtcctactccctgtgtccttcctccggcgggtgcctgggccccggcgggttgctgtggaccggcgggtggggccctgccggcgggtctgagcaccccggcgggtagcctgcctccggcgggtacccctagcccggcgggtggggaggcaccggcgggtaggccaggcccggcgggtggtcgactcggaccgatg

SEQ ID NO: 16138 - DNA, 203 bp, Artificial sequence
  synthetic
ggcgcgccagtcctattactcccgtccttcctctgcacctggcctgggccacacccaagtgctgtggacgtcaattcctttacctgcgtcaattcctttacacccgtcaattcctttagcctcgtcaattcctttatagccgtcaattcctttaggcacgtcaattcctttaaggctacctcgggggtcgactcggaccgatg

SEQ ID NO: 16139 - DNA, 203 bp, Artificial sequence
  synthetic
ggcgcgccagtcctatcgtttgactccttcctctgcacctggcctgggccacacccaagtgctgtggactggcccgaggggccctgcacgtggccctgagcacccacggaatcgagaagcctcacggaatcgagaatagccacggaatcgagaaggcacacggaatcgagaaaggctacctcgggggtcgactcggaccgatg

SEQ ID NO: 16140 - DNA, 203 bp, Artificial sequence
  synthetic
ggcgcgccagtccttgaaacgagttccttcctctgcacctggcctgggccacacccaagtgctgtggactggcccgaggggccctgcacgtggccctgagcacctactcccgtagcctgccttactcccagacccctagctactcccaaggggaggcatactcccgcaggccaggctactcccggggtcgactcggaccgatg

SEQ ID NO: 16141 - DNA, 203 bp, Artificial sequence
  synthetic
ggcgcgccagtcctgaaacgactttccttcctctgcacctggcctgggccacacccaagtgctgtggactggcccgaggggccctgcacgtggccctgagcacctctcagcgtagcctgcctagtccctagacccctagcaccggccgtggggaggcaaccggccgtaggccaggcaccggccgtggtcgactcggaccgatg

SEQ ID NO: 16142 - DNA, 203 bp, Artificial sequence
  synthetic
ggcgcgccagtcctagtcgtttggtccttcctctgcacctggcctgggccacacccaagtgctgtggactggcccgaggggccctgcacgtggccctgagcacctctcagcgtagcctgcctagtccctagacccctagccagctccaaggggaggcacctccaagcaggccaggctactcccggggtcgactcggaccgatg

SEQ ID NO: 16143 - DNA, 203 bp, Artificial sequence
  synthetic
ggcgcgccagtcctcaaacgaggttccttcctctgcacctggcctgggccacacccaagtgctgtggactggcccgaggggccctgcacgtggccctgagcacctctcagcgtagcctgcctagtccctagacccctagccagctccaaggggaggcacgtcaattcctttaaggctacctcgggggtcgactcggaccgatg

SEQ ID NO: 16144 - DNA, 203 bp, Artificial sequence
  synthetic
ggcgcgccagtcctgcaaaacgactccttcctctgcacctggcctgggccacacccaagtgctgtggactggcccgaggggccctgcacgtggccctgagcacctctcagcgtagcctgcctagtccctagacccctagccagctccaaggggaggcattcttggcaaagccaggcttcttggcaaatcgactcggaccgatg

SEQ ID NO: 16145 - DNA, 203 bp, Artificial sequence
  synthetic
ggcgcgccagtcctcgagtcgttttccttcctctgcacctggcctgggccacacccaagtgctgtggactggcccgaggggccctgcacgtggccctgagcacctctcagcgtagcctgcctagtccctagacccctagccgtcaattcctttaggcacgtcaattcctttaaggctacctcgggggtcgactcggaccgatg

SEQ ID NO: 16146 - DNA, 203 bp, Artificial sequence
  synthetic
ggcgcgccagtcctcgaaacgaactccttcctctgcacctggcctgggccacacccaagtgctgtggactggcccgaggggccctgcacgtggccctgagcacctctcagcgtagcctgcctagtccctagacccctagctactcccaaggggaggcatactcccgcaggccaggctactcccggggtcgactcggaccgatg

SEQ ID NO: 16147 - DNA, 203 bp, Artificial sequence
  synthetic
ggcgcgccagtccttgcaaacgattccttcctctgcacctggcctgggccacacccaagtgctgtggactggcccgaggggccctgcacgtggccctgagcacctctcagcgtagcctgcctcacggaatcgagaatagccacggaatcgagaaggcacacggaatcgagaaaggctacctcgggggtcgactcggaccgatg

SEQ ID NO: 16148 - DNA, 203 bp, Artificial sequence
  synthetic
ggcgcgccagtcctcgctggtcaatccttcctctgcacctggcctgggccacacccaagtgctgtggactggcccgaggggccctgcacgtggccctgagcacctctcagcgtagcctgcctcgtcaattcctttatagccgtcaattcctttaggcacgtcaattcctttaaggctacctcgggggtcgactcggaccgatg

SEQ ID NO: 16149 - DNA, 203 bp, Artificial sequence
  synthetic
ggcgcgccagtccttaccagctgctccttcctctgcacctggcctgggccacacccaagtgctgtggactggcccgaggggccctgccggcgggtctgagcaccccggcgggtagcctgcctccggcgggtacccctagcccggcgggtggggaggcaccggcgggtaggccaggcccggcgggtggtcgactcggaccgatg

SEQ ID NO: 16150 - DNA, 203 bp, Artificial sequence
  synthetic
ggcgcgccagtcctgtgattaaggtccttcctctgcacctggcctgggccacacccaagtgctgtggattcttggcaaaggccctgttcttggcaaagagcaccttcttggcaaacctgcctttcttggcaaaccctagcttcttggcaaaggaggcattcttggcaaagccaggcttcttggcaaatcgactcggaccgatg

SEQ ID NO: 16151 - DNA, 203 bp, Artificial sequence
  synthetic
ggcgcgccagtccttcttaatttgtctcacggaatcgagaattctgacatttctgacatttctgacatttctgacatttctgacatttctgacatttctgacatttctgacatttctgacatttctgacatttctgacatttctgacatttctgacatttctgacatttctgacatttctgacatttccgactcggaccgatg

SEQ ID NO: 16152 - DNA, 203 bp, Artificial sequence
  synthetic
ggcgcgccagtcctcttaatgccgtctcacggaatcgagaattctgacatttctgacatttctgacatttctgacatttctgacatttctgacatttctgacatttctgacatttctgacatttctgacatttctgacatttctgacatttctgacatttctgacatttctgacatttctgtactccccgactcggaccgatg

SEQ ID NO: 16153 - DNA, 203 bp, Artificial sequence
  synthetic
ggcgcgccagtcctggatctcccatctcgtcaattcctttattctgacatttctgacatttctgacatttctgacatttctgacatttctgacatttctgacatttctgacatttctgacatttctgacatttctgacatttctgacatttctgacatttctgacatttctgaccgtcaattcctttacgactcggaccgatg

SEQ ID NO: 16154 - DNA, 203 bp, Artificial sequence
  synthetic
ggcgcgccagtccttctagcgccctctgacaccggccgtatttctgacatttctgacatttctgacatttctgacatttctgacatttctgacatttctgacatttctgacatttctgacatttctgacatttctgacatttctgacatttctgacatttctgacatttctgacatttcccggcgggtcgactcggaccgatg

SEQ ID NO: 16155 - DNA, 203 bp, Artificial sequence
  synthetic
ggcgcgccagtcctgggcgcatgttctgacataccggccgtttctgacataccggccgtttctgacataccggccgtttctgacataccggccgtttctgacataccggccgtttctgacataccggccgtttctgacataccggccgtttctgacataccggccgtttctgacataccggccgtttccgactcggaccgatg

SEQ ID NO: 16156 - DNA, 203 bp, Artificial sequence
  synthetic
ggcgcgccagtccttggcgccctctctgacataccggccgtttctgacatttctgacatttctgacatttctgacatttctgacatttctgacatttctgacatttctgacatttctgacatttctgacatttctgacatttctgacatttctgacatttctgacatttctgacatttctgacatttccgactcggaccgatg

SEQ ID NO: 16157 - DNA, 203 bp, Artificial sequence
  synthetic
ggcgcgccagtcctgcgcccaacctctgacataccggccgtttctgacatttctgacatttctgacatttctgacatttctgacatttctgacatttctgacatttctgacatttctgacatttctgacatttctgacatttctgacatttctgacatttctgacatttctgacatttctgtactccccgactcggaccgatg

SEQ ID NO: 16158 - DNA, 203 bp, Artificial sequence
  synthetic
ggcgcgccagtcctgcgccctgtctctgacatcacggaatcgagaaacatcacggaatcgagaaacatcacggaatcgagaaacatcacggaatcgagaaacatcacggaatcgagaaacatcacggaatcgagaaacatcacggaatcgagaaacatttctgacatttctgacatttctgacatttccgactcggaccgatg

SEQ ID NO: 16159 - DNA, 203 bp, Artificial sequence
  synthetic
ggcgcgccagtcctgagattgttctctgacatcacggaatcgagaaacatcacggaatcgagaaacatcacggaatcgagaaacatcacggaatcgagaaacatttctgacatttctgacatcacggaatcgagaaacatcacggaatcgagaaacatttctgacatttctgacatttctgacatttccgactcggaccgatg

SEQ ID NO: 16160 - DNA, 203 bp, Artificial sequence
  synthetic
ggcgcgccagtcctcgaacaatgctctgacatcacggaatcgagaaacatcacggaatcgagaaacatcacggaatcgagaaacatcacggaatcgagaaacatttctgacatttctgacatcacggaatcgagaaacatttctgacatttctgacatcacggaatcgagaaacatttctgacatttccgactcggaccgatg

SEQ ID NO: 16161 - DNA, 203 bp, Artificial sequence
  synthetic
ggcgcgccagtcctactcgccaactctgacatcacggaatcgagaaacatcacggaatcgagaaacatcacggaatcgagaaacatttctgacatttctgacatcacggaatcgagaaacatcacggaatcgagaaacatttctgacatttctgacatttctgacatttctgacatttctgacatttccgactcggaccgatg

SEQ ID NO: 16162 - DNA, 203 bp, Artificial sequence
  synthetic
ggcgcgccagtcctacgttggccttctgacatcacggaatcgagaaacatcacggaatcgagaaacatcacggaatcgagaaacatttctgacatttctgacatcacggaatcgagaaacatttctgacatttctgacatttctgacatttctgacatcacggaatcgagaaacatttctgacatttccgactcggaccgatg

SEQ ID NO: 16163 - DNA, 203 bp, Artificial sequence
  synthetic
ggcgcgccagtcctttggcgaaagtctgacatcacggaatcgagaaacatcacggaatcgagaaacatcacggaatcgagaaacatttctgacatttctgacatttctgacatttctgacatcacggaatcgagaaacatcacggaatcgagaaacatttctgacatttctgacatttctgacatttccgactcggaccgatg

SEQ ID NO: 16164 - DNA, 203 bp, Artificial sequence
  synthetic
ggcgcgccagtccttggccaaccctctgacatcacggaatcgagaaacatcacggaatcgagaaacatcacggaatcgagaaacatttctgacatttctgacatttctgacatttctgacatcacggaatcgagaaacatttctgacatttctgacatcacggaatcgagaaacatttctgacatttccgactcggaccgatg

SEQ ID NO: 16165 - DNA, 203 bp, Artificial sequence
  synthetic
ggcgcgccagtcctgttggcgctctctgacatcacggaatcgagaaacatcacggaatcgagaaacatcacggaatcgagaaacatttctgacatttctgacatttctgacatttctgacatcacggaatcgagaaacatttctgacatttctgacatttctgacatttctgacatttctgacatttccgactcggaccgatg

SEQ ID NO: 16166 - DNA, 203 bp, Artificial sequence
  synthetic
ggcgcgccagtcctaagccaaatatctgacatcacggaatcgagaaacatcacggaatcgagaaacatcacggaatcgagaaacatttctgacatttctgacatttctgacatttctgacatttctgacatttctgacatttctgacatttctgacatttctgacatttctgacatttctgacatttccgactcggaccgatg

SEQ ID NO: 16167 - DNA, 203 bp, Artificial sequence
  synthetic
ggcgcgccagtcctggccaaaccctctgacatcacggaatcgagaaacatcacggaatcgagaaacatttctgacatttctgacatcacggaatcgagaaacatcacggaatcgagaaacatttctgacatttctgacatcacggaatcgagaaacatttctgacatttctgacatttctgacatttccgactcggaccgatg

SEQ ID NO: 16168 - DNA, 203 bp, Artificial sequence
  synthetic
ggcgcgccagtcctatttggcgactctgacatcacggaatcgagaaacatcacggaatcgagaaacatttctgacatttctgacatcacggaatcgagaaacatcacggaatcgagaaacatttctgacatttctgacatttctgacatttctgacatttctgacatttctgacatttctgacatttccgactcggaccgatg

SEQ ID NO: 16169 - DNA, 203 bp, Artificial sequence
  synthetic
ggcgcgccagtcctcgttggcgcgtctgacatcacggaatcgagaaacatcacggaatcgagaaacatttctgacatttctgacatcacggaatcgagaaacatttctgacatttctgacatcacggaatcgagaaacatcacggaatcgagaaacatttctgacatttctgacatttctgacatttccgactcggaccgatg

SEQ ID NO: 16170 - DNA, 203 bp, Artificial sequence
  synthetic
ggcgcgccagtccttcttgccaaatctgacatcacggaatcgagaaacatttctgacatttctgacatcacggaatcgagaaacatcacggaatcgagaaacatcacggaatcgagaaacatcacggaatcgagaaacatcacggaatcgagaaacatttctgacatttctgacatttctgacatttccgactcggaccgatg

SEQ ID NO: 16171 - DNA, 203 bp, Artificial sequence
  synthetic
ggcgcgccagtcctttggctgccatctgacatcacggaatcgagaaacatttctgacatttctgacatcacggaatcgagaaacatcacggaatcgagaaacatttctgacatttctgacatcacggaatcgagaaacatcacggaatcgagaaacatcacggaatcgagaaacatttctgacatttccgactcggaccgatg

SEQ ID NO: 16172 - DNA, 203 bp, Artificial sequence
  synthetic
ggcgcgccagtccttttggcctgatctgacatcacggaatcgagaaacatttctgacatttctgacatcacggaatcgagaaacatcacggaatcgagaaacatttctgacatttctgacatcacggaatcgagaaacatttctgacatttctgacatcacggaatcgagaaacatttctgacatttccgactcggaccgatg

SEQ ID NO: 16173 - DNA, 203 bp, Artificial sequence
  synthetic
ggcgcgccagtcctgccaaacttctctgacatcacggaatcgagaaacatttctgacatttctgacatcacggaatcgagaaacatcacggaatcgagaaacatttctgacatttctgacatcacggaatcgagaaacatttctgacatttctgacatttctgacatttctgacatttctgacatttccgactcggaccgatg

SEQ ID NO: 16174 - DNA, 203 bp, Artificial sequence
  synthetic
ggcgcgccagtcctagtgagacactctgacatcacggaatcgagaaacatttctgacatttctgacatcacggaatcgagaaacatttctgacatttctgacatcacggaatcgagaaacatcacggaatcgagaaacatttctgacatttctgacatcacggaatcgagaaacatttctgacatttccgactcggaccgatg

SEQ ID NO: 16175 - DNA, 203 bp, Artificial sequence
  synthetic
ggcgcgccagtcctgtctgtgtcttctgacatcacggaatcgagaaacatttctgacatttctgacatcacggaatcgagaaacatttctgacatttctgacatttctgacatttctgacatcacggaatcgagaaacatttctgacatttctgacatcacggaatcgagaaacatttctgacatttccgactcggaccgatg

SEQ ID NO: 16176 - DNA, 203 bp, Artificial sequence
  synthetic
ggcgcgccagtcctccgtgtctgatctgacatcacggaatcgagaaacatttctgacatttctgacatttctgacatttctgacatcacggaatcgagaaacatcacggaatcgagaaacatttctgacatttctgacatcacggaatcgagaaacatcacggaatcgagaaacatttctgacatttccgactcggaccgatg

SEQ ID NO: 16177 - DNA, 203 bp, Artificial sequence
  synthetic
ggcgcgccagtcctactgtgtctatctgacatcacggaatcgagaaacatttctgacatttctgacatttctgacatttctgacatcacggaatcgagaaacatcacggaatcgagaaacatttctgacatttctgacatttctgacatttctgacatcacggaatcgagaaacatttctgacatttccgactcggaccgatg

SEQ ID NO: 16178 - DNA, 203 bp, Artificial sequence
  synthetic
ggcgcgccagtcctagtgtctgtgtctgacatcacggaatcgagaaacatttctgacatttctgacatttctgacatttctgacatcacggaatcgagaaacatcacggaatcgagaaacatttctgacatttctgacatttctgacatttctgacatttctgacatttctgacatttctgacatttccgactcggaccgatg

SEQ ID NO: 16179 - DNA, 203 bp, Artificial sequence
  synthetic
ggcgcgccagtcctctcgcgcccatctgacatcacggaatcgagaaacatttctgacatttctgacatttctgacatttctgacatttctgacatttctgacatcacggaatcgagaaacatttctgacatttctgacatttctgacatttctgacatttctgacatttctgacatttctgacatttccgactcggaccgatg

SEQ ID NO: 16180 - DNA, 203 bp, Artificial sequence
  synthetic
ggcgcgccagtccttatcgcgggatctgacatcacggaatcgagaaacatttctgacatttctgacatttctgacatttctgacatttctgacatttctgacatttctgacatttctgacatttctgacatttctgacatcacggaatcgagaaacatcacggaatcgagaaacatttctgacatttccgactcggaccgatg

SEQ ID NO: 16181 - DNA, 203 bp, Artificial sequence
  synthetic
ggcgcgccagtcctctcgcgggactctgacatcacggaatcgagaaacatttctgacatttctgacatttctgacatttctgacatttctgacatttctgacatttctgacatttctgacatttctgacatttctgacatttctgacatttctgacatttctgacatttctgacatttctgacatttccgactcggaccgatg

SEQ ID NO: 16182 - DNA, 203 bp, Artificial sequence
  synthetic
ggcgcgccagtcctctgcccgcgttctgacatccggcgggtttctgacatccggcgggtttctgacatccggcgggtttctgacatccggcgggtttctgacatccggcgggtttctgacatccggcgggtttctgacatccggcgggtttctgacatccggcgggtttctgacatccggcgggtttccgactcggaccgatg

SEQ ID NO: 16183 - DNA, 203 bp, Artificial sequence
  synthetic
ggcgcgccagtcctgcccgcctaatctgacatccggcgggtttctgacatccggcgggtttctgacatccggcgggtttctgacatccggcgggtttctgacatccggcgggtttctgacatccggcgggtttctgacatccggcgggtttctgacatccggcgggtttctgacatccggcgggtttccgactcggaccgatg

SEQ ID NO: 16184 - DNA, 203 bp, Artificial sequence
  synthetic
ggcgcgccagtcctaggcgggtcctctgacatccggcgggtttctgacatccggcgggtttctgacatccggcgggtttctgacatccggcgggtttctgacatccggcgggtttctgacatccggcgggtttctgacatccggcgggtttctgacatccggcgggtttctgacatccggcgggtttccgactcggaccgatg

SEQ ID NO: 16185 - DNA, 203 bp, Artificial sequence
  synthetic
ggcgcgccagtcctagttagatcatctgacatccggcgggtttctgacatccggcgggtttctgacatccggcgggtttctgacatccggcgggtttctgacatccggcgggtttctgacatccggcgggtttctgacatccggcgggtttctgacatccggcgggtttctgacatccggcgggtttccgactcggaccgatg

SEQ ID NO: 16186 - DNA, 203 bp, Artificial sequence
  synthetic
ggcgcgccagtcctgagccgggcttctgacatccggcgggtttctgacatccggcgggtttctgacatccggcgggtttctgacatccggcgggtttctgacatccggcgggtttctgacatccggcgggtttctgacatccggcgggtttctgacatccggcgggtttctgacatccggcgggtttccgactcggaccgatg

SEQ ID NO: 16187 - DNA, 203 bp, Artificial sequence
  synthetic
ggcgcgccagtcctcgccggtctctctgacatccggcgggtttctgacatttctgacatttctgacatttctgacatttctgacatttctgacatttctgacatttctgacatttctgacatttctgacatttctgacatttctgacatttctgacatttctgacatttctgacatttctgacatttccgactcggaccgatg

SEQ ID NO: 16188 - DNA, 203 bp, Artificial sequence
  synthetic
ggcgcgccagtccttacttgccggtctgacatcgtcaattcctttaacatcgtcaattcctttaacatcgtcaattcctttaacatcgtcaattcctttaacatcgtcaattcctttaacatcgtcaattcctttaacatcgtcaattcctttaacatttctgacatttctgacatttctgacatttccgactcggaccgatg

SEQ ID NO: 16189 - DNA, 203 bp, Artificial sequence
  synthetic
ggcgcgccagtcctctggtgccggtctgacatcgtcaattcctttaacatcgtcaattcctttaacatcgtcaattcctttaacatcgtcaattcctttaacatcgtcaattcctttaacatcgtcaattcctttaacatttctgacatttctgacatttctgacatttctgacatttctgacatttccgactcggaccgatg

SEQ ID NO: 16190 - DNA, 203 bp, Artificial sequence
  synthetic
ggcgcgccagtccttgccggtcgttctgacatcgtcaattcctttaacatcgtcaattcctttaacatcgtcaattcctttaacatcgtcaattcctttaacatcgtcaattcctttaacatttctgacatttctgacatcgtcaattcctttaacatttctgacatttctgacatttctgacatttccgactcggaccgatg

SEQ ID NO: 16191 - DNA, 203 bp, Artificial sequence
  synthetic
ggcgcgccagtcctaggcagccggtctgacatcgtcaattcctttaacatcgtcaattcctttaacatcgtcaattcctttaacatcgtcaattcctttaacatttctgacatttctgacatcgtcaattcctttaacatcgtcaattcctttaacatcgtcaattcctttaacatttctgacatttccgactcggaccgatg

SEQ ID NO: 16192 - DNA, 203 bp, Artificial sequence
  synthetic
ggcgcgccagtcctgataccggcgtctgacatcgtcaattcctttaacatcgtcaattcctttaacatcgtcaattcctttaacatcgtcaattcctttaacatttctgacatttctgacatcgtcaattcctttaacatttctgacatttctgacatcgtcaattcctttaacatttctgacatttccgactcggaccgatg

SEQ ID NO: 16193 - DNA, 203 bp, Artificial sequence
  synthetic
ggcgcgccagtcctccggctaatctctgacatcgtcaattcctttaacatcgtcaattcctttaacatcgtcaattcctttaacatcgtcaattcctttaacatttctgacatttctgacatcgtcaattcctttaacatttctgacatttctgacatttctgacatttctgacatttctgacatttccgactcggaccgatg

SEQ ID NO: 16194 - DNA, 203 bp, Artificial sequence
  synthetic
ggcgcgccagtccttcgccggcattctgacatcgtcaattcctttaacatcgtcaattcctttaacatcgtcaattcctttaacatcgtcaattcctttaacatttctgacatttctgacatttctgacatttctgacatcgtcaattcctttaacatcgtcaattcctttaacatttctgacatttccgactcggaccgatg

SEQ ID NO: 16195 - DNA, 203 bp, Artificial sequence
  synthetic
ggcgcgccagtcctacgtaccggctctgacatcgtcaattcctttaacatcgtcaattcctttaacatcgtcaattcctttaacatcgtcaattcctttaacatttctgacatttctgacatttctgacatttctgacatttctgacatttctgacatcgtcaattcctttaacatttctgacatttccgactcggaccgatg

SEQ ID NO: 16196 - DNA, 203 bp, Artificial sequence
  synthetic
ggcgcgccagtcctaccgtccggctctgacatcgtcaattcctttaacatcgtcaattcctttaacatcgtcaattcctttaacatttctgacatttctgacatcgtcaattcctttaacatcgtcaattcctttaacatcgtcaattcctttaacatttctgacatttctgacatttctgacatttccgactcggaccgatg

SEQ ID NO: 16197 - DNA, 203 bp, Artificial sequence
  synthetic
ggcgcgccagtcctaacaaccggctctgacatcgtcaattcctttaacatcgtcaattcctttaacatcgtcaattcctttaacatttctgacatttctgacatcgtcaattcctttaacatcgtcaattcctttaacatttctgacatttctgacatcgtcaattcctttaacatttctgacatttccgactcggaccgatg

SEQ ID NO: 16198 - DNA, 203 bp, Artificial sequence
  synthetic
ggcgcgccagtcctcgccggcacttctgacatcgtcaattcctttaacatcgtcaattcctttaacatcgtcaattcctttaacatttctgacatttctgacatcgtcaattcctttaacatcgtcaattcctttaacatttctgacatttctgacatttctgacatttctgacatttctgacatttccgactcggaccgatg

SEQ ID NO: 16199 - DNA, 203 bp, Artificial sequence
  synthetic
ggcgcgccagtcctgaagccggcttctgacatcgtcaattcctttaacatcgtcaattcctttaacatcgtcaattcctttaacatttctgacatttctgacatcgtcaattcctttaacatttctgacatttctgacatttctgacatttctgacatttctgacatttctgacatttctgacatttccgactcggaccgatg

SEQ ID NO: 16200 - DNA, 203 bp, Artificial sequence
  synthetic
ggcgcgccagtcctttcgagcgggtctgacatcgtcaattcctttaacatcgtcaattcctttaacatcgtcaattcctttaacatttctgacatttctgacatttctgacatttctgacatttctgacatttctgacatcgtcaattcctttaacatttctgacatttctgacatttctgacatttccgactcggaccgatg

SEQ ID NO: 16201 - DNA, 203 bp, Artificial sequence
  synthetic
ggcgcgccagtcctatcgagctgttctgacatcgtcaattcctttaacatcgtcaattcctttaacatttctgacatttctgacatcgtcaattcctttaacatcgtcaattcctttaacatttctgacatttctgacatcgtcaattcctttaacatcgtcaattcctttaacatttctgacatttccgactcggaccgatg

SEQ ID NO: 16202 - DNA, 203 bp, Artificial sequence
  synthetic
ggcgcgccagtcctttcgagcttatctgacatcgtcaattcctttaacatcgtcaattcctttaacatttctgacatttctgacatcgtcaattcctttaacatcgtcaattcctttaacatttctgacatttctgacatcgtcaattcctttaacatttctgacatttctgacatttctgacatttccgactcggaccgatg

SEQ ID NO: 16203 - DNA, 203 bp, Artificial sequence
  synthetic
ggcgcgccagtccttatcgagctctctgacatcgtcaattcctttaacatcgtcaattcctttaacatttctgacatttctgacatcgtcaattcctttaacatcgtcaattcctttaacatttctgacatttctgacatttctgacatttctgacatcgtcaattcctttaacatttctgacatttccgactcggaccgatg

SEQ ID NO: 16204 - DNA, 203 bp, Artificial sequence
  synthetic
ggcgcgccagtcctaagctcgacgtctgacatcgtcaattcctttaacatcgtcaattcctttaacatttctgacatttctgacatcgtcaattcctttaacatttctgacatttctgacatcgtcaattcctttaacatttctgacatttctgacatttctgacatttctgacatttctgacatttccgactcggaccgatg

SEQ ID NO: 16205 - DNA, 203 bp, Artificial sequence
  synthetic
ggcgcgccagtcctggctcgaccatctgacatcgtcaattcctttaacatcgtcaattcctttaacatttctgacatttctgacatcgtcaattcctttaacatttctgacatttctgacatttctgacatttctgacatcgtcaattcctttaacatcgtcaattcctttaacatttctgacatttccgactcggaccgatg

SEQ ID NO: 16206 - DNA, 203 bp, Artificial sequence
  synthetic
ggcgcgccagtcctgagacgctgctctgacatcgtcaattcctttaacatcgtcaattcctttaacatttctgacatttctgacatttctgacatttctgacatttctgacatttctgacatcgtcaattcctttaacatttctgacatttctgacatcgtcaattcctttaacatttctgacatttccgactcggaccgatg

SEQ ID NO: 16207 - DNA, 203 bp, Artificial sequence
  synthetic
ggcgcgccagtcctatagcgtctatctgacatcgtcaattcctttaacatcgtcaattcctttaacatttctgacatttctgacatttctgacatttctgacatttctgacatttctgacatttctgacatttctgacatcgtcaattcctttaacatttctgacatttctgacatttctgacatttccgactcggaccgatg

SEQ ID NO: 16208 - DNA, 203 bp, Artificial sequence
  synthetic
ggcgcgccagtccttgcgtctaagtctgacatcgtcaattcctttaacatcgtcaattcctttaacatttctgacatttctgacatttctgacatttctgacatttctgacatttctgacatttctgacatttctgacatttctgacatttctgacatcgtcaattcctttaacatttctgacatttccgactcggaccgatg

SEQ ID NO: 16209 - DNA, 203 bp, Artificial sequence
  synthetic
ggcgcgccagtcctcgggcgtctttctgacatcgtcaattcctttaacatttctgacatttctgacatcgtcaattcctttaacatcgtcaattcctttaacatcgtcaattcctttaacatttctgacatttctgacatcgtcaattcctttaacatttctgacatttctgacatttctgacatttccgactcggaccgatg

SEQ ID NO: 16210 - DNA, 203 bp, Artificial sequence
  synthetic
ggcgcgccagtcctgcgtctttaatctgacatcgtcaattcctttaacatttctgacatttctgacatcgtcaattcctttaacatcgtcaattcctttaacatcgtcaattcctttaacatttctgacatttctgacatttctgacatttctgacatttctgacatttctgacatttctgacatttccgactcggaccgatg

SEQ ID NO: 16211 - DNA, 203 bp, Artificial sequence
  synthetic
ggcgcgccagtcctacaggcaaaatctgacatcgtcaattcctttaacatttctgacatttctgacatcgtcaattcctttaacatcgtcaattcctttaacatttctgacatttctgacatcgtcaattcctttaacatcgtcaattcctttaacatttctgacatttctgacatttctgacatttccgactcggaccgatg

SEQ ID NO: 16212 - DNA, 203 bp, Artificial sequence
  synthetic
ggcgcgccagtcctaccgatcggatctgacatcgtcaattcctttaacatttctgacatttctgacatcgtcaattcctttaacatcgtcaattcctttaacatttctgacatttctgacatttctgacatttctgacatcgtcaattcctttaacatttctgacatttctgacatttctgacatttccgactcggaccgatg

SEQ ID NO: 16213 - DNA, 203 bp, Artificial sequence
  synthetic
ggcgcgccagtcctacatgtcggatctgacatcgtcaattcctttaacatttctgacatttctgacatcgtcaattcctttaacatcgtcaattcctttaacatttctgacatttctgacatttctgacatttctgacatttctgacatttctgacatcgtcaattcctttaacatttctgacatttccgactcggaccgatg

SEQ ID NO: 16214 - DNA, 203 bp, Artificial sequence
  synthetic
ggcgcgccagtcctcctactcggatctgacatcgtcaattcctttaacatttctgacatttctgacatcgtcaattcctttaacatttctgacatttctgacatcgtcaattcctttaacatcgtcaattcctttaacatcgtcaattcctttaacatcgtcaattcctttaacatttctgacatttccgactcggaccgatg

SEQ ID NO: 16215 - DNA, 203 bp, Artificial sequence
  synthetic
ggcgcgccagtcctcgatctcggatctgacatcgtcaattcctttaacatttctgacatttctgacatcgtcaattcctttaacatttctgacatttctgacatcgtcaattcctttaacatcgtcaattcctttaacatttctgacatttctgacatttctgacatttctgacatttctgacatttccgactcggaccgatg

SEQ ID NO: 16216 - DNA, 203 bp, Artificial sequence
  synthetic
ggcgcgccagtccttccgaatgcctctgacatcgtcaattcctttaacatttctgacatttctgacatcgtcaattcctttaacatttctgacatttctgacatcgtcaattcctttaacatttctgacatttctgacatcgtcaattcctttaacatttctgacatttctgacatttctgacatttccgactcggaccgatg

SEQ ID NO: 16217 - DNA, 203 bp, Artificial sequence
  synthetic
ggcgcgccagtcctgtagctcggatctgacatcgtcaattcctttaacatttctgacatttctgacatcgtcaattcctttaacatttctgacatttctgacatttctgacatttctgacatcgtcaattcctttaacatcgtcaattcctttaacatcgtcaattcctttaacatttctgacatttccgactcggaccgatg

SEQ ID NO: 16218 - DNA, 203 bp, Artificial sequence
  synthetic
ggcgcgccagtccttccgacgccctctgacatcgtcaattcctttaacatttctgacatttctgacatcgtcaattcctttaacatttctgacatttctgacatttctgacatttctgacatttctgacatttctgacatcgtcaattcctttaacatcgtcaattcctttaacatttctgacatttccgactcggaccgatg

SEQ ID NO: 16219 - DNA, 203 bp, Artificial sequence
  synthetic
ggcgcgccagtcctcgtcgccggatctgacatcgtcaattcctttaacatttctgacatttctgacatcgtcaattcctttaacatttctgacatttctgacatttctgacatttctgacatttctgacatttctgacatttctgacatttctgacatcgtcaattcctttaacatttctgacatttccgactcggaccgatg

SEQ ID NO: 16220 - DNA, 203 bp, Artificial sequence
  synthetic
ggcgcgccagtccttccggtctgatctgacatcgtcaattcctttaacatttctgacatttctgacatcgtcaattcctttaacatttctgacatttctgacatttctgacatttctgacatttctgacatttctgacatttctgacatttctgacatttctgacatttctgacatttctgacatttccgactcggaccgatg

SEQ ID NO: 16221 - DNA, 203 bp, Artificial sequence
  synthetic
ggcgcgccagtcctaagtgcgccctctgacatcgtcaattcctttaacatttctgacatttctgacatttctgacatttctgacatcgtcaattcctttaacatcgtcaattcctttaacatttctgacatttctgacatttctgacatttctgacatcgtcaattcctttaacatttctgacatttccgactcggaccgatg

SEQ ID NO: 16222 - DNA, 203 bp, Artificial sequence
  synthetic
ggcgcgccagtcctcgtagatagttctgacatcgtcaattcctttaacatttctgacatttctgacatttctgacatttctgacatcgtcaattcctttaacatttctgacatttctgacatcgtcaattcctttaacatcgtcaattcctttaacatttctgacatttctgacatttctgacatttccgactcggaccgatg

SEQ ID NO: 16223 - DNA, 203 bp, Artificial sequence
  synthetic
ggcgcgccagtccttaacaatctttctgacatcgtcaattcctttaacatttctgacatttctgacatttctgacatttctgacatcgtcaattcctttaacatttctgacatttctgacatcgtcaattcctttaacatttctgacatttctgacatcgtcaattcctttaacatttctgacatttccgactcggaccgatg

SEQ ID NO: 16224 - DNA, 203 bp, Artificial sequence
  synthetic
ggcgcgccagtcctctaacaatcgtctgacatcgtcaattcctttaacatttctgacatttctgacatttctgacatttctgacatcgtcaattcctttaacatttctgacatttctgacatttctgacatttctgacatcgtcaattcctttaacatcgtcaattcctttaacatttctgacatttccgactcggaccgatg

SEQ ID NO: 16225 - DNA, 203 bp, Artificial sequence
  synthetic
ggcgcgccagtcctccttgtgggttctgacatcgtcaattcctttaacatttctgacatttctgacatttctgacatttctgacatcgtcaattcctttaacatttctgacatttctgacatttctgacatttctgacatttctgacatttctgacatcgtcaattcctttaacatttctgacatttccgactcggaccgatg

SEQ ID NO: 16226 - DNA, 203 bp, Artificial sequence
  synthetic
ggcgcgccagtccttaacccacattctgacatcgtcaattcctttaacatttctgacatttctgacatttctgacatttctgacatttctgacatttctgacatcgtcaattcctttaacatcgtcaattcctttaacatcgtcaattcctttaacatttctgacatttctgacatttctgacatttccgactcggaccgatg

SEQ ID NO: 16227 - DNA, 203 bp, Artificial sequence
  synthetic
ggcgcgccagtcctttgttgccgttctgacatcgtcaattcctttaacatttctgacatttctgacatttctgacatttctgacatttctgacatttctgacatcgtcaattcctttaacatttctgacatttctgacatcgtcaattcctttaacatcgtcaattcctttaacatttctgacatttccgactcggaccgatg

SEQ ID NO: 16228 - DNA, 203 bp, Artificial sequence
  synthetic
ggcgcgccagtccttacggctccctctgacatcgtcaattcctttaacatttctgacatttctgacatttctgacatttctgacatttctgacatttctgacatttctgacatttctgacatcgtcaattcctttaacatcgtcaattcctttaacatcgtcaattcctttaacatttctgacatttccgactcggaccgatg

SEQ ID NO: 16229 - DNA, 203 bp, Artificial sequence
  synthetic
ggcgcgccagtcctccgaggccgttctgacatcgtcaattcctttaacatttctgacatttctgacatttctgacatttctgacatttctgacatttctgacatttctgacatttctgacatcgtcaattcctttaacatttctgacatttctgacatcgtcaattcctttaacatttctgacatttccgactcggaccgatg

SEQ ID NO: 16230 - DNA, 203 bp, Artificial sequence
  synthetic
ggcgcgccagtcctggccacggcttctgacatcgtcaattcctttaacatttctgacatttctgacatttctgacatttctgacatttctgacatttctgacatttctgacatttctgacatcgtcaattcctttaacatttctgacatttctgacatttctgacatttctgacatttctgacatttccgactcggaccgatg

SEQ ID NO: 16231 - DNA, 203 bp, Artificial sequence
  synthetic
ggcgcgccagtcctttggccgtattctgacatcgtcaattcctttaacatttctgacatttctgacatttctgacatttctgacatttctgacatttctgacatttctgacatttctgacatttctgacatttctgacatttctgacatttctgacatttctgacatttctgacatttctgacatttccgactcggaccgatg

SEQ ID NO: 16232 - DNA, 203 bp, Artificial sequence
  synthetic
ggcgcgccagtccttggacggcagtctgacattactcccatttctgacattactcccatttctgacattactcccatttctgacattactcccatttctgacattactcccatttctgacattactcccatttctgacattactcccatttctgacattactcccatttctgacattactcccatttccgactcggaccgatg

SEQ ID NO: 16233 - DNA, 203 bp, Artificial sequence
  synthetic
ggcgcgccagtcctaggtacggcatctgacattactcccatttctgacatttctgacatttctgacatttctgacatttctgacatttctgacatttctgacatttctgacatttctgacatttctgacatttctgacatttctgacatttctgacatttctgacatttctgacatttcaccggccgtcgactcggaccgatg

SEQ ID NO: 16234 - DNA, 203 bp, Artificial sequence
  synthetic
ggcgcgccagtcctatgccgtcgttctgacattactcccatttctgacatttctgacatttctgacatttctgacatttctgacatttctgacatttctgacatttctgacatttctgacatttctgacatttctgacatttctgacatttctgacatttctgacatttctgacatttcccggcgggtcgactcggaccgatg

SEQ ID NO: 16235 - DNA, 203 bp, Artificial sequence
  synthetic
ggcgcgccagtcctgccgtacacttctgacatttcaccggccgttgacatttctgacatttctgacatttctgacatttctgacatttctgacatttctgacatttctgacatttctgacatttctgacatttctgacatttctgacatttctgacatttctgacatttctgacattttcttggcaaacgactcggaccgatg

SEQ ID NO: 16236 - DNA, 203 bp, Artificial sequence
  synthetic
ggcgcgccagtcctctacagccgttctgacatttcacggaatcgagaaatttctgacatttctgacatttctgacatttctgacatttctgacatttctgacatttctgacatttctgacatttctgacatttctgacatttctgacatttctgacatttctgacatttctgacatttctgtactccccgactcggaccgatg

SEQ ID NO: 16237 - DNA, 203 bp, Artificial sequence
  synthetic
ggcgcgccagtcctgccgtagatatctgacatttcacggaatcgagaaatttctgacatttctgacatttctgacatttctgacatttctgacatttctgacatttctgacatttctgacatttctgacatttctgacatttctgacatttctgacatttctgacatttctgaccacggaatcgagaacgactcggaccgatg

SEQ ID NO: 16238 - DNA, 203 bp, Artificial sequence
  synthetic
ggcgcgccagtcctaacggcacgatctgacatttcccggcgggttgacatttctgacatttctgacatttctgacatttctgacatttctgacatttctgacatttctgacatttctgacatttctgacatttctgacatttctgacatttctgacatttctgacatttctgacattttcttggcaaacgactcggaccgatg

SEQ ID NO: 16239 - DNA, 203 bp, Artificial sequence
  synthetic
ggcgcgccagtcctagagaacggctctgacatttctgacaccggccgtatttctgacatttctgacatttctgacatttctgacatttctgacatttctgacatttctgacatttctgacatttctgacatttctgacatttctgacatttctgacatttctgacatttctgacatttctgtactccccgactcggaccgatg

SEQ ID NO: 16240 - DNA, 203 bp, Artificial sequence
  synthetic
ggcgcgccagtccttagaaacggctctgacatttctgacatcacggaatcgagaaacatttctgacatttctgacatttctgacatttctgacatttctgacatttctgacatttctgacatttctgacatttctgacatttctgacatttctgacatttctgacatttctgacatttctgacatttccgactcggaccgatg

SEQ ID NO: 16241 - DNA, 203 bp, Artificial sequence
  synthetic
ggcgcgccagtcctagaggccgtgtctgacatttctgacatcacggaatcgagaaacatttctgacatttctgacatttctgacatttctgacatttctgacatttctgacatttctgacatttctgacatttctgacatttctgacatttctgacatttctgacatttctgacatttctgtactccccgactcggaccgatg

SEQ ID NO: 16242 - DNA, 203 bp, Artificial sequence
  synthetic
ggcgcgccagtcctgccgtgttgttctgacatttctgacatcgtcaattcctttaacatttctgacatttctgacatttctgacatttctgacatttctgacatttctgacatttctgacatttctgacatttctgacatttctgacatttctgacatttctgacatttctgacatttctgacatttccgactcggaccgatg

SEQ ID NO: 16243 - DNA, 203 bp, Artificial sequence
  synthetic
ggcgcgccagtcctggccgtgtcatctgacatttctgacatcgtcaattcctttaacatttctgacatttctgacatttctgacatttctgacatttctgacatttctgacatttctgacatttctgacatttctgacatttctgacatttctgacatttctgacatttctgacatttctgtactccccgactcggaccgatg

SEQ ID NO: 16244 - DNA, 203 bp, Artificial sequence
  synthetic
ggcgcgccagtcctagtgccgttttctgacatttctgacatcgtcaattcctttaacatttctgacatttctgacatttctgacatttctgacatttctgacatttctgacatttctgacatttctgacatttctgacatttctgacatttctgacatttctgacatttctgaccacggaatcgagaacgactcggaccgatg

SEQ ID NO: 16245 - DNA, 203 bp, Artificial sequence
  synthetic
ggcgcgccagtcctgtaacggcggtctgacatttctgacatcgtcaattcctttaacatttctgacatttctgacatttctgacatttctgacatttctgacatttctgacatttctgacatttctgacatttctgacatttctgacatttctgacatttctgacatttctgaccgtcaattcctttacgactcggaccgatg

SEQ ID NO: 16246 - DNA, 203 bp, Artificial sequence
  synthetic
ggcgcgccagtcctgattgccgtatctgacatttctgacattactcccatttctgacatttctgacatttctgacatttctgacatttctgacatttctgacatttctgacatttctgacatttctgacatttctgacatttctgacatttctgacatttctgacatttctgacatttctgacatttccgactcggaccgatg

SEQ ID NO: 16247 - DNA, 203 bp, Artificial sequence
  synthetic
ggcgcgccagtcctcaaggacggctctgacatttctgacattccggcgggttctgacatttctgacatttctgacatttctgacatttctgacatttctgacatttctgacatttctgacatttctgacatttctgacatttctgacatttctgacatttctgacatttctgacattttcttggcaaacgactcggaccgatg

SEQ ID NO: 16248 - DNA, 203 bp, Artificial sequence
  synthetic
ggcgcgccagtcctcgctgacggctctgacatttctgacatttcaccggccgttgacatttctgacatttctgacatttctgacatttctgacatttctgacatttctgacatttctgacatttctgacatttctgacatttctgacatttctgacatttctgacatttctgacatttcaccggccgtcgactcggaccgatg

SEQ ID NO: 16249 - DNA, 203 bp, Artificial sequence
  synthetic
ggcgcgccagtcctcttgccgtactctgacatttctgacatttccacggaatcgagaatttctgacatttctgacatttctgacatttctgacatttctgacatttctgacatttctgacatttctgacatttctgacatttctgacatttctgacatttctgacatttctgacattttcttggcaaacgactcggaccgatg

SEQ ID NO: 16250 - DNA, 203 bp, Artificial sequence
  synthetic
ggcgcgccagtcctctcacacggctctgacatttctgacatttcccggcgggttgacatttctgacatttctgacatttctgacatttctgacatttctgacatttctgacatttctgacatttctgacatttctgacatttctgacatttctgacatttctgacatttctgacatttcccggcgggtcgactcggaccgatg

SEQ ID NO: 16251 - DNA, 203 bp, Artificial sequence
  synthetic
ggcgcgccagtcctcaacggctgttctgacatttctgacatttccgtcaattcctttatttctgacatttctgacatttctgacatttctgacatttctgacatttctgacatttctgacatttctgacatttctgacatttctgacatttctgacatttctgacatttctgacattttcttggcaaacgactcggaccgatg

SEQ ID NO: 16252 - DNA, 203 bp, Artificial sequence
  synthetic
ggcgcgccagtccttcacggcaaatctgacatttctgacatttctcggaactacgacggtatctgatcgtcttcgaacctccgactttcgttcttgattaatgaaaacattcttggcaaatgctttcgctctggtccgtcttgcgccggtccaagaatttcacctctagcggcgcaatacgaattttccgactcggaccgatg

SEQ ID NO: 16253 - DNA, 203 bp, Artificial sequence
  synthetic
ggcgcgccagtccttgcacggcgttctgacatttctgacatttctgaaagtttcagctttgcaaccatactccccccggaacccaaagactttggtttcccggaagctgcccggcgggtcatgggaataacgccgccgcatcgccggtcggcatcgtttatggtcggaactacgacggtatacatttccgactcggaccgatg

SEQ ID NO: 16254 - DNA, 203 bp, Artificial sequence
  synthetic
ggcgcgccagtcctcctgaacggctctgacatttctgacatttctgacaaccggccgttttctgacatttctgacatttctgacatttctgacatttctgacatttctgacatttctgacatttctgacatttctgacatttctgacatttctgacatttctgacatttctgacattttcttggcaaacgactcggaccgatg

SEQ ID NO: 16255 - DNA, 203 bp, Artificial sequence
  synthetic
ggcgcgccagtcctctgtgccgtgtctgacatttctgacatttctgacaactacgacggtatctgatcgtcttcgaacctccgactttcgttcttgattaatgaaaacattcttggcaaatgctttcgctctggtccgtcttgcgccggtccaagaatttcacctctagcggcgcaatacgacatttccgactcggaccgatg

SEQ ID NO: 16256 - DNA, 203 bp, Artificial sequence
  synthetic
ggcgcgccagtcctcgtggccgtttctgacatttctgacatttctgacaagaggagcgagcgaccaaaggaaccataactgatttaatgagccattcgcagtttcactgtaccggccgtgcgtactcagacatgcatggcttaatctttgagacaagcatatgctactggcaggatcaatgacatttccgactcggaccgatg

SEQ ID NO: 16257 - DNA, 203 bp, Artificial sequence
  synthetic
ggcgcgccagtcctgccgtatgtttctgacatttctgacatttctgacaccggcgggttttctgacatttctgacatttctgacatttctgacatttctgacatttctgacatttctgacatttctgacatttctgacatttctgacatttctgacatttctgacatttctgacattttcttggcaaacgactcggaccgatg

SEQ ID NO: 16258 - DNA, 203 bp, Artificial sequence
  synthetic
ggcgcgccagtcctagacggcgtctctgacatttctgacatttctgacagtttcagctttgcaaccatactccccccggaacccaaagactttggtttcccggaagctgcccggcgggtcatgggaataacgccgccgcatcgccggtcggcatcgtttatggtcggaactacgacggttgacatttccgactcggaccgatg

SEQ ID NO: 16259 - DNA, 203 bp, Artificial sequence
  synthetic
ggcgcgccagtcctatacggctggtctgacatttctgacatttctgacataccggccgtttctgacataccggccgtttctgacataccggccgtttctgacataccggccgtttctgacataccggccgtttctgacatttctgacatttctgacatttctgacatttctgacataccggccgtttccgactcggaccgatg

SEQ ID NO: 16260 - DNA, 203 bp, Artificial sequence
  synthetic
ggcgcgccagtccttgccgtaggctctgacatttctgacatttctgacataccggccgtttctgacataccggccgtttctgacataccggccgtttctgacataccggccgtttctgacatttctgacatttctgacataccggccgtttctgacataccggccgtttctgacataccggccgtttccgactcggaccgatg

SEQ ID NO: 16261 - DNA, 203 bp, Artificial sequence
  synthetic
ggcgcgccagtccttacggctaaatctgacatttctgacatttctgacataccggccgtttctgacataccggccgtttctgacataccggccgtttctgacataccggccgtttctgacatttctgacatttctgacataccggccgtttctgacataccggccgtttctgacatttctgacatttccgactcggaccgatg

SEQ ID NO: 16262 - DNA, 203 bp, Artificial sequence
  synthetic
ggcgcgccagtccttaacggcccatctgacatttctgacatttctgacataccggccgtttctgacataccggccgtttctgacataccggccgtttctgacataccggccgtttctgacatttctgacatttctgacatttctgacatttctgacatttctgacatttctgacatttctgacatttccgactcggaccgatg

SEQ ID NO: 16263 - DNA, 203 bp, Artificial sequence
  synthetic
ggcgcgccagtcctgcttagccgttctgacatttctgacatttctgacataccggccgtttctgacataccggccgtttctgacataccggccgtttctgacatttctgacatttctgacataccggccgtttctgacataccggccgtttctgacataccggccgtttctgacataccggccgtttccgactcggaccgatg

SEQ ID NO: 16264 - DNA, 203 bp, Artificial sequence
  synthetic
ggcgcgccagtcctctacggcatttctgacatttctgacatttctgacataccggccgtttctgacataccggccgtttctgacataccggccgtttctgacatttctgacatttctgacataccggccgtttctgacataccggccgtttctgacataccggccgtttctgacatttctgacatttccgactcggaccgatg

SEQ ID NO: 16265 - DNA, 203 bp, Artificial sequence
  synthetic
ggcgcgccagtcctgccgtgaacctctgacatttctgacatttctgacataccggccgtttctgacataccggccgtttctgacataccggccgtttctgacatttctgacatttctgacataccggccgtttctgacatttctgacatttctgacataccggccgtttctgacataccggccgtttccgactcggaccgatg

SEQ ID NO: 16266 - DNA, 203 bp, Artificial sequence
  synthetic
ggcgcgccagtcctgcagacggcgtctgacatttctgacatttctgacataccggccgtttctgacataccggccgtttctgacataccggccgtttctgacatttctgacatttctgacataccggccgtttctgacatttctgacatttctgacatttctgacatttctgacatttctgacatttccgactcggaccgatg

SEQ ID NO: 16267 - DNA, 203 bp, Artificial sequence
  synthetic
ggcgcgccagtcctcgtgacggcgtctgacatttctgacatttctgacataccggccgtttctgacataccggccgtttctgacataccggccgtttctgacatttctgacatttctgacatttctgacatttctgacataccggccgtttctgacataccggccgtttctgacataccggccgtttccgactcggaccgatg

SEQ ID NO: 16268 - DNA, 203 bp, Artificial sequence
  synthetic
ggcgcgccagtcctatatgccgtttctgacatttctgacatttctgacataccggccgtttctgacataccggccgtttctgacataccggccgtttctgacatttctgacatttctgacatttctgacatttctgacataccggccgtttctgacatttctgacatttctgacataccggccgtttccgactcggaccgatg

SEQ ID NO: 16269 - DNA, 203 bp, Artificial sequence
  synthetic
ggcgcgccagtcctacggcacacctctgacatttctgacatttctgacataccggccgtttctgacataccggccgtttctgacataccggccgtttctgacatttctgacatttctgacatttctgacatttctgacataccggccgtttctgacatttctgacatttctgacatttctgacatttccgactcggaccgatg

SEQ ID NO: 16270 - DNA, 203 bp, Artificial sequence
  synthetic
ggcgcgccagtcctcccttgccgttctgacatttctgacatttctgacataccggccgtttctgacataccggccgtttctgacataccggccgtttctgacatttctgacatttctgacatttctgacatttctgacatttctgacatttctgacatttctgacatttctgacataccggccgtttccgactcggaccgatg

SEQ ID NO: 16271 - DNA, 203 bp, Artificial sequence
  synthetic
ggcgcgccagtcctcgccgtgctatctgacatttctgacatttctgacataccggccgtttctgacataccggccgtttctgacatttctgacatttctgacataccggccgtttctgacataccggccgtttctgacataccggccgtttctgacataccggccgtttctgacataccggccgtttccgactcggaccgatg

SEQ ID NO: 16272 - DNA, 203 bp, Artificial sequence
  synthetic
ggcgcgccagtcctcaggtgggtctctgacatttctgacatttctgacataccggccgtttctgacataccggccgtttctgacatttctgacatttctgacataccggccgtttctgacataccggccgtttctgacataccggccgtttctgacataccggccgtttctgacatttctgacatttccgactcggaccgatg

SEQ ID NO: 16273 - DNA, 203 bp, Artificial sequence
  synthetic
ggcgcgccagtcctatggtgggcctctgacatttctgacatttctgacataccggccgtttctgacataccggccgtttctgacatttctgacatttctgacataccggccgtttctgacataccggccgtttctgacataccggccgtttctgacatttctgacatttctgacatttctgacatttccgactcggaccgatg

SEQ ID NO: 16274 - DNA, 203 bp, Artificial sequence
  synthetic
ggcgcgccagtcctcttggtgggctctgacatttctgacatttctgacataccggccgtttctgacataccggccgtttctgacatttctgacatttctgacataccggccgtttctgacataccggccgtttctgacatttctgacatttctgacatttctgacatttctgacataccggccgtttccgactcggaccgatg

SEQ ID NO: 16275 - DNA, 203 bp, Artificial sequence
  synthetic
ggcgcgccagtcctgttagggccgtctgacatttctgacatttctgacataccggccgtttctgacataccggccgtttctgacatttctgacatttctgacataccggccgtttctgacatttctgacatttctgacatttctgacatttctgacatttctgacatttctgacataccggccgtttccgactcggaccgatg

SEQ ID NO: 16276 - DNA, 203 bp, Artificial sequence
  synthetic
ggcgcgccagtcctttgccctaagtctgacatttctgacatttctgacataccggccgtttctgacataccggccgtttctgacatttctgacatttctgacataccggccgtttctgacatttctgacatttctgacatttctgacatttctgacatttctgacatttctgacatttctgacatttccgactcggaccgatg

SEQ ID NO: 16277 - DNA, 203 bp, Artificial sequence
  synthetic
ggcgcgccagtcctgccctaatcatctgacatttctgacatttctgacataccggccgtttctgacataccggccgtttctgacatttctgacatttctgacatttctgacatttctgacataccggccgtttctgacataccggccgtttctgacataccggccgtttctgacatttctgacatttccgactcggaccgatg

SEQ ID NO: 16278 - DNA, 203 bp, Artificial sequence
  synthetic
ggcgcgccagtcctttgttagggctctgacatttctgacatttctgacataccggccgtttctgacataccggccgtttctgacatttctgacatttctgacatttctgacatttctgacataccggccgtttctgacataccggccgtttctgacatttctgacatttctgacatttctgacatttccgactcggaccgatg

SEQ ID NO: 16279 - DNA, 203 bp, Artificial sequence
  synthetic
ggcgcgccagtcctagtatcccggtctgacatttctgacatttctgacataccggccgtttctgacataccggccgtttctgacatttctgacatttctgacatttctgacatttctgacataccggccgtttctgacatttctgacatttctgacataccggccgtttctgacatttctgacatttccgactcggaccgatg

SEQ ID NO: 16280 - DNA, 203 bp, Artificial sequence
  synthetic
ggcgcgccagtcctctttgcccggtctgacatttctgacatttctgacataccggccgtttctgacataccggccgtttctgacatttctgacatttctgacatttctgacatttctgacataccggccgtttctgacatttctgacatttctgacatttctgacatttctgacataccggccgtttccgactcggaccgatg

SEQ ID NO: 16281 - DNA, 203 bp, Artificial sequence
  synthetic
ggcgcgccagtcctttgggcccggtctgacatttctgacatttctgacataccggccgtttctgacataccggccgtttctgacatttctgacatttctgacatttctgacatttctgacatttctgacatttctgacataccggccgtttctgacataccggccgtttctgacataccggccgtttccgactcggaccgatg

SEQ ID NO: 16282 - DNA, 203 bp, Artificial sequence
  synthetic
ggcgcgccagtcctaagcgcgctgtctgacatttctgacatttctgacataccggccgtttctgacataccggccgtttctgacatttctgacatttctgacatttctgacatttctgacatttctgacatttctgacatttctgacatttctgacataccggccgtttctgacatttctgacatttccgactcggaccgatg

SEQ ID NO: 16283 - DNA, 203 bp, Artificial sequence
  synthetic
ggcgcgccagtcctagaggcgcgctctgacatttctgacatttctgacataccggccgtttctgacataccggccgtttctgacatttctgacatttctgacatttctgacatttctgacatttctgacatttctgacatttctgacatttctgacatttctgacatttctgacataccggccgtttccgactcggaccgatg

SEQ ID NO: 16284 - DNA, 203 bp, Artificial sequence
  synthetic
ggcgcgccagtcctcaactgactctctgacatttctgacatttctgacataccggccgtttctgacataccggccgtttctgacatttctgacatttctgacatttctgacatttctgacatttctgacatttctgacatttctgacatttctgacatttctgacatttctgacatttctgacatttccgactcggaccgatg

SEQ ID NO: 16285 - DNA, 203 bp, Artificial sequence
  synthetic
ggcgcgccagtcctcatgagtcagtctgacatttctgacatttctgacataccggccgtttctgacatttctgacatttctgacataccggccgtttctgacataccggccgtttctgacataccggccgtttctgacataccggccgtttctgacataccggccgtttctgacataccggccgtttccgactcggaccgatg

SEQ ID NO: 16286 - DNA, 203 bp, Artificial sequence
  synthetic
ggcgcgccagtcctgagtcatggatctgacatttctgacatttctgacataccggccgtttctgacatttctgacatttctgacataccggccgtttctgacataccggccgtttctgacataccggccgtttctgacataccggccgtttctgacataccggccgtttctgacatttctgacatttccgactcggaccgatg

SEQ ID NO: 16287 - DNA, 203 bp, Artificial sequence
  synthetic
ggcgcgccagtcctatctgactcgtctgacatttctgacatttctgacataccggccgtttctgacatttctgacatttctgacataccggccgtttctgacataccggccgtttctgacataccggccgtttctgacataccggccgtttctgacatttctgacatttctgacataccggccgtttccgactcggaccgatg

SEQ ID NO: 16288 - DNA, 203 bp, Artificial sequence
  synthetic
ggcgcgccagtccttgactcaagatctgacatttctgacatttctgacataccggccgtttctgacatttctgacatttctgacataccggccgtttctgacataccggccgtttctgacataccggccgtttctgacatttctgacatttctgacataccggccgtttctgacataccggccgtttccgactcggaccgatg

SEQ ID NO: 16289 - DNA, 203 bp, Artificial sequence
  synthetic
ggcgcgccagtcctggagtcatattctgacatttctgacatttctgacataccggccgtttctgacatttctgacatttctgacataccggccgtttctgacataccggccgtttctgacataccggccgtttctgacatttctgacatttctgacatttctgacatttctgacataccggccgtttccgactcggaccgatg

SEQ ID NO: 16290 - DNA, 203 bp, Artificial sequence
  synthetic
ggcgcgccagtccttgactcactttctgacatttctgacatttctgacataccggccgtttctgacatttctgacatttctgacataccggccgtttctgacataccggccgtttctgacatttctgacatttctgacataccggccgtttctgacataccggccgtttctgacatttctgacatttccgactcggaccgatg

SEQ ID NO: 16291 - DNA, 203 bp, Artificial sequence
  synthetic
ggcgcgccagtcctgagtcagcactctgacatttctgacatttctgacataccggccgtttctgacatttctgacatttctgacataccggccgtttctgacataccggccgtttctgacatttctgacatttctgacataccggccgtttctgacatttctgacatttctgacataccggccgtttccgactcggaccgatg

SEQ ID NO: 16292 - DNA, 203 bp, Artificial sequence
  synthetic
ggcgcgccagtcctagagtcagtttctgacatttctgacatttctgacataccggccgtttctgacatttctgacatttctgacataccggccgtttctgacataccggccgtttctgacatttctgacatttctgacatttctgacatttctgacataccggccgtttctgacataccggccgtttccgactcggaccgatg

SEQ ID NO: 16293 - DNA, 203 bp, Artificial sequence
  synthetic
ggcgcgccagtccttgcgagtcagtctgacatttctgacatttctgacataccggccgtttctgacatttctgacatttctgacataccggccgtttctgacataccggccgtttctgacatttctgacatttctgacatttctgacatttctgacataccggccgtttctgacatttctgacatttccgactcggaccgatg

SEQ ID NO: 16294 - DNA, 203 bp, Artificial sequence
  synthetic
ggcgcgccagtcctcgagtcagcgtctgacatttctgacatttctgacataccggccgtttctgacatttctgacatttctgacataccggccgtttctgacataccggccgtttctgacatttctgacatttctgacatttctgacatttctgacatttctgacatttctgacatttctgacatttccgactcggaccgatg

SEQ ID NO: 16295 - DNA, 203 bp, Artificial sequence
  synthetic
ggcgcgccagtcctccgagtcatttctgacatttctgacatttctgacataccggccgtttctgacatttctgacatttctgacataccggccgtttctgacatttctgacatttctgacataccggccgtttctgacataccggccgtttctgacataccggccgtttctgacatttctgacatttccgactcggaccgatg

SEQ ID NO: 16296 - DNA, 203 bp, Artificial sequence
  synthetic
ggcgcgccagtcctgcgtcgaaggtctgacatttctgacatttctgacataccggccgtttctgacatttctgacatttctgacataccggccgtttctgacatttctgacatttctgacataccggccgtttctgacataccggccgtttctgacatttctgacatttctgacatttctgacatttccgactcggaccgatg

SEQ ID NO: 16297 - DNA, 203 bp, Artificial sequence
  synthetic
ggcgcgccagtcctagctcgaagttctgacatttctgacatttctgacataccggccgtttctgacatttctgacatttctgacataccggccgtttctgacatttctgacatttctgacataccggccgtttctgacatttctgacatttctgacataccggccgtttctgacataccggccgtttccgactcggaccgatg

SEQ ID NO: 16298 - DNA, 203 bp, Artificial sequence
  synthetic
ggcgcgccagtcctctcgaaggtttctgacatttctgacatttctgacataccggccgtttctgacatttctgacatttctgacataccggccgtttctgacatttctgacatttctgacataccggccgtttctgacatttctgacatttctgacatttctgacatttctgacataccggccgtttccgactcggaccgatg

SEQ ID NO: 16299 - DNA, 203 bp, Artificial sequence
  synthetic
ggcgcgccagtcctccagtcgaagtctgacatttctgacatttctgacataccggccgtttctgacatttctgacatttctgacataccggccgtttctgacatttctgacatttctgacataccggccgtttctgacatttctgacatttctgacatttctgacatttctgacatttctgacatttccgactcggaccgatg

SEQ ID NO: 16300 - DNA, 203 bp, Artificial sequence
  synthetic
ggcgcgccagtcctcaatcgaaagtctgacatttctgacatttctgacataccggccgtttctgacatttctgacatttctgacatttctgacatttctgacataccggccgtttctgacataccggccgtttctgacatttctgacatttctgacataccggccgtttctgacatttctgacatttccgactcggaccgatg

SEQ ID NO: 16301 - DNA, 203 bp, Artificial sequence
  synthetic
ggcgcgccagtcctgtcgaaaatctctgacatttctgacatttctgacataccggccgtttctgacatttctgacatttctgacatttctgacatttctgacataccggccgtttctgacataccggccgtttctgacatttctgacatttctgacatttctgacatttctgacataccggccgtttccgactcggaccgatg

SEQ ID NO: 16302 - DNA, 203 bp, Artificial sequence
  synthetic
ggcgcgccagtccttcgaaaagcgtctgacatttctgacatttctgacataccggccgtttctgacatttctgacatttctgacatttctgacatttctgacataccggccgtttctgacataccggccgtttctgacatttctgacatttctgacatttctgacatttctgacatttctgacatttccgactcggaccgatg

SEQ ID NO: 16303 - DNA, 203 bp, Artificial sequence
  synthetic
ggcgcgccagtccttatcgaaatgtctgacatttctgacatttctgacataccggccgtttctgacatttctgacatttctgacatttctgacatttctgacataccggccgtttctgacatttctgacatttctgacataccggccgtttctgacataccggccgtttctgacatttctgacatttccgactcggaccgatg

SEQ ID NO: 16304 - DNA, 203 bp, Artificial sequence
  synthetic
ggcgcgccagtcctaatttcgatctctgacatttctgacatttctgacataccggccgtttctgacatttctgacatttctgacatttctgacatttctgacataccggccgtttctgacatttctgacatttctgacatttctgacatttctgacataccggccgtttctgacatttctgacatttccgactcggaccgatg

SEQ ID NO: 16305 - DNA, 203 bp, Artificial sequence
  synthetic
ggcgcgccagtcctatttcgattttctgacatttctgacatttctgacataccggccgtttctgacatttctgacatttctgacatttctgacatttctgacataccggccgtttctgacatttctgacatttctgacatttctgacatttctgacatttctgacatttctgacatttctgacatttccgactcggaccgatg

SEQ ID NO: 16306 - DNA, 203 bp, Artificial sequence
  synthetic
ggcgcgccagtcctgtacattctgtctgacatttctgacatttctgacataccggccgtttctgacatttctgacatttctgacatttctgacatttctgacatttctgacatttctgacataccggccgtttctgacataccggccgtttctgacatttctgacatttctgacataccggccgtttccgactcggaccgatg

SEQ ID NO: 16307 - DNA, 203 bp, Artificial sequence
  synthetic
ggcgcgccagtcctgcgccgtcactctgacatttctgacatttctgacataccggccgtttctgacatttctgacatttctgacatttctgacatttctgacatttctgacatttctgacataccggccgtttctgacatttctgacatttctgacataccggccgtttctgacatttctgacatttccgactcggaccgatg

SEQ ID NO: 16308 - DNA, 203 bp, Artificial sequence
  synthetic
ggcgcgccagtcctcggcgctctgtctgacatttctgacatttctgacatcacggaatcgagaaacatcacggaatcgagaaacatcacggaatcgagaaacatcacggaatcgagaaacatcacggaatcgagaaacatcacggaatcgagaaacatttctgacatttctgacatttctgacatttccgactcggaccgatg

SEQ ID NO: 16309 - DNA, 203 bp, Artificial sequence
  synthetic
ggcgcgccagtcctcagtcgcgagtctgacatttctgacatttctgacatcacggaatcgagaaacatcacggaatcgagaaacatcacggaatcgagaaacatttctgacatttctgacatcacggaatcgagaaacatcacggaatcgagaaacatttctgacatttctgacatttctgacatttccgactcggaccgatg

SEQ ID NO: 16310 - DNA, 203 bp, Artificial sequence
  synthetic
ggcgcgccagtccttcgcgacggctctgacatttctgacatttctgacatcacggaatcgagaaacatcacggaatcgagaaacatttctgacatttctgacatcacggaatcgagaaacatttctgacatttctgacatcacggaatcgagaaacatcacggaatcgagaaacatttctgacatttccgactcggaccgatg

SEQ ID NO: 16311 - DNA, 203 bp, Artificial sequence
  synthetic
ggcgcgccagtccttcgtgtaatctctgacatttctgacatttctgacatcacggaatcgagaaacatcacggaatcgagaaacatttctgacatttctgacatttctgacatttctgacatttctgacatttctgacatcacggaatcgagaaacatttctgacatttctgacatttctgacatttccgactcggaccgatg

SEQ ID NO: 16312 - DNA, 203 bp, Artificial sequence
  synthetic
ggcgcgccagtccttatccgaccatctgacatttctgacatttctgacatcacggaatcgagaaacatcacggaatcgagaaacatttctgacatttctgacatttctgacatttctgacatttctgacatttctgacatttctgacatttctgacatttctgacatttctgacatttctgacatttccgactcggaccgatg

SEQ ID NO: 16313 - DNA, 203 bp, Artificial sequence
  synthetic
ggcgcgccagtcctcgcggatacttctgacatttctgacatttctgacatcacggaatcgagaaacatttctgacatttctgacatcacggaatcgagaaacatcacggaatcgagaaacatcacggaatcgagaaacatttctgacatttctgacatcacggaatcgagaaacatttctgacatttccgactcggaccgatg

SEQ ID NO: 16314 - DNA, 203 bp, Artificial sequence
  synthetic
ggcgcgccagtccttatcggatactctgacatttctgacatttctgacatcacggaatcgagaaacatttctgacatttctgacatcacggaatcgagaaacatcacggaatcgagaaacatttctgacatttctgacatcacggaatcgagaaacatttctgacatttctgacatttctgacatttccgactcggaccgatg

SEQ ID NO: 16315 - DNA, 203 bp, Artificial sequence
  synthetic
ggcgcgccagtcctatccgcaagctctgacatttctgacatttctgacatcacggaatcgagaaacatttctgacatttctgacatcacggaatcgagaaacatcacggaatcgagaaacatttctgacatttctgacatttctgacatttctgacatcacggaatcgagaaacatttctgacatttccgactcggaccgatg

SEQ ID NO: 16316 - DNA, 203 bp, Artificial sequence
  synthetic
ggcgcgccagtcctccggattgagtctgacatttctgacatttctgacatcacggaatcgagaaacatttctgacatttctgacatttctgacatttctgacatcacggaatcgagaaacatcacggaatcgagaaacatttctgacatttctgacatttctgacatttctgacatttctgacatttccgactcggaccgatg

SEQ ID NO: 16317 - DNA, 203 bp, Artificial sequence
  synthetic
ggcgcgccagtcctcggatctgtatctgacatttctgacatttctgacatcacggaatcgagaaacatttctgacatttctgacatttctgacatttctgacatcacggaatcgagaaacatttctgacatttctgacatttctgacatttctgacatcacggaatcgagaaacatttctgacatttccgactcggaccgatg

SEQ ID NO: 16318 - DNA, 203 bp, Artificial sequence
  synthetic
ggcgcgccagtcctaaatccgggatctgacatttctgacatttctgacatcacggaatcgagaaacatttctgacatttctgacatttctgacatttctgacatcacggaatcgagaaacatttctgacatttctgacatttctgacatttctgacatttctgacatttctgacatttctgacatttccgactcggaccgatg

SEQ ID NO: 16319 - DNA, 203 bp, Artificial sequence
  synthetic
ggcgcgccagtcctatccggtggatctgacatttctgacatttctgacatcacggaatcgagaaacatttctgacatttctgacatttctgacatttctgacatttctgacatttctgacatttctgacatttctgacatcacggaatcgagaaacatttctgacatttctgacatttctgacatttccgactcggaccgatg

SEQ ID NO: 16320 - DNA, 203 bp, Artificial sequence
  synthetic
ggcgcgccagtccttcaggcggattctgacatttctgacatttctgacatccggcgggtttctgacatccggcgggtttctgacatccggcgggtttctgacatccggcgggtttctgacatccggcgggtttctgacatccggcgggtttctgacatccggcgggtttctgacatccggcgggtttccgactcggaccgatg

SEQ ID NO: 16321 - DNA, 203 bp, Artificial sequence
  synthetic
ggcgcgccagtcctcaatccgtcgtctgacatttctgacatttctgacatccggcgggtttctgacatccggcgggtttctgacatccggcgggtttctgacatccggcgggtttctgacatccggcgggtttctgacatccggcgggtttctgacatccggcgggtttctgacatccggcgggtttccgactcggaccgatg

SEQ ID NO: 16322 - DNA, 203 bp, Artificial sequence
  synthetic
ggcgcgccagtccttatccgattgtctgacatttctgacatttctgacatccggcgggtttctgacatccggcgggtttctgacatccggcgggtttctgacatccggcgggtttctgacatccggcgggtttctgacatccggcgggtttctgacatccggcgggtttctgacatccggcgggtttccgactcggaccgatg

SEQ ID NO: 16323 - DNA, 203 bp, Artificial sequence
  synthetic
ggcgcgccagtcctatccgttgcctctgacatttctgacatttctgacatccggcgggtttctgacatccggcgggtttctgacatccggcgggtttctgacatccggcgggtttctgacatccggcgggtttctgacatccggcgggtttctgacatccggcgggtttctgacatttctgacatttccgactcggaccgatg

SEQ ID NO: 16324 - DNA, 203 bp, Artificial sequence
  synthetic
ggcgcgccagtcctacaaatccggtctgacatttctgacatttctgacatccggcgggtttctgacatccggcgggtttctgacatccggcgggtttctgacatccggcgggtttctgacatccggcgggtttctgacatccggcgggtttctgacatttctgacatttctgacatccggcgggtttccgactcggaccgatg

SEQ ID NO: 16325 - DNA, 203 bp, Artificial sequence
  synthetic
ggcgcgccagtcctgatccgtatttctgacatttctgacatttctgacatccggcgggtttctgacatccggcgggtttctgacatccggcgggtttctgacatccggcgggtttctgacatccggcgggtttctgacatccggcgggtttctgacatttctgacatttctgacatttctgacatttccgactcggaccgatg

SEQ ID NO: 16326 - DNA, 203 bp, Artificial sequence
  synthetic
ggcgcgccagtcctgccggatacatctgacatttctgacatttctgacatccggcgggtttctgacatccggcgggtttctgacatccggcgggtttctgacatccggcgggtttctgacatccggcgggtttctgacatttctgacatttctgacatccggcgggtttctgacatccggcgggtttccgactcggaccgatg

SEQ ID NO: 16327 - DNA, 203 bp, Artificial sequence
  synthetic
ggcgcgccagtcctaacggtctgttctgacatttctgacatttctgacatccggcgggtttctgacatccggcgggtttctgacatccggcgggtttctgacatccggcgggtttctgacatttctgacatttctgacatttctgacatttctgacatccggcgggtttctgacatttctgacatttccgactcggaccgatg

SEQ ID NO: 16328 - DNA, 203 bp, Artificial sequence
  synthetic
ggcgcgccagtcctagcttctggttctgacatttctgacatttctgacatccggcgggtttctgacatccggcgggtttctgacatccggcgggtttctgacatccggcgggtttctgacatttctgacatttctgacatttctgacatttctgacatttctgacatttctgacatccggcgggtttccgactcggaccgatg

SEQ ID NO: 16329 - DNA, 203 bp, Artificial sequence
  synthetic
ggcgcgccagtcctaggtcaagtttctgacatttctgacatttctgacatccggcgggtttctgacatccggcgggtttctgacatccggcgggtttctgacatttctgacatttctgacatccggcgggtttctgacatttctgacatttctgacatttctgacatttctgacatccggcgggtttccgactcggaccgatg

SEQ ID NO: 16330 - DNA, 203 bp, Artificial sequence
  synthetic
ggcgcgccagtccttgctcaggattctgacatttctgacatttctgacatccggcgggtttctgacatccggcgggtttctgacatccggcgggtttctgacatttctgacatttctgacatttctgacatttctgacatttctgacatttctgacatccggcgggtttctgacatttctgacatttccgactcggaccgatg

SEQ ID NO: 16331 - DNA, 203 bp, Artificial sequence
  synthetic
ggcgcgccagtccttgtctgcaaatctgacatttctgacatttctgacatccggcgggtttctgacatccggcgggtttctgacatccggcgggtttctgacatttctgacatttctgacatttctgacatttctgacatttctgacatttctgacatttctgacatttctgacatccggcgggtttccgactcggaccgatg

SEQ ID NO: 16332 - DNA, 203 bp, Artificial sequence
  synthetic
ggcgcgccagtccttaggtcaccatctgacatttctgacatttctgacatccggcgggtttctgacatccggcgggtttctgacatccggcgggtttctgacatttctgacatttctgacatttctgacatttctgacatttctgacatttctgacatttctgacatttctgacatttctgacatttccgactcggaccgatg

SEQ ID NO: 16333 - DNA, 203 bp, Artificial sequence
  synthetic
ggcgcgccagtccttgtaccgtcatctgacatttctgacatttctgacatccggcgggtttctgacatccggcgggtttctgacatttctgacatttctgacatccggcgggtttctgacatccggcgggtttctgacatccggcgggtttctgacatccggcgggtttctgacatccggcgggtttccgactcggaccgatg

SEQ ID NO: 16334 - DNA, 203 bp, Artificial sequence
  synthetic
ggcgcgccagtcctttgagcttgttctgacatttctgacatttctgacatccggcgggtttctgacatccggcgggtttctgacatttctgacatttctgacatccggcgggtttctgacatccggcgggtttctgacatccggcgggtttctgacatccggcgggtttctgacatttctgacatttccgactcggaccgatg

SEQ ID NO: 16335 - DNA, 203 bp, Artificial sequence
  synthetic
ggcgcgccagtcctaagagcttgatctgacatttctgacatttctgacatccggcgggtttctgacatccggcgggtttctgacatttctgacatttctgacatccggcgggtttctgacatccggcgggtttctgacatccggcgggtttctgacatttctgacatttctgacatccggcgggtttccgactcggaccgatg

SEQ ID NO: 16336 - DNA, 203 bp, Artificial sequence
  synthetic
ggcgcgccagtcctaagcctgagatctgacatttctgacatttctgacatccggcgggtttctgacatccggcgggtttctgacatttctgacatttctgacatccggcgggtttctgacatccggcgggtttctgacatccggcgggtttctgacatttctgacatttctgacatttctgacatttccgactcggaccgatg

SEQ ID NO: 16337 - DNA, 203 bp, Artificial sequence
  synthetic
ggcgcgccagtccttcaccgtctgtctgacatttctgacatttctgacatccggcgggtttctgacatccggcgggtttctgacatttctgacatttctgacatccggcgggtttctgacatccggcgggtttctgacatttctgacatttctgacatccggcgggtttctgacatttctgacatttccgactcggaccgatg

SEQ ID NO: 16338 - DNA, 203 bp, Artificial sequence
  synthetic
ggcgcgccagtcctatcagtctagtctgacatttctgacatttctgacatccggcgggtttctgacatccggcgggtttctgacatttctgacatttctgacatccggcgggtttctgacatccggcgggtttctgacatttctgacatttctgacatttctgacatttctgacatttctgacatttccgactcggaccgatg

SEQ ID NO: 16339 - DNA, 203 bp, Artificial sequence
  synthetic
ggcgcgccagtcctagctgacctgtctgacatttctgacatttctgacatccggcgggtttctgacatccggcgggtttctgacatttctgacatttctgacatccggcgggtttctgacatttctgacatttctgacatttctgacatttctgacatccggcgggtttctgacatccggcgggtttccgactcggaccgatg

SEQ ID NO: 16340 - DNA, 203 bp, Artificial sequence
  synthetic
ggcgcgccagtccttgacggtttgtctgacatttctgacatttctgacatccggcgggtttctgacatccggcgggtttctgacatttctgacatttctgacatccggcgggtttctgacatttctgacatttctgacatttctgacatttctgacatttctgacatttctgacatccggcgggtttccgactcggaccgatg

SEQ ID NO: 16341 - DNA, 203 bp, Artificial sequence
  synthetic
ggcgcgccagtcctacactagctgtctgacatttctgacatttctgacatccggcgggtttctgacatccggcgggtttctgacatttctgacatttctgacatttctgacatttctgacatccggcgggtttctgacatccggcgggtttctgacatccggcgggtttctgacatttctgacatttccgactcggaccgatg

SEQ ID NO: 16342 - DNA, 203 bp, Artificial sequence
  synthetic
ggcgcgccagtcctcttcgtctgatctgacatttctgacatttctgacatccggcgggtttctgacatccggcgggtttctgacatttctgacatttctgacatttctgacatttctgacatccggcgggtttctgacatttctgacatttctgacatccggcgggtttctgacatttctgacatttccgactcggaccgatg

SEQ ID NO: 16343 - DNA, 203 bp, Artificial sequence
  synthetic
ggcgcgccagtcctcataccgtcttctgacatttctgacatttctgacatccggcgggtttctgacatccggcgggtttctgacatttctgacatttctgacatttctgacatttctgacatccggcgggtttctgacatttctgacatttctgacatttctgacatttctgacatccggcgggtttccgactcggaccgatg

SEQ ID NO: 16344 - DNA, 203 bp, Artificial sequence
  synthetic
ggcgcgccagtcctcttgactggttctgacatttctgacatttctgacatccggcgggtttctgacatccggcgggtttctgacatttctgacatttctgacatttctgacatttctgacatttctgacatttctgacatccggcgggtttctgacatccggcgggtttctgacatttctgacatttccgactcggaccgatg

SEQ ID NO: 16345 - DNA, 203 bp, Artificial sequence
  synthetic
ggcgcgccagtcctcttcaagacttctgacatttctgacatttctgacatccggcgggtttctgacatccggcgggtttctgacatttctgacatttctgacatttctgacatttctgacatttctgacatttctgacatttctgacatttctgacatttctgacatttctgacatccggcgggtttccgactcggaccgatg

SEQ ID NO: 16346 - DNA, 203 bp, Artificial sequence
  synthetic
ggcgcgccagtccttattcaagcttctgacatttctgacatttctgacatccggcgggtttctgacatttctgacatttctgacatccggcgggtttctgacatccggcgggtttctgacatccggcgggtttctgacatttctgacatttctgacatccggcgggtttctgacatttctgacatttccgactcggaccgatg

SEQ ID NO: 16347 - DNA, 203 bp, Artificial sequence
  synthetic
ggcgcgccagtccttgagtttacatctgacatttctgacatttctgacatccggcgggtttctgacatttctgacatttctgacatccggcgggtttctgacatccggcgggtttctgacatccggcgggtttctgacatttctgacatttctgacatttctgacatttctgacatccggcgggtttccgactcggaccgatg

SEQ ID NO: 16348 - DNA, 203 bp, Artificial sequence
  synthetic
ggcgcgccagtcctagtgagaatatctgacatttctgacatttctgacatccggcgggtttctgacatttctgacatttctgacatccggcgggtttctgacatccggcgggtttctgacatttctgacatttctgacatccggcgggtttctgacatccggcgggtttctgacatccggcgggtttccgactcggaccgatg

SEQ ID NO: 16349 - DNA, 203 bp, Artificial sequence
  synthetic
ggcgcgccagtcctttgtagactatctgacatttctgacatttctgacatccggcgggtttctgacatttctgacatttctgacatccggcgggtttctgacatccggcgggtttctgacatttctgacatttctgacatccggcgggtttctgacatttctgacatttctgacatttctgacatttccgactcggaccgatg

SEQ ID NO: 16350 - DNA, 203 bp, Artificial sequence
  synthetic
ggcgcgccagtccttaaagaccattctgacatttctgacatttctgacatccggcgggtttctgacatttctgacatttctgacatccggcgggtttctgacatccggcgggtttctgacatttctgacatttctgacatttctgacatttctgacatccggcgggtttctgacatttctgacatttccgactcggaccgatg

SEQ ID NO: 16351 - DNA, 203 bp, Artificial sequence
  synthetic
ggcgcgccagtcctagcctaagattctgacatttctgacatttctgacatccggcgggtttctgacatttctgacatttctgacatccggcgggtttctgacatttctgacatttctgacatccggcgggtttctgacatccggcgggtttctgacatccggcgggtttctgacatccggcgggtttccgactcggaccgatg

SEQ ID NO: 16352 - DNA, 203 bp, Artificial sequence
  synthetic
ggcgcgccagtcctctactgtctgtctgacatttctgacatttctgacatccggcgggtttctgacatttctgacatttctgacatccggcgggtttctgacatttctgacatttctgacatccggcgggtttctgacatttctgacatttctgacatttctgacatttctgacatccggcgggtttccgactcggaccgatg

SEQ ID NO: 16353 - DNA, 203 bp, Artificial sequence
  synthetic
ggcgcgccagtcctctcacaagattctgacatttctgacatttctgacatccggcgggtttctgacatttctgacatttctgacatccggcgggtttctgacatttctgacatttctgacatccggcgggtttctgacatttctgacatttctgacatttctgacatttctgacatttctgacatttccgactcggaccgatg

SEQ ID NO: 16354 - DNA, 203 bp, Artificial sequence
  synthetic
ggcgcgccagtcctaattctctgatctgacatttctgacatttctgacatccggcgggtttctgacatttctgacatttctgacatccggcgggtttctgacatttctgacatttctgacatttctgacatttctgacatccggcgggtttctgacatccggcgggtttctgacatccggcgggtttccgactcggaccgatg

SEQ ID NO: 16355 - DNA, 203 bp, Artificial sequence
  synthetic
ggcgcgccagtcctacgactagtgtctgacatttctgacatttctgacatccggcgggtttctgacatttctgacatttctgacatccggcgggtttctgacatttctgacatttctgacatttctgacatttctgacatccggcgggtttctgacatttctgacatttctgacatttctgacatttccgactcggaccgatg

SEQ ID NO: 16356 - DNA, 203 bp, Artificial sequence
  synthetic
ggcgcgccagtcctacgacaaggttctgacatttctgacatttctgacatccggcgggtttctgacatttctgacatttctgacatccggcgggtttctgacatttctgacatttctgacatttctgacatttctgacatttctgacatttctgacatccggcgggtttctgacatccggcgggtttccgactcggaccgatg

SEQ ID NO: 16357 - DNA, 203 bp, Artificial sequence
  synthetic
ggcgcgccagtccttagccttcgttctgacatttctgacatttctgacatccggcgggtttctgacatttctgacatttctgacatccggcgggtttctgacatttctgacatttctgacatttctgacatttctgacatttctgacatttctgacatccggcgggtttctgacatttctgacatttccgactcggaccgatg

SEQ ID NO: 16358 - DNA, 203 bp, Artificial sequence
  synthetic
ggcgcgccagtccttgcactggtgtctgacatttctgacatttctgacatccggcgggtttctgacatttctgacatttctgacatttctgacatttctgacatccggcgggtttctgacatccggcgggtttctgacatccggcgggtttctgacatccggcgggtttctgacatccggcgggtttccgactcggaccgatg

SEQ ID NO: 16359 - DNA, 203 bp, Artificial sequence
  synthetic
ggcgcgccagtcctcttcttgcgatctgacatttctgacatttctgacatccggcgggtttctgacatttctgacatttctgacatttctgacatttctgacatccggcgggtttctgacatccggcgggtttctgacatttctgacatttctgacatttctgacatttctgacatccggcgggtttccgactcggaccgatg

SEQ ID NO: 16360 - DNA, 203 bp, Artificial sequence
  synthetic
ggcgcgccagtcctcacaacttgatctgacatttctgacatttctgacatccggcgggtttctgacatttctgacatttctgacatttctgacatttctgacatccggcgggtttctgacatttctgacatttctgacatccggcgggtttctgacatccggcgggtttctgacatccggcgggtttccgactcggaccgatg

SEQ ID NO: 16361 - DNA, 203 bp, Artificial sequence
  synthetic
ggcgcgccagtcctttacaaggattctgacatttctgacatttctgacatccggcgggtttctgacatttctgacatttctgacatttctgacatttctgacatccggcgggtttctgacatttctgacatttctgacatccggcgggtttctgacatttctgacatttctgacatccggcgggtttccgactcggaccgatg

SEQ ID NO: 16362 - DNA, 203 bp, Artificial sequence
  synthetic
ggcgcgccagtccttagtttgcaatctgacatttctgacatttctgacatccggcgggtttctgacatttctgacatttctgacatttctgacatttctgacatccggcgggtttctgacatttctgacatttctgacatccggcgggtttctgacatttctgacatttctgacatttctgacatttccgactcggaccgatg

SEQ ID NO: 16363 - DNA, 203 bp, Artificial sequence
  synthetic
ggcgcgccagtccttcaagtgtagtctgacatttctgacatttctgacatccggcgggtttctgacatttctgacatttctgacatttctgacatttctgacatccggcgggtttctgacatttctgacatttctgacatttctgacatttctgacatccggcgggtttctgacatttctgacatttccgactcggaccgatg

SEQ ID NO: 16364 - DNA, 203 bp, Artificial sequence
  synthetic
ggcgcgccagtcctagaatcagagtctgacatttctgacatttctgacatccggcgggtttctgacatttctgacatttctgacatttctgacatttctgacatccggcgggtttctgacatttctgacatttctgacatttctgacatttctgacatttctgacatttctgacatttctgacatttccgactcggaccgatg

SEQ ID NO: 16365 - DNA, 203 bp, Artificial sequence
  synthetic
ggcgcgccagtcctcacttgcacttctgacatttctgacatttctgacatccggcgggtttctgacatttctgacatttctgacatttctgacatttctgacatttctgacatttctgacatccggcgggtttctgacatccggcgggtttctgacatccggcgggtttctgacatccggcgggtttccgactcggaccgatg

SEQ ID NO: 16366 - DNA, 203 bp, Artificial sequence
  synthetic
ggcgcgccagtccttcagtcgtcatctgacatttctgacatttctgacatccggcgggtttctgacatttctgacatttctgacatttctgacatttctgacatttctgacatttctgacatccggcgggtttctgacatttctgacatttctgacatttctgacatttctgacatccggcgggtttccgactcggaccgatg

SEQ ID NO: 16367 - DNA, 203 bp, Artificial sequence
  synthetic
ggcgcgccagtcctaacgaaagagtctgacatttctgacatttctgacatccggcgggtttctgacatttctgacatttctgacatttctgacatttctgacatttctgacatttctgacatttctgacatttctgacatccggcgggtttctgacatttctgacatttctgacatccggcgggtttccgactcggaccgatg

SEQ ID NO: 16368 - DNA, 203 bp, Artificial sequence
  synthetic
ggcgcgccagtcctaacagacagttctgacatttctgacatttctgacatccggcgggtttctgacatttctgacatttctgacatttctgacatttctgacatttctgacatttctgacatttctgacatttctgacatttctgacatttctgacatccggcgggtttctgacatccggcgggtttccgactcggaccgatg

SEQ ID NO: 16369 - DNA, 203 bp, Artificial sequence
  synthetic
ggcgcgccagtcctaatcttgcaatctgacatttctgacatttctgacatccggcgggtttctgacatttctgacatttctgacatttctgacatttctgacatttctgacatttctgacatttctgacatttctgacatttctgacatttctgacatccggcgggtttctgacatttctgacatttccgactcggaccgatg

SEQ ID NO: 16370 - DNA, 203 bp, Artificial sequence
  synthetic
ggcgcgccagtccttgtaaaccgttctgacatttctgacatttctgacatccggcgggtttctgacatttctgacatttctgacatttctgacatttctgacatttctgacatttctgacatttctgacatttctgacatttctgacatttctgacatttctgacatttctgacatttctgacatttccgactcggaccgatg

SEQ ID NO: 16371 - DNA, 203 bp, Artificial sequence
  synthetic
ggcgcgccagtcctaactgatccttctgacatttctgacatttctgacatcgtcaattcctttaacatcgtcaattcctttaacatcgtcaattcctttaacatcgtcaattcctttaacatcgtcaattcctttaacatcgtcaattcctttaacatcgtcaattcctttaacatttctgacatttccgactcggaccgatg

SEQ ID NO: 16372 - DNA, 203 bp, Artificial sequence
  synthetic
ggcgcgccagtccttgatcagttttctgacatttctgacatttctgacatcgtcaattcctttaacatcgtcaattcctttaacatcgtcaattcctttaacatcgtcaattcctttaacatcgtcaattcctttaacatcgtcaattcctttaacatttctgacatttctgacatttctgacatttccgactcggaccgatg

SEQ ID NO: 16373 - DNA, 203 bp, Artificial sequence
  synthetic
ggcgcgccagtcctttctggtacatctgacatttctgacatttctgacatcgtcaattcctttaacatcgtcaattcctttaacatcgtcaattcctttaacatcgtcaattcctttaacatcgtcaattcctttaacatttctgacatttctgacatcgtcaattcctttaacatttctgacatttccgactcggaccgatg

SEQ ID NO: 16374 - DNA, 203 bp, Artificial sequence
  synthetic
ggcgcgccagtcctcttagctctatctgacatttctgacatttctgacatcgtcaattcctttaacatcgtcaattcctttaacatcgtcaattcctttaacatcgtcaattcctttaacatttctgacatttctgacatcgtcaattcctttaacatcgtcaattcctttaacatttctgacatttccgactcggaccgatg

SEQ ID NO: 16375 - DNA, 203 bp, Artificial sequence
  synthetic
ggcgcgccagtcctctaagattcttctgacatttctgacatttctgacatcgtcaattcctttaacatcgtcaattcctttaacatcgtcaattcctttaacatcgtcaattcctttaacatttctgacatttctgacatttctgacatttctgacatttctgacatttctgacatttctgacatttccgactcggaccgatg

SEQ ID NO: 16376 - DNA, 203 bp, Artificial sequence
  synthetic
ggcgcgccagtcctttaacagctttctgacatttctgacatttctgacatcgtcaattcctttaacatcgtcaattcctttaacatcgtcaattcctttaacatttctgacatttctgacatcgtcaattcctttaacatcgtcaattcctttaacatcgtcaattcctttaacatttctgacatttccgactcggaccgatg

SEQ ID NO: 16377 - DNA, 203 bp, Artificial sequence
  synthetic
ggcgcgccagtcctatggtagccatctgacatttctgacatttctgacatcgtcaattcctttaacatcgtcaattcctttaacatcgtcaattcctttaacatttctgacatttctgacatcgtcaattcctttaacatcgtcaattcctttaacatttctgacatttctgacatttctgacatttccgactcggaccgatg

SEQ ID NO: 16378 - DNA, 203 bp, Artificial sequence
  synthetic
ggcgcgccagtcctaccaaccttttctgacatttctgacatttctgacatcgtcaattcctttaacatcgtcaattcctttaacatcgtcaattcctttaacatttctgacatttctgacatcgtcaattcctttaacatttctgacatttctgacatcgtcaattcctttaacatttctgacatttccgactcggaccgatg

SEQ ID NO: 16379 - DNA, 203 bp, Artificial sequence
  synthetic
ggcgcgccagtcctatggttaagatctgacatttctgacatttctgacatcgtcaattcctttaacatcgtcaattcctttaacatcgtcaattcctttaacatttctgacatttctgacatttctgacatttctgacatcgtcaattcctttaacatcgtcaattcctttaacatttctgacatttccgactcggaccgatg

SEQ ID NO: 16380 - DNA, 203 bp, Artificial sequence
  synthetic
ggcgcgccagtccttgcttgactatctgacatttctgacatttctgacatcgtcaattcctttaacatcgtcaattcctttaacatcgtcaattcctttaacatttctgacatttctgacatttctgacatttctgacatttctgacatttctgacatttctgacatttctgacatttctgacatttccgactcggaccgatg

SEQ ID NO: 16381 - DNA, 203 bp, Artificial sequence
  synthetic
ggcgcgccagtccttgctcagatatctgacatttctgacatttctgacatcgtcaattcctttaacatcgtcaattcctttaacatttctgacatttctgacatcgtcaattcctttaacatcgtcaattcctttaacatcgtcaattcctttaacatcgtcaattcctttaacatttctgacatttccgactcggaccgatg

SEQ ID NO: 16382 - DNA, 203 bp, Artificial sequence
  synthetic
ggcgcgccagtcctaaagaggttatctgacatttctgacatttctgacatcgtcaattcctttaacatcgtcaattcctttaacatttctgacatttctgacatcgtcaattcctttaacatcgtcaattcctttaacatttctgacatttctgacatttctgacatttctgacatttctgacatttccgactcggaccgatg

SEQ ID NO: 16383 - DNA, 203 bp, Artificial sequence
  synthetic
ggcgcgccagtccttagtcagacttctgacatttctgacatttctgacatcgtcaattcctttaacatcgtcaattcctttaacatttctgacatttctgacatcgtcaattcctttaacatttctgacatttctgacatcgtcaattcctttaacatcgtcaattcctttaacatttctgacatttccgactcggaccgatg

SEQ ID NO: 16384 - DNA, 203 bp, Artificial sequence
  synthetic
ggcgcgccagtcctagtgacctcttctgacatttctgacatttctgacatcgtcaattcctttaacatcgtcaattcctttaacatttctgacatttctgacatcgtcaattcctttaacatttctgacatttctgacatttctgacatttctgacatcgtcaattcctttaacatttctgacatttccgactcggaccgatg

SEQ ID NO: 16385 - DNA, 203 bp, Artificial sequence
  synthetic
ggcgcgccagtccttgcttaagcatctgacatttctgacatttctgacatcgtcaattcctttaacatcgtcaattcctttaacatttctgacatttctgacatttctgacatttctgacatcgtcaattcctttaacatcgtcaattcctttaacatcgtcaattcctttaacatttctgacatttccgactcggaccgatg

SEQ ID NO: 16386 - DNA, 203 bp, Artificial sequence
  synthetic
ggcgcgccagtccttgagaggtcatctgacatttctgacatttctgacatcgtcaattcctttaacatcgtcaattcctttaacatttctgacatttctgacatttctgacatttctgacatcgtcaattcctttaacatcgtcaattcctttaacatttctgacatttctgacatttctgacatttccgactcggaccgatg

SEQ ID NO: 16387 - DNA, 203 bp, Artificial sequence
  synthetic
ggcgcgccagtcctaaccttcttgtctgacatttctgacatttctgacatcgtcaattcctttaacatcgtcaattcctttaacatttctgacatttctgacatttctgacatttctgacatcgtcaattcctttaacatttctgacatttctgacatcgtcaattcctttaacatttctgacatttccgactcggaccgatg

SEQ ID NO: 16388 - DNA, 203 bp, Artificial sequence
  synthetic
ggcgcgccagtccttacagagtagtctgacatttctgacatttctgacatcgtcaattcctttaacatcgtcaattcctttaacatttctgacatttctgacatttctgacatttctgacatttctgacatttctgacatcgtcaattcctttaacatcgtcaattcctttaacatttctgacatttccgactcggaccgatg

SEQ ID NO: 16389 - DNA, 203 bp, Artificial sequence
  synthetic
ggcgcgccagtcctaaggtgagtgtctgacatttctgacatttctgacatcgtcaattcctttaacatcgtcaattcctttaacatttctgacatttctgacatttctgacatttctgacatttctgacatttctgacatttctgacatttctgacatcgtcaattcctttaacatttctgacatttccgactcggaccgatg

SEQ ID NO: 16390 - DNA, 203 bp, Artificial sequence
  synthetic
ggcgcgccagtcctatcttagctttctgacatttctgacatttctgacatcgtcaattcctttaacatttctgacatttctgacatcgtcaattcctttaacatcgtcaattcctttaacatcgtcaattcctttaacatttctgacatttctgacatcgtcaattcctttaacatttctgacatttccgactcggaccgatg

SEQ ID NO: 16391 - DNA, 203 bp, Artificial sequence
  synthetic
ggcgcgccagtcctcactagcttatctgacatttctgacatttctgacatcgtcaattcctttaacatttctgacatttctgacatcgtcaattcctttaacatcgtcaattcctttaacatttctgacatttctgacatcgtcaattcctttaacatcgtcaattcctttaacatttctgacatttccgactcggaccgatg

SEQ ID NO: 16392 - DNA, 203 bp, Artificial sequence
  synthetic
ggcgcgccagtccttagcttgctgtctgacatttctgacatttctgacatcgtcaattcctttaacatttctgacatttctgacatcgtcaattcctttaacatcgtcaattcctttaacatttctgacatttctgacatcgtcaattcctttaacatttctgacatttctgacatttctgacatttccgactcggaccgatg

SEQ ID NO: 16393 - DNA, 203 bp, Artificial sequence
  synthetic
ggcgcgccagtcctcaggactcgttctgacatttctgacatttctgacatcgtcaattcctttaacatttctgacatttctgacatcgtcaattcctttaacatttctgacatttctgacatcgtcaattcctttaacatcgtcaattcctttaacatcgtcaattcctttaacatttctgacatttccgactcggaccgatg

SEQ ID NO: 16394 - DNA, 203 bp, Artificial sequence
  synthetic
ggcgcgccagtccttgcagtagcttctgacatttctgacatttctgacatcgtcaattcctttaacatttctgacatttctgacatcgtcaattcctttaacatttctgacatttctgacatcgtcaattcctttaacatttctgacatttctgacatcgtcaattcctttaacatttctgacatttccgactcggaccgatg

SEQ ID NO: 16395 - DNA, 203 bp, Artificial sequence
  synthetic
ggcgcgccagtcctagactgtgcttctgacatttctgacatttctgacatcgtcaattcctttaacatttctgacatttctgacatcgtcaattcctttaacatttctgacatttctgacatcgtcaattcctttaacatttctgacatttctgacatttctgacatttctgacatttctgacatttccgactcggaccgatg

SEQ ID NO: 16396 - DNA, 203 bp, Artificial sequence
  synthetic
ggcgcgccagtcctaaaactctcatctgacatttctgacatttctgacatcgtcaattcctttaacatttctgacatttctgacatcgtcaattcctttaacatttctgacatttctgacatttctgacatttctgacatcgtcaattcctttaacatttctgacatttctgacatttctgacatttccgactcggaccgatg

SEQ ID NO: 16397 - DNA, 203 bp, Artificial sequence
  synthetic
ggcgcgccagtcctaagtaggacttctgacatttctgacatttctgacatcgtcaattcctttaacatttctgacatttctgacatcgtcaattcctttaacatttctgacatttctgacatttctgacatttctgacatttctgacatttctgacatcgtcaattcctttaacatttctgacatttccgactcggaccgatg

SEQ ID NO: 16398 - DNA, 203 bp, Artificial sequence
  synthetic
ggcgcgccagtcctatgaggactgtctgacatttctgacatttctgacatcgtcaattcctttaacatttctgacatttctgacatttctgacatttctgacatcgtcaattcctttaacatttctgacatttctgacatcgtcaattcctttaacatttctgacatttctgacatttctgacatttccgactcggaccgatg

SEQ ID NO: 16399 - DNA, 203 bp, Artificial sequence
  synthetic
ggcgcgccagtcctcaacactctgtctgacatttctgacatttctgacatcgtcaattcctttaacatttctgacatttctgacatttctgacatttctgacatcgtcaattcctttaacatttctgacatttctgacatttctgacatttctgacatcgtcaattcctttaacatttctgacatttccgactcggaccgatg

SEQ ID NO: 16400 - DNA, 203 bp, Artificial sequence
  synthetic
ggcgcgccagtccttaactggacttctgacatttctgacatttctgacatcgtcaattcctttaacatttctgacatttctgacatttctgacatttctgacatcgtcaattcctttaacatttctgacatttctgacatttctgacatttctgacatttctgacatttctgacatttctgacatttccgactcggaccgatg

SEQ ID NO: 16401 - DNA, 203 bp, Artificial sequence
  synthetic
ggcgcgccagtcctagcagtccattctgacatttctgacatttctgacatcgtcaattcctttaacatttctgacatttctgacatttctgacatttctgacatttctgacatttctgacatttctgacatttctgacatcgtcaattcctttaacatcgtcaattcctttaacatttctgacatttccgactcggaccgatg

SEQ ID NO: 16402 - DNA, 203 bp, Artificial sequence
  synthetic
ggcgcgccagtcctacatactgtgtctgacatttctgacatttctgacatgcaggctccactcctggtggtgcccttccgtcaattcctttaagtttcagctttgcaaccatactccccccggaacccaaagactttggtttcccggaagctgcccggcgggtcatgggaataacgccctgacatttccgactcggaccgatg

SEQ ID NO: 16403 - DNA, 203 bp, Artificial sequence
  synthetic
ggcgcgccagtcctacatgatcattctgacatttctgacatttctgacattaccggccgttctgacatttctgacatttctgacatttctgacatttctgacatttctgacatttctgacatttctgacatttctgacatttctgacatttctgacatttctgacatttctgacatttcaccggccgtcgactcggaccgatg

SEQ ID NO: 16404 - DNA, 203 bp, Artificial sequence
  synthetic
ggcgcgccagtcctaaagctaaagtctgacatttctgacatttctgacattaccggccgttctgacatttctgacatttctgacatttctgacatttctgacatttctgacatttctgacatttctgacatttctgacatttctgacatttctgacatttctgacatttctgacatttcccggcgggtcgactcggaccgatg

SEQ ID NO: 16405 - DNA, 203 bp, Artificial sequence
  synthetic
ggcgcgccagtcctaccagaactttctgacatttctgacatttctgacattactcccatttctgacattactcccatttctgacattactcccatttctgacattactcccatttctgacattactcccatttctgacattactcccatttctgacattactcccatttctgacattactcccatttccgactcggaccgatg

SEQ ID NO: 16406 - DNA, 203 bp, Artificial sequence
  synthetic
ggcgcgccagtccttaaggttgattctgacatttctgacatttctgacattactcccatttctgacattactcccatttctgacattactcccatttctgacattactcccatttctgacattactcccatttctgacattactcccatttctgacatttctgacatttctgacatttctgacatttccgactcggaccgatg

SEQ ID NO: 16407 - DNA, 203 bp, Artificial sequence
  synthetic
ggcgcgccagtccttatgctcatatctgacatttctgacatttctgacattactcccatttctgacattactcccatttctgacattactcccatttctgacattactcccatttctgacattactcccatttctgacatttctgacatttctgacattactcccatttctgacatttctgacatttccgactcggaccgatg

SEQ ID NO: 16408 - DNA, 203 bp, Artificial sequence
  synthetic
ggcgcgccagtccttatgagcaaatctgacatttctgacatttctgacattactcccatttctgacattactcccatttctgacattactcccatttctgacattactcccatttctgacattactcccatttctgacatttctgacatttctgacatttctgacatttctgacattactcccatttccgactcggaccgatg

SEQ ID NO: 16409 - DNA, 203 bp, Artificial sequence
  synthetic
ggcgcgccagtcctttaagtgccatctgacatttctgacatttctgacattactcccatttctgacattactcccatttctgacattactcccatttctgacattactcccatttctgacatttctgacatttctgacattactcccatttctgacattactcccatttctgacattactcccatttccgactcggaccgatg

SEQ ID NO: 16410 - DNA, 203 bp, Artificial sequence
  synthetic
ggcgcgccagtcctatacagtttatctgacatttctgacatttctgacattactcccatttctgacattactcccatttctgacattactcccatttctgacattactcccatttctgacatttctgacatttctgacattactcccatttctgacattactcccatttctgacatttctgacatttccgactcggaccgatg

SEQ ID NO: 16411 - DNA, 203 bp, Artificial sequence
  synthetic
ggcgcgccagtcctttaaagtgtatctgacatttctgacatttctgacattactcccatttctgacattactcccatttctgacattactcccatttctgacattactcccatttctgacatttctgacatttctgacattactcccatttctgacatttctgacatttctgacattactcccatttccgactcggaccgatg

SEQ ID NO: 16412 - DNA, 203 bp, Artificial sequence
  synthetic
ggcgcgccagtccttatgaatctatctgacatttctgacatttctgacattactcccatttctgacattactcccatttctgacattactcccatttctgacattactcccatttctgacatttctgacatttctgacattactcccatttctgacatttctgacatttctgacatttctgacatttccgactcggaccgatg

SEQ ID NO: 16413 - DNA, 203 bp, Artificial sequence
  synthetic
ggcgcgccagtcctcctttcgtcttctgacatttctgacatttctgacattactcccatttctgacattactcccatttctgacattactcccatttctgacatttctgacatttctgacattactcccatttctgacattactcccatttctgacatttctgacatttctgacattactcccatttccgactcggaccgatg

SEQ ID NO: 16414 - DNA, 203 bp, Artificial sequence
  synthetic
ggcgcgccagtcctccttgagaaatctgacatttctgacatttctgacattactcccatttctgacattactcccatttctgacattactcccatttctgacatttctgacatttctgacattactcccatttctgacattactcccatttctgacatttctgacatttctgacatttctgacatttccgactcggaccgatg

SEQ ID NO: 16415 - DNA, 203 bp, Artificial sequence
  synthetic
ggcgcgccagtcctagcaagtaggtctgacatttctgacatttctgacattactcccatttctgacattactcccatttctgacattactcccatttctgacatttctgacatttctgacattactcccatttctgacatttctgacatttctgacattactcccatttctgacattactcccatttccgactcggaccgatg

SEQ ID NO: 16416 - DNA, 203 bp, Artificial sequence
  synthetic
ggcgcgccagtcctaacgacaaggtctgacatttctgacatttctgacattactcccatttctgacattactcccatttctgacattactcccatttctgacatttctgacatttctgacattactcccatttctgacatttctgacatttctgacattactcccatttctgacatttctgacatttccgactcggaccgatg

SEQ ID NO: 16417 - DNA, 203 bp, Artificial sequence
  synthetic
ggcgcgccagtcctacctactaggtctgacatttctgacatttctgacattactcccatttctgacattactcccatttctgacattactcccatttctgacatttctgacatttctgacattactcccatttctgacatttctgacatttctgacatttctgacatttctgacatttctgacatttccgactcggaccgatg

SEQ ID NO: 16418 - DNA, 203 bp, Artificial sequence
  synthetic
ggcgcgccagtccttaaggttaggtctgacatttctgacatttctgacattactcccatttctgacattactcccatttctgacattactcccatttctgacatttctgacatttctgacatttctgacatttctgacattactcccatttctgacattactcccatttctgacatttctgacatttccgactcggaccgatg

SEQ ID NO: 16419 - DNA, 203 bp, Artificial sequence
  synthetic
ggcgcgccagtcctacactctgaatctgacatttctgacatttctgacattactcccatttctgacattactcccatttctgacattactcccatttctgacatttctgacatttctgacatttctgacatttctgacatttctgacatttctgacattactcccatttctgacattactcccatttccgactcggaccgatg

SEQ ID NO: 16420 - DNA, 203 bp, Artificial sequence
  synthetic
ggcgcgccagtccttccagtgcattctgacatttctgacatttctgacattactcccatttctgacattactcccatttctgacattactcccatttctgacatttctgacatttctgacatttctgacatttctgacatttctgacatttctgacatttctgacatttctgacatttctgacatttccgactcggaccgatg

SEQ ID NO: 16421 - DNA, 203 bp, Artificial sequence
  synthetic
ggcgcgccagtcctacctcaagtgtctgacatttctgacatttctgacattactcccatttctgacattactcccatttctgacatttctgacatttctgacattactcccatttctgacattactcccatttctgacattactcccatttctgacattactcccatttctgacattactcccatttccgactcggaccgatg

SEQ ID NO: 16422 - DNA, 203 bp, Artificial sequence
  synthetic
ggcgcgccagtcctaaggtcctgttctgacatttctgacatttctgacattactcccatttctgacattactcccatttctgacatttctgacatttctgacattactcccatttctgacattactcccatttctgacattactcccatttctgacattactcccatttctgacatttctgacatttccgactcggaccgatg

SEQ ID NO: 16423 - DNA, 203 bp, Artificial sequence
  synthetic
ggcgcgccagtccttgtaaaggcttctgacatttctgacatttctgacattactcccatttctgacattactcccatttctgacatttctgacatttctgacattactcccatttctgacattactcccatttctgacatttctgacatttctgacattactcccatttctgacattactcccatttccgactcggaccgatg

SEQ ID NO: 16424 - DNA, 203 bp, Artificial sequence
  synthetic
ggcgcgccagtcctagtctttcattctgacatttctgacatttctgacattactcccatttctgacattactcccatttctgacatttctgacatttctgacattactcccatttctgacattactcccatttctgacatttctgacatttctgacattactcccatttctgacatttctgacatttccgactcggaccgatg

SEQ ID NO: 16425 - DNA, 203 bp, Artificial sequence
  synthetic
ggcgcgccagtcctaaacactgcttctgacatttctgacatttctgacattactcccatttctgacattactcccatttctgacatttctgacatttctgacattactcccatttctgacattactcccatttctgacatttctgacatttctgacatttctgacatttctgacattactcccatttccgactcggaccgatg

SEQ ID NO: 16426 - DNA, 203 bp, Artificial sequence
  synthetic
ggcgcgccagtcctctgtaaggattctgacatttctgacatttctgacattactcccatttctgacattactcccatttctgacatttctgacatttctgacattactcccatttctgacattactcccatttctgacatttctgacatttctgacatttctgacatttctgacatttctgacatttccgactcggaccgatg

SEQ ID NO: 16427 - DNA, 203 bp, Artificial sequence
  synthetic
ggcgcgccagtcctctgtctgtattctgacatttctgacatttctgacattactcccatttctgacattactcccatttctgacatttctgacatttctgacattactcccatttctgacatttctgacatttctgacattactcccatttctgacattactcccatttctgacattactcccatttccgactcggaccgatg

SEQ ID NO: 16428 - DNA, 203 bp, Artificial sequence
  synthetic
ggcgcgccagtcctctgacggtgatctgacatttctgacatttctgacattactcccatttctgacattactcccatttctgacatttctgacatttctgacattactcccatttctgacatttctgacatttctgacattactcccatttctgacatttctgacatttctgacattactcccatttccgactcggaccgatg

SEQ ID NO: 16429 - DNA, 203 bp, Artificial sequence
  synthetic
ggcgcgccagtcctaggtcttcagtctgacatttctgacatttctgacattactcccatttctgacattactcccatttctgacatttctgacatttctgacatttctgacatttctgacattactcccatttctgacattactcccatttctgacattactcccatttctgacatttctgacatttccgactcggaccgatg

SEQ ID NO: 16430 - DNA, 203 bp, Artificial sequence
  synthetic
ggcgcgccagtcctctttcttcagtctgacatttctgacatttctgacattactcccatttctgacattactcccatttctgacatttctgacatttctgacatttctgacatttctgacattactcccatttctgacattactcccatttctgacatttctgacatttctgacatttctgacatttccgactcggaccgatg

SEQ ID NO: 16431 - DNA, 203 bp, Artificial sequence
  synthetic
ggcgcgccagtcctaatcggtcagtctgacatttctgacatttctgacattactcccatttctgacattactcccatttctgacatttctgacatttctgacatttctgacatttctgacattactcccatttctgacatttctgacatttctgacattactcccatttctgacattactcccatttccgactcggaccgatg

SEQ ID NO: 16432 - DNA, 203 bp, Artificial sequence
  synthetic
ggcgcgccagtccttgtccaagaatctgacatttctgacatttctgacattactcccatttctgacattactcccatttctgacatttctgacatttctgacatttctgacatttctgacattactcccatttctgacatttctgacatttctgacattactcccatttctgacatttctgacatttccgactcggaccgatg

SEQ ID NO: 16433 - DNA, 203 bp, Artificial sequence
  synthetic
ggcgcgccagtcctagtcaactgatctgacatttctgacatttctgacattactcccatttctgacattactcccatttctgacatttctgacatttctgacatttctgacatttctgacattactcccatttctgacatttctgacatttctgacatttctgacatttctgacattactcccatttccgactcggaccgatg

SEQ ID NO: 16434 - DNA, 203 bp, Artificial sequence
  synthetic
ggcgcgccagtcctagtgaagccatctgacatttctgacatttctgacattactcccatttctgacattactcccatttctgacatttctgacatttctgacatttctgacatttctgacatttctgacatttctgacattactcccatttctgacatttctgacatttctgacattactcccatttccgactcggaccgatg

SEQ ID NO: 16435 - DNA, 203 bp, Artificial sequence
  synthetic
ggcgcgccagtccttacagttaagtctgacatttctgacatttctgacattactcccatttctgacattactcccatttctgacatttctgacatttctgacatttctgacatttctgacatttctgacatttctgacatttctgacatttctgacattactcccatttctgacattactcccatttccgactcggaccgatg

SEQ ID NO: 16436 - DNA, 203 bp, Artificial sequence
  synthetic
ggcgcgccagtcctatccttgccatctgacatttctgacatttctgacattactcccatttctgacatttctgacatttctgacattactcccatttctgacattactcccatttctgacattactcccatttctgacattactcccatttctgacattactcccatttctgacattactcccatttccgactcggaccgatg

SEQ ID NO: 16437 - DNA, 203 bp, Artificial sequence
  synthetic
ggcgcgccagtcctatcaaaggattctgacatttctgacatttctgacattactcccatttctgacatttctgacatttctgacattactcccatttctgacattactcccatttctgacattactcccatttctgacattactcccatttctgacattactcccatttctgacatttctgacatttccgactcggaccgatg

SEQ ID NO: 16438 - DNA, 203 bp, Artificial sequence
  synthetic
ggcgcgccagtcctctagtgagtttctgacatttctgacatttctgacattactcccatttctgacatttctgacatttctgacattactcccatttctgacattactcccatttctgacattactcccatttctgacattactcccatttctgacatttctgacatttctgacattactcccatttccgactcggaccgatg

SEQ ID NO: 16439 - DNA, 203 bp, Artificial sequence
  synthetic
ggcgcgccagtcctcagcagagcatctgacatttctgacatttctgacattactcccatttctgacatttctgacatttctgacattactcccatttctgacattactcccatttctgacattactcccatttctgacatttctgacatttctgacattactcccatttctgacattactcccatttccgactcggaccgatg

SEQ ID NO: 16440 - DNA, 203 bp, Artificial sequence
  synthetic
ggcgcgccagtcctccagtgagaatctgacatttctgacatttctgacattactcccatttctgacatttctgacatttctgacattactcccatttctgacattactcccatttctgacatttctgacatttctgacattactcccatttctgacattactcccatttctgacattactcccatttccgactcggaccgatg

SEQ ID NO: 16441 - DNA, 203 bp, Artificial sequence
  synthetic
ggcgcgccagtcctagatacactatctgacatttctgacatttctgacattactcccatttctgacatttctgacatttctgacattactcccatttctgacattactcccatttctgacatttctgacatttctgacattactcccatttctgacatttctgacatttctgacattactcccatttccgactcggaccgatg

SEQ ID NO: 16442 - DNA, 203 bp, Artificial sequence
  synthetic
ggcgcgccagtcctatcacaaaggtctgacatttctgacatttctgacattactcccatttctgacatttctgacatttctgacattactcccatttctgacattactcccatttctgacatttctgacatttctgacatttctgacatttctgacattactcccatttctgacatttctgacatttccgactcggaccgatg

SEQ ID NO: 16443 - DNA, 203 bp, Artificial sequence
  synthetic
ggcgcgccagtcctacctgttcgttctgacatttctgacatttctgacattactcccatttctgacatttctgacatttctgacattactcccatttctgacatttctgacatttctgacattactcccatttctgacattactcccatttctgacattactcccatttctgacatttctgacatttccgactcggaccgatg

SEQ ID NO: 16444 - DNA, 203 bp, Artificial sequence
  synthetic
ggcgcgccagtcctatccactgtttctgacatttctgacatttctgacattactcccatttctgacatttctgacatttctgacattactcccatttctgacatttctgacatttctgacattactcccatttctgacatttctgacatttctgacattactcccatttctgacattactcccatttccgactcggaccgatg

SEQ ID NO: 16445 - DNA, 203 bp, Artificial sequence
  synthetic
ggcgcgccagtcctcctttacaggtctgacatttctgacatttctgacattactcccatttctgacatttctgacatttctgacattactcccatttctgacatttctgacatttctgacattactcccatttctgacatttctgacatttctgacatttctgacatttctgacattactcccatttccgactcggaccgatg

SEQ ID NO: 16446 - DNA, 203 bp, Artificial sequence
  synthetic
ggcgcgccagtcctcctgatcatttctgacatttctgacatttctgacattactcccatttctgacatttctgacatttctgacattactcccatttctgacatttctgacatttctgacatttctgacatttctgacattactcccatttctgacattactcccatttctgacattactcccatttccgactcggaccgatg

SEQ ID NO: 16447 - DNA, 203 bp, Artificial sequence
  synthetic
ggcgcgccagtcctcctttctgattctgacatttctgacatttctgacattactcccatttctgacatttctgacatttctgacattactcccatttctgacatttctgacatttctgacatttctgacatttctgacatttctgacatttctgacattactcccatttctgacattactcccatttccgactcggaccgatg

SEQ ID NO: 16448 - DNA, 203 bp, Artificial sequence
  synthetic
ggcgcgccagtcctctcactctgatctgacatttctgacatttctgacattactcccatttctgacatttctgacatttctgacattactcccatttctgacatttctgacatttctgacatttctgacatttctgacatttctgacatttctgacatttctgacatttctgacattactcccatttccgactcggaccgatg

SEQ ID NO: 16449 - DNA, 203 bp, Artificial sequence
  synthetic
ggcgcgccagtcctatcagagatttctgacatttctgacatttctgacattactcccatttctgacatttctgacatttctgacattactcccatttctgacatttctgacatttctgacatttctgacatttctgacatttctgacatttctgacatttctgacatttctgacatttctgacatttccgactcggaccgatg

SEQ ID NO: 16450 - DNA, 203 bp, Artificial sequence
  synthetic
ggcgcgccagtcctatgaccagattctgacatttctgacatttctgacattactcccatttctgacatttctgacatttctgacatttctgacatttctgacattactcccatttctgacattactcccatttctgacattactcccatttctgacattactcccatttctgacattactcccatttccgactcggaccgatg

SEQ ID NO: 16451 - DNA, 203 bp, Artificial sequence
  synthetic
ggcgcgccagtcctcaagattctatctgacatttctgacatttctgacattactcccatttctgacatttctgacatttctgacatttctgacatttctgacattactcccatttctgacattactcccatttctgacattactcccatttctgacattactcccatttctgacatttctgacatttccgactcggaccgatg

SEQ ID NO: 16452 - DNA, 203 bp, Artificial sequence
  synthetic
ggcgcgccagtcctaacgcttacttctgacatttctgacatttctgacattactcccatttctgacatttctgacatttctgacatttctgacatttctgacattactcccatttctgacattactcccatttctgacatttctgacatttctgacattactcccatttctgacatttctgacatttccgactcggaccgatg

SEQ ID NO: 16453 - DNA, 203 bp, Artificial sequence
  synthetic
ggcgcgccagtcctccaaaagatttctgacatttctgacatttctgacattactcccatttctgacatttctgacatttctgacatttctgacatttctgacattactcccatttctgacatttctgacatttctgacattactcccatttctgacattactcccatttctgacattactcccatttccgactcggaccgatg

SEQ ID NO: 16454 - DNA, 203 bp, Artificial sequence
  synthetic
ggcgcgccagtcctttaagttttgtctgacatttctgacatttctgacattactcccatttctgacatttctgacatttctgacatttctgacatttctgacattactcccatttctgacatttctgacatttctgacattactcccatttctgacatttctgacatttctgacattactcccatttccgactcggaccgatg

SEQ ID NO: 16455 - DNA, 203 bp, Artificial sequence
  synthetic
ggcgcgccagtccttgcttactgttctgacatttctgacatttctgacattactcccatttctgacatttctgacatttctgacatttctgacatttctgacattactcccatttctgacatttctgacatttctgacatttctgacatttctgacatttctgacatttctgacattactcccatttccgactcggaccgatg

SEQ ID NO: 16456 - DNA, 203 bp, Artificial sequence
  synthetic
ggcgcgccagtccttggtaggatatctgacatttctgacatttctgacattactcccatttctgacatttctgacatttctgacatttctgacatttctgacattactcccatttctgacatttctgacatttctgacatttctgacatttctgacatttctgacatttctgacatttctgacatttccgactcggaccgatg

SEQ ID NO: 16457 - DNA, 203 bp, Artificial sequence
  synthetic
ggcgcgccagtccttctttgagcttctgacatttctgacatttctgacattactcccatttctgacatttctgacatttctgacatttctgacatttctgacatttctgacatttctgacattactcccatttctgacattactcccatttctgacattactcccatttctgacattactcccatttccgactcggaccgatg

SEQ ID NO: 16458 - DNA, 203 bp, Artificial sequence
  synthetic
ggcgcgccagtcctctcaaaactatctgacatttctgacatttctgacattactcccatttctgacatttctgacatttctgacatttctgacatttctgacatttctgacatttctgacattactcccatttctgacattactcccatttctgacatttctgacatttctgacattactcccatttccgactcggaccgatg

SEQ ID NO: 16459 - DNA, 203 bp, Artificial sequence
  synthetic
ggcgcgccagtcctaatacagcgatctgacatttctgacatttctgacattactcccatttctgacatttctgacatttctgacatttctgacatttctgacatttctgacatttctgacattactcccatttctgacattactcccatttctgacatttctgacatttctgacatttctgacatttccgactcggaccgatg

SEQ ID NO: 16460 - DNA, 203 bp, Artificial sequence
  synthetic
ggcgcgccagtccttcatggtttttctgacatttctgacatttctgacattactcccatttctgacatttctgacatttctgacatttctgacatttctgacatttctgacatttctgacattactcccatttctgacatttctgacatttctgacattactcccatttctgacattactcccatttccgactcggaccgatg

SEQ ID NO: 16461 - DNA, 203 bp, Artificial sequence
  synthetic
ggcgcgccagtcctctgagaacaatctgacatttctgacatttctgacattactcccatttctgacatttctgacatttctgacatttctgacatttctgacatttctgacatttctgacatttctgacatttctgacatttctgacatttctgacatttctgacatttctgacattactcccatttccgactcggaccgatg

SEQ ID NO: 16462 - DNA, 203 bp, Artificial sequence
  synthetic
ggcgcgccagtccttgttactggatctgacatttctgacatttctgacattactcccatttctgacatttctgacatttctgacatttctgacatttctgacatttctgacatttctgacatttctgacatttctgacatttctgacatttctgacatttctgacatttctgacatttctgacatttccgactcggaccgatg

SEQ ID NO: 16463 - DNA, 203 bp, Artificial sequence
  synthetic
ggcgcgccagtcctcttgcacaaatctgacatttctgacatttctgacattaggagcgagcgaccaaaggaaccataactgatttaatgagccattcgcagtttcactgtaccggccgtgcgtactcagacatgcatggcttaatctttgagacaagcatatgctactggcaggatctctgacatttccgactcggaccgatg

SEQ ID NO: 16464 - DNA, 203 bp, Artificial sequence
  synthetic
ggcgcgccagtccttccatgagagtctgacatttctgacatttctgacattccggcgggttctgacatttctgacatttctgacatttctgacatttctgacatttctgacatttctgacatttctgacatttctgacatttctgacatttctgacatttctgacatttctgacatttcaccggccgtcgactcggaccgatg

SEQ ID NO: 16465 - DNA, 203 bp, Artificial sequence
  synthetic
ggcgcgccagtcctagtccatggatctgacatttctgacatttctgacattccggcgggttctgacatttctgacatttctgacatttctgacatttctgacatttctgacatttctgacatttctgacatttctgacatttctgacatttctgacatttctgacatttctgacatttcccggcgggtcgactcggaccgatg

SEQ ID NO: 16466 - DNA, 203 bp, Artificial sequence
  synthetic
ggcgcgccagtcctcaagtaactgtctgacatttctgacatttctgacattcgtcaattcctttacatttctgacatttctgacatttctgacatttctgacatttctgacatttctgacatttctgacatttctgacatttctgacatttctgacatttctgacatttctgacattttcttggcaaacgactcggaccgatg

SEQ ID NO: 16467 - DNA, 203 bp, Artificial sequence
  synthetic
ggcgcgccagtcctacgcttactttctgacatttctgacatttctgacattcttggcaaatctgacatttctgacatttctgacatttctgacatttctgacatttctgacatttctgacatttctgacatttctgacatttctgacatttctgacatttctgacatttctgacatttcaccggccgtcgactcggaccgatg

SEQ ID NO: 16468 - DNA, 203 bp, Artificial sequence
  synthetic
ggcgcgccagtcctaaccgttaggtctgacatttctgacatttctgacatttacgacggtatctgatcgtcttcgaacctccgactttcgttcttgattaatgaaaacattcttggcaaatgctttcgctctggtccgtcttgcgccggtccaagaatttcacctctagcggcgcattctgacatttccgactcggaccgatg

SEQ ID NO: 16469 - DNA, 203 bp, Artificial sequence
  synthetic
ggcgcgccagtcctcactcagtcttctgacatttctgacatttctgacatttaggctccactcctggtggtgcccttccgtcaattcctttaagtttcagctttgcaaccatactccccccggaacccaaagactttggtttcccggaagctgcccggcgggtcatgggaataacgttctgacatttccgactcggaccgatg

SEQ ID NO: 16470 - DNA, 203 bp, Artificial sequence
  synthetic
ggcgcgccagtcctactcagtgcatctgacatttctgacatttctgacatttcaccggccgttgacatttctgacatttctgacatttctgacatttctgacatttctgacatttctgacatttctgacatttctgacatttctgacatttctgacatttctgacatttctgacatttctgtactccccgactcggaccgatg

SEQ ID NO: 16471 - DNA, 203 bp, Artificial sequence
  synthetic
ggcgcgccagtcctaaactgagattctgacatttctgacatttctgacatttcaccggccgttgacatttctgacatttctgacatttctgacatttctgacatttctgacatttctgacatttctgacatttctgacatttctgacatttctgacatttctgacatttctgaccacggaatcgagaacgactcggaccgatg

SEQ ID NO: 16472 - DNA, 203 bp, Artificial sequence
  synthetic
ggcgcgccagtcctaacctcagtttctgacatttctgacatttctgacatttcaccggccgttgacatttctgacatttctgacatttctgacatttctgacatttctgacatttctgacatttctgacatttctgacatttctgacatttctgacatttctgacatttctgaccgtcaattcctttacgactcggaccgatg

SEQ ID NO: 16473 - DNA, 203 bp, Artificial sequence
  synthetic
ggcgcgccagtcctctttgaggtctctgacatttctgacatttctgacatttcccggcgggttgacatttctgacatttctgacatttctgacatttctgacatttctgacatttctgacatttctgacatttctgacatttctgacatttctgacatttctgacatttctgacatttctgacatttccgactcggaccgatg

SEQ ID NO: 16474 - DNA, 203 bp, Artificial sequence
  synthetic
ggcgcgccagtcctgaaaggtccttctgacatttctgacatttctgacatttcccggcgggttgacatttctgacatttctgacatttctgacatttctgacatttctgacatttctgacatttctgacatttctgacatttctgacatttctgacatttctgacatttctgacatttctgtactccccgactcggaccgatg

SEQ ID NO: 16475 - DNA, 203 bp, Artificial sequence
  synthetic
ggcgcgccagtcctaacgagcgtctctgacatttctgacatttctgacatttcccggcgggttgacatttctgacatttctgacatttctgacatttctgacatttctgacatttctgacatttctgacatttctgacatttctgacatttctgacatttctgacatttctgaccacggaatcgagaacgactcggaccgatg

SEQ ID NO: 16476 - DNA, 203 bp, Artificial sequence
  synthetic
ggcgcgccagtcctgagaccgacttctgacatttctgacatttctgacatttcggaattaaccagacaaatcgctccaccaactaagaacggccatgcaccaccacccacggaatcgagaaagagctatcaatctgtcaatcctgtccgtgtccgggccgggtgaggtttcccgtgttctgacatttccgactcggaccgatg

SEQ ID NO: 16477 - DNA, 203 bp, Artificial sequence
  synthetic
ggcgcgccagtcctgaccggtcattctgacatttctgacatttctgacatttctgaattaaccagacaaatcgctccaccaactaagaacggccatgcaccaccacccacggaatcgagaaagagctatcaatctgtcaatcctgtccgtgtccgggccgggtgaggtttccccatttctgacatttccgactcggaccgatg

SEQ ID NO: 16478 - DNA, 203 bp, Artificial sequence
  synthetic
ggcgcgccagtcctgaaccttgcttctgacatttctgacatttctgacatttctgacaaccggccgttttctgacatttctgacatttctgacatttctgacatttctgacatttctgacatttctgacatttctgacatttctgacatttctgacatttctgacatttctgacatttcaccggccgtcgactcggaccgatg

SEQ ID NO: 16479 - DNA, 203 bp, Artificial sequence
  synthetic
ggcgcgccagtcctgagctgtatctctgacatttctgacatttctgacatttctgacacgtcaattcctttagacatttctgacatttctgacatttctgacatttctgacatttctgacatttctgacatttctgacatttctgacatttctgacatttctgacatttctgacattttcttggcaaacgactcggaccgatg

SEQ ID NO: 16480 - DNA, 203 bp, Artificial sequence
  synthetic
ggcgcgccagtcctgagttaccgttctgacatttctgacatttctgacatttctgacatactcctggtggtgcccttccgtcaattcctttaagtttcagctttgcaaccatactccccccggaacccaaagactttggtttcccggaagctgcccggcgggtcatgggctgacatttctgacatttccgactcggaccgatg

SEQ ID NO: 16481 - DNA, 203 bp, Artificial sequence
  synthetic
ggcgcgccagtcctacgacctctctctgacatttctgacatttctgacatttctgacatgcgaccaaaggaaccataactgatttaatgagccattcgcagtttcactgtaccggccgtgcgtactcagacatgcatggcttaatctttgagacaagcatatgctactgctgacatttctgacatttccgactcggaccgatg

SEQ ID NO: 16482 - DNA, 203 bp, Artificial sequence
  synthetic
ggcgcgccagtcctgacctctgcttctgacatttctgacatttctgacatttctgacattaccagacaaatcgctccaccaactaagaacggccatgcaccaccacccacggaatcgagaaagagctatcaatctgtcaatcctgtccgtgtccgggccgggtgaggttctgacatttctgacatttccgactcggaccgatg

SEQ ID NO: 16483 - DNA, 203 bp, Artificial sequence
  synthetic
ggcgcgccagtcctgactcagagatctgacatttctgacatttctgacatttctgacattaccggccgttctgacatttctgacatttctgacatttctgacatttctgacatttctgacatttctgacatttctgacatttctgacatttctgacatttctgacatttctgacatttctgacatttccgactcggaccgatg

SEQ ID NO: 16484 - DNA, 203 bp, Artificial sequence
  synthetic
ggcgcgccagtcctgacggtcatttctgacatttctgacatttctgacatttctgacattaccggccgttctgacatttctgacatttctgacatttctgacatttctgacatttctgacatttctgacatttctgacatttctgacatttctgacatttctgacatttctgacatttctgtactccccgactcggaccgatg

SEQ ID NO: 16485 - DNA, 203 bp, Artificial sequence
  synthetic
ggcgcgccagtcctgagcagctcatctgacatttctgacatttctgacatttctgacattcacggaatcgagaacatttctgacatttctgacatttctgacatttctgacatttctgacatttctgacatttctgacatttctgacatttctgacatttctgacatttctgacatttcccggcgggtcgactcggaccgatg

SEQ ID NO: 16486 - DNA, 203 bp, Artificial sequence
  synthetic
ggcgcgccagtcctacggtcatgatctgacatttctgacatttctgacatttctgacattccggcgggttctgacatttctgacatttctgacatttctgacatttctgacatttctgacatttctgacatttctgacatttctgacatttctgacatttctgacatttctgacatttctgtactccccgactcggaccgatg

SEQ ID NO: 16487 - DNA, 203 bp, Artificial sequence
  synthetic
ggcgcgccagtccttggattctgttctgacatttctgacatttctgacatttctgacattccggcgggttctgacatttctgacatttctgacatttctgacatttctgacatttctgacatttctgacatttctgacatttctgacatttctgacatttctgacatttctgaccacggaatcgagaacgactcggaccgatg

SEQ ID NO: 16488 - DNA, 203 bp, Artificial sequence
  synthetic
ggcgcgccagtcctcagaagagtctctgacatttctgacatttctgacatttctgacattcgtcaattcctttacatttctgacatttctgacatttctgacatttctgacatttctgacatttctgacatttctgacatttctgacatttctgacatttctgacatttctgacatttcccggcgggtcgactcggaccgatg

SEQ ID NO: 16489 - DNA, 203 bp, Artificial sequence
  synthetic
ggcgcgccagtcctttgagtgagttctgacatttctgacatttctgacatttctgacattcttggcaaatctgacatttctgacatttctgacatttctgacatttctgacatttctgacatttctgacatttctgacatttctgacatttctgacatttctgacatttctgacatttctgacatttccgactcggaccgatg

SEQ ID NO: 16490 - DNA, 203 bp, Artificial sequence
  synthetic
ggcgcgccagtcctgaacagtctctctgacatttctgacatttctgacatttctgacattcttggcaaatctgacatttctgacatttctgacatttctgacatttctgacatttctgacatttctgacatttctgacatttctgacatttctgacatttctgacatttctgaccgtcaattcctttacgactcggaccgatg

SEQ ID NO: 16491 - DNA, 203 bp, Artificial sequence
  synthetic
ggcgcgccagtcctagagtagtcatctgacatttctgacatttctgacatttctgacatttactccctttctgacatttctgacatttctgacatttctgacatttctgacatttctgacatttctgacatttctgacatttctgacatttctgacatttctgacatttctgacatttcaccggccgtcgactcggaccgatg

SEQ ID NO: 16492 - DNA, 203 bp, Artificial sequence
  synthetic
ggcgcgccagtcctttaactagtttctgacatttctgacatttctgacatttctgacatttccgtcaattcctttatttctgacatttctgacatttctgacatttctgacatttctgacatttctgacatttctgacatttctgacatttctgacatttctgacatttctgacatttctgtactccccgactcggaccgatg

SEQ ID NO: 16493 - DNA, 203 bp, Artificial sequence
  synthetic
ggcgcgccagtccttgactactcatctgacatttctgacatttctgacatttctgacatttctagacaaatcgctccaccaactaagaacggccatgcaccaccacccacggaatcgagaaagagctatcaatctgtcaatcctgtccgtgtccgggccgggtgaatttctgacatttctgacatttccgactcggaccgatg

SEQ ID NO: 16494 - DNA, 203 bp, Artificial sequence
  synthetic
ggcgcgccagtcctttcaagaagttctgacatttctgacatttctgacatttctgacatttctccaaaggaaccataactgatttaatgagccattcgcagtttcactgtaccggccgtgcgtactcagacatgcatggcttaatctttgagacaagcatatgctatttctgacatttctgacatttccgactcggaccgatg

SEQ ID NO: 16495 - DNA, 203 bp, Artificial sequence
  synthetic
ggcgcgccagtcctctacttaacatctgacatttctgacatttctgacatttctgacatttctccggcgggtgacatttctgacatttctgacatttctgacatttctgacatttctgacatttctgacatttctgacatttctgacatttctgacatttctgacatttctgacattttcttggcaaacgactcggaccgatg

SEQ ID NO: 16496 - DNA, 203 bp, Artificial sequence
  synthetic
ggcgcgccagtccttgagtagagttctgacatttctgacatttctgacatttctgacatttctgaaccggccgtcatttctgacatttctgacatttctgacatttctgacatttctgacatttctgacatttctgacatttctgacatttctgacatttctgacatttctgacatttcccggcgggtcgactcggaccgatg

SEQ ID NO: 16497 - DNA, 203 bp, Artificial sequence
  synthetic
ggcgcgccagtcctcctactactttctgacatttctgacatttctgacatttctgacatttctgaagtcaaattaagccgcaggctccactcctggtggtgcccttccgtcaattcctttaagtttcagctttgcaaccatactccccccggaacccaaagacacatttctgacatttctgacatttccgactcggaccgatg

SEQ ID NO: 16498 - DNA, 203 bp, Artificial sequence
  synthetic
ggcgcgccagtcctctctgaagtttctgacatttctgacatttctgacatttctgacatttctgacaaccggccgttttctgacatttctgacatttctgacatttctgacatttctgacatttctgacatttctgacatttctgacatttctgacatttctgacatttctgaccacggaatcgagaacgactcggaccgatg

SEQ ID NO: 16499 - DNA, 203 bp, Artificial sequence
  synthetic
ggcgcgccagtcctaacttctctatctgacatttctgacatttctgacatttctgacatttctgacacacggaatcgagaagacatttctgacatttctgacatttctgacatttctgacatttctgacatttctgacatttctgacatttctgacatttctgacatttctgacatttcaccggccgtcgactcggaccgatg

SEQ ID NO: 16500 - DNA, 203 bp, Artificial sequence
  synthetic
ggcgcgccagtcctaggtctgttgtctgacatttctgacatttctgacatttctgacatttctgacaccggcgggttttctgacatttctgacatttctgacatttctgacatttctgacatttctgacatttctgacatttctgacatttctgacatttctgacatttctgaccgtcaattcctttacgactcggaccgatg

SEQ ID NO: 16501 - DNA, 203 bp, Artificial sequence
  synthetic
ggcgcgccagtcctccaacaggcttctgacatttctgacatttctgacatttctgacatttctgacacggaatcgagaactgacatttctgacatttctgacatttctgacatttctgacatttctgacatttctgacatttctgacatttctgacatttctgacatttctgacattttcttggcaaacgactcggaccgatg

SEQ ID NO: 16502 - DNA, 203 bp, Artificial sequence
  synthetic
ggcgcgccagtccttagttaagaatctgacatttctgacatttctgacatttctgacatttctgacacgtcaattcctttagacatttctgacatttctgacatttctgacatttctgacatttctgacatttctgacatttctgacatttctgacatttctgacatttctgacatttcccggcgggtcgactcggaccgatg

SEQ ID NO: 16503 - DNA, 203 bp, Artificial sequence
  synthetic
ggcgcgccagtccttagatacaagtctgacatttctgacatttctgacatttctgacatttctgacataccggccgtttctgacataccggccgtttctgacataccggccgtttctgacataccggccgtttctgacataccggccgtttctgacataccggccgtttctgacatttctgacatttccgactcggaccgatg

SEQ ID NO: 16504 - DNA, 203 bp, Artificial sequence
  synthetic
ggcgcgccagtcctacaaagtacttctgacatttctgacatttctgacatttctgacatttctgacataccggccgtttctgacataccggccgtttctgacataccggccgtttctgacataccggccgtttctgacatttctgacatttctgacataccggccgtttctgacataccggccgtttccgactcggaccgatg

SEQ ID NO: 16505 - DNA, 203 bp, Artificial sequence
  synthetic
ggcgcgccagtcctaaagtaccattctgacatttctgacatttctgacatttctgacatttctgacataccggccgtttctgacataccggccgtttctgacataccggccgtttctgacatttctgacatttctgacataccggccgtttctgacatttctgacatttctgacataccggccgtttccgactcggaccgatg

SEQ ID NO: 16506 - DNA, 203 bp, Artificial sequence
  synthetic
ggcgcgccagtcctactgctttggtctgacatttctgacatttctgacatttctgacatttctgacataccggccgtttctgacataccggccgtttctgacatttctgacatttctgacataccggccgtttctgacataccggccgtttctgacataccggccgtttctgacatttctgacatttccgactcggaccgatg

SEQ ID NO: 16507 - DNA, 203 bp, Artificial sequence
  synthetic
ggcgcgccagtcctaacctttggttctgacatttctgacatttctgacatttctgacatttctgacataccggccgtttctgacataccggccgtttctgacatttctgacatttctgacataccggccgtttctgacataccggccgtttctgacatttctgacatttctgacataccggccgtttccgactcggaccgatg

SEQ ID NO: 16508 - DNA, 203 bp, Artificial sequence
  synthetic
ggcgcgccagtcctcaactacaggtctgacatttctgacatttctgacatttctgacatttctgacataccggccgtttctgacataccggccgtttctgacatttctgacatttctgacataccggccgtttctgacatttctgacatttctgacataccggccgtttctgacatttctgacatttccgactcggaccgatg

SEQ ID NO: 16509 - DNA, 203 bp, Artificial sequence
  synthetic
ggcgcgccagtcctgagctactcttctgacatttctgacatttctgacatttctgacatttctgacataccggccgtttctgacataccggccgtttctgacatttctgacatttctgacataccggccgtttctgacatttctgacatttctgacatttctgacatttctgacataccggccgtttccgactcggaccgatg

SEQ ID NO: 16510 - DNA, 203 bp, Artificial sequence
  synthetic
ggcgcgccagtcctagtccaggtttctgacatttctgacatttctgacatttctgacatttctgacataccggccgtttctgacataccggccgtttctgacatttctgacatttctgacataccggccgtttctgacatttctgacatttctgacatttctgacatttctgacatttctgacatttccgactcggaccgatg

SEQ ID NO: 16511 - DNA, 203 bp, Artificial sequence
  synthetic
ggcgcgccagtcctaaaagtacattctgacatttctgacatttctgacatttctgacatttctgacataccggccgtttctgacataccggccgtttctgacatttctgacatttctgacatttctgacatttctgacatttctgacatttctgacataccggccgtttctgacataccggccgtttccgactcggaccgatg

SEQ ID NO: 16512 - DNA, 203 bp, Artificial sequence
  synthetic
ggcgcgccagtcctacgactgttctctgacatttctgacatttctgacatttctgacatttctgacataccggccgtttctgacataccggccgtttctgacatttctgacatttctgacatttctgacatttctgacatttctgacatttctgacataccggccgtttctgacatttctgacatttccgactcggaccgatg

SEQ ID NO: 16513 - DNA, 203 bp, Artificial sequence
  synthetic
ggcgcgccagtcctgaatctggtgtctgacatttctgacatttctgacatttctgacatttctgacataccggccgtttctgacataccggccgtttctgacatttctgacatttctgacatttctgacatttctgacatttctgacatttctgacatttctgacatttctgacataccggccgtttccgactcggaccgatg

SEQ ID NO: 16514 - DNA, 203 bp, Artificial sequence
  synthetic
ggcgcgccagtcctcacagtggtttctgacatttctgacatttctgacatttctgacatttctgacataccggccgtttctgacatttctgacatttctgacataccggccgtttctgacataccggccgtttctgacataccggccgtttctgacatttctgacatttctgacataccggccgtttccgactcggaccgatg

SEQ ID NO: 16515 - DNA, 203 bp, Artificial sequence
  synthetic
ggcgcgccagtcctagtggtgctgtctgacatttctgacatttctgacatttctgacatttctgacataccggccgtttctgacatttctgacatttctgacataccggccgtttctgacataccggccgtttctgacatttctgacatttctgacataccggccgtttctgacataccggccgtttccgactcggaccgatg

SEQ ID NO: 16516 - DNA, 203 bp, Artificial sequence
  synthetic
ggcgcgccagtccttgaccacttctctgacatttctgacatttctgacatttctgacatttctgacataccggccgtttctgacatttctgacatttctgacataccggccgtttctgacataccggccgtttctgacatttctgacatttctgacataccggccgtttctgacatttctgacatttccgactcggaccgatg

SEQ ID NO: 16517 - DNA, 203 bp, Artificial sequence
  synthetic
ggcgcgccagtcctcaagagtggttctgacatttctgacatttctgacatttctgacatttctgacataccggccgtttctgacatttctgacatttctgacataccggccgtttctgacataccggccgtttctgacatttctgacatttctgacatttctgacatttctgacataccggccgtttccgactcggaccgatg

SEQ ID NO: 16518 - DNA, 203 bp, Artificial sequence
  synthetic
ggcgcgccagtccttcaagttctttctgacatttctgacatttctgacatttctgacatttctgacataccggccgtttctgacatttctgacatttctgacataccggccgtttctgacatttctgacatttctgacataccggccgtttctgacatttctgacatttctgacataccggccgtttccgactcggaccgatg

SEQ ID NO: 16519 - DNA, 203 bp, Artificial sequence
  synthetic
ggcgcgccagtcctttgtaccagttctgacatttctgacatttctgacatttctgacatttctgacataccggccgtttctgacatttctgacatttctgacataccggccgtttctgacatttctgacatttctgacataccggccgtttctgacatttctgacatttctgacatttctgacatttccgactcggaccgatg

SEQ ID NO: 16520 - DNA, 203 bp, Artificial sequence
  synthetic
ggcgcgccagtcctttggtgactgtctgacatttctgacatttctgacatttctgacatttctgacataccggccgtttctgacatttctgacatttctgacataccggccgtttctgacatttctgacatttctgacatttctgacatttctgacataccggccgtttctgacatttctgacatttccgactcggaccgatg

SEQ ID NO: 16521 - DNA, 203 bp, Artificial sequence
  synthetic
ggcgcgccagtcctagagctctggtctgacatttctgacatttctgacatttctgacatttctgacataccggccgtttctgacatttctgacatttctgacataccggccgtttctgacatttctgacatttctgacatttctgacatttctgacatttctgacatttctgacataccggccgtttccgactcggaccgatg

SEQ ID NO: 16522 - DNA, 203 bp, Artificial sequence
  synthetic
ggcgcgccagtcctatgagtacgttctgacatttctgacatttctgacatttctgacatttctgacataccggccgtttctgacatttctgacatttctgacatttctgacatttctgacataccggccgtttctgacataccggccgtttctgacataccggccgtttctgacatttctgacatttccgactcggaccgatg

SEQ ID NO: 16523 - DNA, 203 bp, Artificial sequence
  synthetic
ggcgcgccagtcctacgtactcgttctgacatttctgacatttctgacatttctgacatttctgacataccggccgtttctgacatttctgacatttctgacatttctgacatttctgacataccggccgtttctgacatttctgacatttctgacataccggccgtttctgacataccggccgtttccgactcggaccgatg

SEQ ID NO: 16524 - DNA, 203 bp, Artificial sequence
  synthetic
ggcgcgccagtcctttcaaccggttctgacatttctgacatttctgacatttctgacatttctgacataccggccgtttctgacatttctgacatttctgacatttctgacatttctgacataccggccgtttctgacatttctgacatttctgacataccggccgtttctgacatttctgacatttccgactcggaccgatg

SEQ ID NO: 16525 - DNA, 203 bp, Artificial sequence
  synthetic
ggcgcgccagtcctccatgaagattctgacatttctgacatttctgacatttctgacatttctgacataccggccgtttctgacatttctgacatttctgacatttctgacatttctgacatttctgacatttctgacataccggccgtttctgacataccggccgtttctgacataccggccgtttccgactcggaccgatg

SEQ ID NO: 16526 - DNA, 203 bp, Artificial sequence
  synthetic
ggcgcgccagtccttgaatcttcatctgacatttctgacatttctgacatttctgacatttctgacataccggccgtttctgacatttctgacatttctgacatttctgacatttctgacatttctgacatttctgacataccggccgtttctgacatttctgacatttctgacataccggccgtttccgactcggaccgatg

SEQ ID NO: 16527 - DNA, 203 bp, Artificial sequence
  synthetic
ggcgcgccagtcctttgaaagacttctgacatttctgacatttctgacatttctgacatttctgacataccggccgtttctgacatttctgacatttctgacatttctgacatttctgacatttctgacatttctgacataccggccgtttctgacatttctgacatttctgacatttctgacatttccgactcggaccgatg

SEQ ID NO: 16528 - DNA, 203 bp, Artificial sequence
  synthetic
ggcgcgccagtcctttagcctaaatctgacatttctgacatttctgacatttctgacatttctgacataccggccgtttctgacatttctgacatttctgacatttctgacatttctgacatttctgacatttctgacatttctgacatttctgacataccggccgtttctgacataccggccgtttccgactcggaccgatg

SEQ ID NO: 16529 - DNA, 203 bp, Artificial sequence
  synthetic
ggcgcgccagtcctacgtagacagtctgacatttctgacatttctgacatttctgacatttctgacataccggccgtttctgacatttctgacatttctgacatttctgacatttctgacatttctgacatttctgacatttctgacatttctgacataccggccgtttctgacatttctgacatttccgactcggaccgatg

SEQ ID NO: 16530 - DNA, 203 bp, Artificial sequence
  synthetic
ggcgcgccagtcctactgaccgagtctgacatttctgacatttctgacatttctgacatttctgacatactccccatttctgacatttctgacatttctgacatttctgacatttctgacatttctgacatttctgacatttctgacatttctgacatttctgacatttctgacatttcccggcgggtcgactcggaccgatg

SEQ ID NO: 16531 - DNA, 203 bp, Artificial sequence
  synthetic
ggcgcgccagtcctaagctagagttctgacatttctgacatttctgacatttctgacatttctgacatactccccccggaacccaaagactttggtttcccggaagctgcccggcgggtcatgggaataacgccgccgcatcgccggtcggcatcgtttattgacatttctgacatttctgacatttccgactcggaccgatg

SEQ ID NO: 16532 - DNA, 203 bp, Artificial sequence
  synthetic
ggcgcgccagtccttggcctgatttctgacatttctgacatttctgacatttctgacatttctgacatcacggaatcgagaaacatcacggaatcgagaaacatcacggaatcgagaaacatcacggaatcgagaaacatttctgacatttctgacatttctgacatttctgacatttctgacatttccgactcggaccgatg

SEQ ID NO: 16533 - DNA, 203 bp, Artificial sequence
  synthetic
ggcgcgccagtccttaaaccactatctgacatttctgacatttctgacatttctgacatttctgacatcacggaatcgagaaacatcacggaatcgagaaacatttctgacatttctgacatttctgacatttctgacatcacggaatcgagaaacatttctgacatttctgacatttctgacatttccgactcggaccgatg

SEQ ID NO: 16534 - DNA, 203 bp, Artificial sequence
  synthetic
ggcgcgccagtcctactagtggtttctgacatttctgacatttctgacatttctgacatttctgacatcacggaatcgagaaacatcacggaatcgagaaacatttctgacatttctgacatttctgacatttctgacatttctgacatttctgacatcacggaatcgagaaacatttctgacatttccgactcggaccgatg

SEQ ID NO: 16535 - DNA, 203 bp, Artificial sequence
  synthetic
ggcgcgccagtcctcctcagcatatctgacatttctgacatttctgacatttctgacatttctgacatcacggaatcgagaaacatttctgacatttctgacatcacggaatcgagaaacatttctgacatttctgacatcacggaatcgagaaacatttctgacatttctgacatttctgacatttccgactcggaccgatg

SEQ ID NO: 16536 - DNA, 203 bp, Artificial sequence
  synthetic
ggcgcgccagtcctcaaaggtgtttctgacatttctgacatttctgacatttctgacatttctgacatcacggaatcgagaaacatttctgacatttctgacatttctgacatttctgacatttctgacatttctgacatcacggaatcgagaaacatcacggaatcgagaaacatttctgacatttccgactcggaccgatg

SEQ ID NO: 16537 - DNA, 203 bp, Artificial sequence
  synthetic
ggcgcgccagtcctctacaccatgtctgacatttctgacatttctgacatttctgacatttctgacatcacggaatcgagaaacatttctgacatttctgacatttctgacatttctgacatttctgacatttctgacatcacggaatcgagaaacatttctgacatttctgacatttctgacatttccgactcggaccgatg

SEQ ID NO: 16538 - DNA, 203 bp, Artificial sequence
  synthetic
ggcgcgccagtcctattcttcatgtctgacatttctgacatttctgacatttctgacatttctgacatccggcgggtttctgacatccggcgggtttctgacatccggcgggtttctgacatccggcgggtttctgacatccggcgggtttctgacatccggcgggtttctgacatccggcgggtttccgactcggaccgatg

SEQ ID NO: 16539 - DNA, 203 bp, Artificial sequence
  synthetic
ggcgcgccagtcctcttactgatctctgacatttctgacatttctgacatttctgacatttctgacatccggcgggtttctgacatccggcgggtttctgacatccggcgggtttctgacatccggcgggtttctgacatccggcgggtttctgacatccggcgggtttctgacatccggcgggtttccgactcggaccgatg

SEQ ID NO: 16540 - DNA, 203 bp, Artificial sequence
  synthetic
ggcgcgccagtcctaagagaactctctgacatttctgacatttctgacatttctgacatttctgacatccggcgggtttctgacatccggcgggtttctgacatccggcgggtttctgacatccggcgggtttctgacatccggcgggtttctgacatccggcgggtttctgacatccggcgggtttccgactcggaccgatg

SEQ ID NO: 16541 - DNA, 203 bp, Artificial sequence
  synthetic
ggcgcgccagtccttcaactactctctgacatttctgacatttctgacatttctgacatttctgacatccggcgggtttctgacatccggcgggtttctgacatccggcgggtttctgacatccggcgggtttctgacatccggcgggtttctgacatccggcgggtttctgacatccggcgggtttccgactcggaccgatg

SEQ ID NO: 16542 - DNA, 203 bp, Artificial sequence
  synthetic
ggcgcgccagtcctcacttgtatctctgacatttctgacatttctgacatttctgacatttctgacatccggcgggtttctgacatccggcgggtttctgacatccggcgggtttctgacatccggcgggtttctgacatccggcgggtttctgacatccggcgggtttctgacatccggcgggtttccgactcggaccgatg

SEQ ID NO: 16543 - DNA, 203 bp, Artificial sequence
  synthetic
ggcgcgccagtccttatgaaggtctctgacatttctgacatttctgacatttctgacatttctgacatccggcgggtttctgacatccggcgggtttctgacatccggcgggtttctgacatccggcgggtttctgacatccggcgggtttctgacatccggcgggtttctgacatccggcgggtttccgactcggaccgatg

SEQ ID NO: 16544 - DNA, 203 bp, Artificial sequence
  synthetic
ggcgcgccagtcctgagattctgatctgacatttctgacatttctgacatttctgacatttctgacatccggcgggtttctgacatccggcgggtttctgacatccggcgggtttctgacatccggcgggtttctgacatttctgacatttctgacatccggcgggtttctgacatttctgacatttccgactcggaccgatg

SEQ ID NO: 16545 - DNA, 203 bp, Artificial sequence
  synthetic
ggcgcgccagtcctttacactgtctctgacatttctgacatttctgacatttctgacatttctgacatccggcgggtttctgacatccggcgggtttctgacatccggcgggtttctgacatccggcgggtttctgacatttctgacatttctgacatttctgacatttctgacatttctgacatttccgactcggaccgatg

SEQ ID NO: 16546 - DNA, 203 bp, Artificial sequence
  synthetic
ggcgcgccagtccttgagttgttctctgacatttctgacatttctgacatttctgacatttctgacatccggcgggtttctgacatccggcgggtttctgacatccggcgggtttctgacatttctgacatttctgacatttctgacatttctgacatttctgacatttctgacatccggcgggtttccgactcggaccgatg

SEQ ID NO: 16547 - DNA, 203 bp, Artificial sequence
  synthetic
ggcgcgccagtcctgacagtatgatctgacatttctgacatttctgacatttctgacatttctgacatccggcgggtttctgacatccggcgggtttctgacatccggcgggtttctgacatttctgacatttctgacatttctgacatttctgacatttctgacatttctgacatttctgacatttccgactcggaccgatg

SEQ ID NO: 16548 - DNA, 203 bp, Artificial sequence
  synthetic
ggcgcgccagtccttaaaggtctctctgacatttctgacatttctgacatttctgacatttctgacatccggcgggtttctgacatccggcgggtttctgacatttctgacatttctgacatccggcgggtttctgacatccggcgggtttctgacatccggcgggtttctgacatttctgacatttccgactcggaccgatg

SEQ ID NO: 16549 - DNA, 203 bp, Artificial sequence
  synthetic
ggcgcgccagtcctgacttgtaagtctgacatttctgacatttctgacatttctgacatttctgacatccggcgggtttctgacatccggcgggtttctgacatttctgacatttctgacatccggcgggtttctgacatccggcgggtttctgacatttctgacatttctgacatccggcgggtttccgactcggaccgatg

SEQ ID NO: 16550 - DNA, 203 bp, Artificial sequence
  synthetic
ggcgcgccagtcctgactttgacttctgacatttctgacatttctgacatttctgacatttctgacatccggcgggtttctgacatccggcgggtttctgacatttctgacatttctgacatccggcgggtttctgacatccggcgggtttctgacatttctgacatttctgacatttctgacatttccgactcggaccgatg

SEQ ID NO: 16551 - DNA, 203 bp, Artificial sequence
  synthetic
ggcgcgccagtcctaactacgttctctgacatttctgacatttctgacatttctgacatttctgacatccggcgggtttctgacatccggcgggtttctgacatttctgacatttctgacatccggcgggtttctgacatttctgacatttctgacatccggcgggtttctgacatccggcgggtttccgactcggaccgatg

SEQ ID NO: 16552 - DNA, 203 bp, Artificial sequence
  synthetic
ggcgcgccagtcctgacgtactaatctgacatttctgacatttctgacatttctgacatttctgacatccggcgggtttctgacatccggcgggtttctgacatttctgacatttctgacatccggcgggtttctgacatttctgacatttctgacatccggcgggtttctgacatttctgacatttccgactcggaccgatg

SEQ ID NO: 16553 - DNA, 203 bp, Artificial sequence
  synthetic
ggcgcgccagtcctgaccaacttatctgacatttctgacatttctgacatttctgacatttctgacatccggcgggtttctgacatccggcgggtttctgacatttctgacatttctgacatccggcgggtttctgacatttctgacatttctgacatttctgacatttctgacatccggcgggtttccgactcggaccgatg

SEQ ID NO: 16554 - DNA, 203 bp, Artificial sequence
  synthetic
ggcgcgccagtcctgaggtagttttctgacatttctgacatttctgacatttctgacatttctgacatccggcgggtttctgacatccggcgggtttctgacatttctgacatttctgacatttctgacatttctgacatccggcgggtttctgacatttctgacatttctgacatccggcgggtttccgactcggaccgatg

SEQ ID NO: 16555 - DNA, 203 bp, Artificial sequence
  synthetic
ggcgcgccagtcctgacgttgtattctgacatttctgacatttctgacatttctgacatttctgacatccggcgggtttctgacatccggcgggtttctgacatttctgacatttctgacatttctgacatttctgacatccggcgggtttctgacatttctgacatttctgacatttctgacatttccgactcggaccgatg

SEQ ID NO: 16556 - DNA, 203 bp, Artificial sequence
  synthetic
ggcgcgccagtcctcttcacctcttctgacatttctgacatttctgacatttctgacatttctgacatccggcgggtttctgacatccggcgggtttctgacatttctgacatttctgacatttctgacatttctgacatttctgacatttctgacatttctgacatttctgacatccggcgggtttccgactcggaccgatg

SEQ ID NO: 16557 - DNA, 203 bp, Artificial sequence
  synthetic
ggcgcgccagtccttttgagtcgttctgacatttctgacatttctgacatttctgacatttctgacatccggcgggtttctgacatttctgacatttctgacatccggcgggtttctgacatccggcgggtttctgacatccggcgggtttctgacatccggcgggtttctgacatccggcgggtttccgactcggaccgatg

SEQ ID NO: 16558 - DNA, 203 bp, Artificial sequence
  synthetic
ggcgcgccagtcctaacaggtgagtctgacatttctgacatttctgacatttctgacatttctgacatccggcgggtttctgacatttctgacatttctgacatccggcgggtttctgacatccggcgggtttctgacatttctgacatttctgacatttctgacatttctgacatccggcgggtttccgactcggaccgatg

SEQ ID NO: 16559 - DNA, 203 bp, Artificial sequence
  synthetic
ggcgcgccagtcctctgttagaggtctgacatttctgacatttctgacatttctgacatttctgacatccggcgggtttctgacatttctgacatttctgacatccggcgggtttctgacatccggcgggtttctgacatttctgacatttctgacatttctgacatttctgacatttctgacatttccgactcggaccgatg

SEQ ID NO: 16560 - DNA, 203 bp, Artificial sequence
  synthetic
ggcgcgccagtcctctctgtgcagtctgacatttctgacatttctgacatttctgacatttctgacatccggcgggtttctgacatttctgacatttctgacatccggcgggtttctgacatttctgacatttctgacatccggcgggtttctgacatccggcgggtttctgacatttctgacatttccgactcggaccgatg

SEQ ID NO: 16561 - DNA, 203 bp, Artificial sequence
  synthetic
ggcgcgccagtcctttcagaacgttctgacatttctgacatttctgacatttctgacatttctgacatccggcgggtttctgacatttctgacatttctgacatttctgacatttctgacatccggcgggtttctgacatttctgacatttctgacatccggcgggtttctgacatccggcgggtttccgactcggaccgatg

SEQ ID NO: 16562 - DNA, 203 bp, Artificial sequence
  synthetic
ggcgcgccagtcctgaatctcacttctgacatttctgacatttctgacatttctgacatttctgacatccggcgggtttctgacatttctgacatttctgacatttctgacatttctgacatttctgacatttctgacatccggcgggtttctgacatccggcgggtttctgacatccggcgggtttccgactcggaccgatg

SEQ ID NO: 16563 - DNA, 203 bp, Artificial sequence
  synthetic
ggcgcgccagtccttcaaggcgtttctgacatttctgacatttctgacatttctgacatttctgacatccggcgggtttctgacatttctgacatttctgacatttctgacatttctgacatttctgacatttctgacatccggcgggtttctgacatttctgacatttctgacatccggcgggtttccgactcggaccgatg

SEQ ID NO: 16564 - DNA, 203 bp, Artificial sequence
  synthetic
ggcgcgccagtcctcaagaacatttctgacatttctgacatttctgacatttctgacatttctgacatccggcgggtttctgacatttctgacatttctgacatttctgacatttctgacatttctgacatttctgacatttctgacatttctgacatccggcgggtttctgacatccggcgggtttccgactcggaccgatg

SEQ ID NO: 16565 - DNA, 203 bp, Artificial sequence
  synthetic
ggcgcgccagtcctgacgttgaggtctgacatttctgacatttctgacatttctgacatttctgacatccggcgggtttctgacatttctgacatttctgacatttctgacatttctgacatttctgacatttctgacatttctgacatttctgacatccggcgggtttctgacatttctgacatttccgactcggaccgatg

SEQ ID NO: 16566 - DNA, 203 bp, Artificial sequence
  synthetic
ggcgcgccagtccttggcctttgatctgacatttctgacatttctgacatttctgacatttctgacatcgtcaattcctttaacatcgtcaattcctttaacatcgtcaattcctttaacatcgtcaattcctttaacatttctgacatttctgacatcgtcaattcctttaacatttctgacatttccgactcggaccgatg

SEQ ID NO: 16567 - DNA, 203 bp, Artificial sequence
  synthetic
ggcgcgccagtcctctcaaggccatctgacatttctgacatttctgacatttctgacatttctgacatcgtcaattcctttaacatcgtcaattcctttaacatcgtcaattcctttaacatcgtcaattcctttaacatttctgacatttctgacatttctgacatttctgacatttctgacatttccgactcggaccgatg

SEQ ID NO: 16568 - DNA, 203 bp, Artificial sequence
  synthetic
ggcgcgccagtccttccaccgacttctgacatttctgacatttctgacatttctgacatttctgacatcgtcaattcctttaacatcgtcaattcctttaacatcgtcaattcctttaacatttctgacatttctgacatttctgacatttctgacatttctgacatttctgacatttctgacatttccgactcggaccgatg

SEQ ID NO: 16569 - DNA, 203 bp, Artificial sequence
  synthetic
ggcgcgccagtcctatggactctatctgacatttctgacatttctgacatttctgacatttctgacatcgtcaattcctttaacatcgtcaattcctttaacatttctgacatttctgacatcgtcaattcctttaacatttctgacatttctgacatttctgacatttctgacatttctgacatttccgactcggaccgatg

SEQ ID NO: 16570 - DNA, 203 bp, Artificial sequence
  synthetic
ggcgcgccagtcctttaggactaatctgacatttctgacatttctgacatttctgacatttctgacatcgtcaattcctttaacatcgtcaattcctttaacatttctgacatttctgacatttctgacatttctgacatttctgacatttctgacatttctgacatttctgacatttctgacatttccgactcggaccgatg

SEQ ID NO: 16571 - DNA, 203 bp, Artificial sequence
  synthetic
ggcgcgccagtcctacgtttctggtctgacatttctgacatttctgacatttctgacatttctgacatcgtcaattcctttaacatttctgacatttctgacatcgtcaattcctttaacatcgtcaattcctttaacatcgtcaattcctttaacatttctgacatttctgacatttctgacatttccgactcggaccgatg

SEQ ID NO: 16572 - DNA, 203 bp, Artificial sequence
  synthetic
ggcgcgccagtcctcagtttctgctctgacatttctgacatttctgacatttctgacatttctgacatcgtcaattcctttaacatttctgacatttctgacatcgtcaattcctttaacatcgtcaattcctttaacatttctgacatttctgacatcgtcaattcctttaacatttctgacatttccgactcggaccgatg

SEQ ID NO: 16573 - DNA, 203 bp, Artificial sequence
  synthetic
ggcgcgccagtcctacgatacagctctgacatttctgacatttctgacatttctgacatttctgacatcgtcaattcctttaacatttctgacatttctgacatcgtcaattcctttaacatttctgacatttctgacatcgtcaattcctttaacatcgtcaattcctttaacatttctgacatttccgactcggaccgatg

SEQ ID NO: 16574 - DNA, 203 bp, Artificial sequence
  synthetic
ggcgcgccagtcctctctaactgctctgacatttctgacatttctgacatttctgacatttctgacatcgtcaattcctttaacatttctgacatttctgacatcgtcaattcctttaacatttctgacatttctgacatttctgacatttctgacatcgtcaattcctttaacatttctgacatttccgactcggaccgatg

SEQ ID NO: 16575 - DNA, 203 bp, Artificial sequence
  synthetic
ggcgcgccagtcctatgaaaaggctctgacatttctgacatttctgacatttctgacatttctgacatcgtcaattcctttaacatttctgacatttctgacatttctgacatttctgacatcgtcaattcctttaacatcgtcaattcctttaacatttctgacatttctgacatttctgacatttccgactcggaccgatg

SEQ ID NO: 16576 - DNA, 203 bp, Artificial sequence
  synthetic
ggcgcgccagtcctacctgtaggctctgacatttctgacatttctgacatttctgacatttctgacatcgtcaattcctttaacatttctgacatttctgacatttctgacatttctgacatcgtcaattcctttaacatttctgacatttctgacatttctgacatttctgacatttctgacatttccgactcggaccgatg

SEQ ID NO: 16577 - DNA, 203 bp, Artificial sequence
  synthetic
ggcgcgccagtcctctaagagtgctctgacatttctgacatttctgacatttctgacatttctgacatcgtcaattcctttaacatttctgacatttctgacatttctgacatttctgacatttctgacatttctgacatttctgacatttctgacatcgtcaattcctttaacatttctgacatttccgactcggaccgatg

SEQ ID NO: 16578 - DNA, 203 bp, Artificial sequence
  synthetic
ggcgcgccagtcctgagactgagctctgacatttctgacatttctgacatttctgacatttctgacattactcccatttctgacattactcccatttctgacattactcccatttctgacattactcccatttctgacatttctgacatttctgacattactcccatttctgacattactcccatttccgactcggaccgatg

SEQ ID NO: 16579 - DNA, 203 bp, Artificial sequence
  synthetic
ggcgcgccagtcctcttcagaagctctgacatttctgacatttctgacatttctgacatttctgacattactcccatttctgacattactcccatttctgacattactcccatttctgacattactcccatttctgacatttctgacatttctgacattactcccatttctgacatttctgacatttccgactcggaccgatg

SEQ ID NO: 16580 - DNA, 203 bp, Artificial sequence
  synthetic
ggcgcgccagtccttgacgaaagctctgacatttctgacatttctgacatttctgacatttctgacattactcccatttctgacattactcccatttctgacattactcccatttctgacattactcccatttctgacatttctgacatttctgacatttctgacatttctgacattactcccatttccgactcggaccgatg

SEQ ID NO: 16581 - DNA, 203 bp, Artificial sequence
  synthetic
ggcgcgccagtcctagaccggtgctctgacatttctgacatttctgacatttctgacatttctgacattactcccatttctgacattactcccatttctgacattactcccatttctgacattactcccatttctgacatttctgacatttctgacatttctgacatttctgacatttctgacatttccgactcggaccgatg

SEQ ID NO: 16582 - DNA, 203 bp, Artificial sequence
  synthetic
ggcgcgccagtccttagtttgagctctgacatttctgacatttctgacatttctgacatttctgacattactcccatttctgacattactcccatttctgacattactcccatttctgacatttctgacatttctgacattactcccatttctgacattactcccatttctgacatttctgacatttccgactcggaccgatg

SEQ ID NO: 16583 - DNA, 203 bp, Artificial sequence
  synthetic
ggcgcgccagtcctatgcactagctctgacatttctgacatttctgacatttctgacatttctgacattactcccatttctgacattactcccatttctgacattactcccatttctgacatttctgacatttctgacatttctgacatttctgacattactcccatttctgacattactcccatttccgactcggaccgatg

SEQ ID NO: 16584 - DNA, 203 bp, Artificial sequence
  synthetic
ggcgcgccagtcctgaacacctgctctgacatttctgacatttctgacatttctgacatttctgacattactcccatttctgacattactcccatttctgacattactcccatttctgacatttctgacatttctgacatttctgacatttctgacatttctgacatttctgacattactcccatttccgactcggaccgatg

SEQ ID NO: 16585 - DNA, 203 bp, Artificial sequence
  synthetic
ggcgcgccagtcctgactctcagctctgacatttctgacatttctgacatttctgacatttctgacattactcccatttctgacattactcccatttctgacattactcccatttctgacatttctgacatttctgacatttctgacatttctgacatttctgacatttctgacatttctgacatttccgactcggaccgatg

SEQ ID NO: 16586 - DNA, 203 bp, Artificial sequence
  synthetic
ggcgcgccagtcctacacagaggctctgacatttctgacatttctgacatttctgacatttctgacattactcccatttctgacattactcccatttctgacatttctgacatttctgacatttctgacatttctgacattactcccatttctgacattactcccatttctgacatttctgacatttccgactcggaccgatg

SEQ ID NO: 16587 - DNA, 203 bp, Artificial sequence
  synthetic
ggcgcgccagtcctgctgagagtatctgacatttctgacatttctgacatttctgacatttctgacattactcccatttctgacattactcccatttctgacatttctgacatttctgacatttctgacatttctgacattactcccatttctgacatttctgacatttctgacatttctgacatttccgactcggaccgatg

SEQ ID NO: 16588 - DNA, 203 bp, Artificial sequence
  synthetic
ggcgcgccagtcctgctagtctgttctgacatttctgacatttctgacatttctgacatttctgacattactcccatttctgacattactcccatttctgacatttctgacatttctgacatttctgacatttctgacatttctgacatttctgacatttctgacatttctgacattactcccatttccgactcggaccgatg

SEQ ID NO: 16589 - DNA, 203 bp, Artificial sequence
  synthetic
ggcgcgccagtcctgcagtacagctctgacatttctgacatttctgacatttctgacatttctgacattactcccatttctgacatttctgacatttctgacattactcccatttctgacattactcccatttctgacattactcccatttctgacattactcccatttctgacatttctgacatttccgactcggaccgatg

SEQ ID NO: 16590 - DNA, 203 bp, Artificial sequence
  synthetic
ggcgcgccagtcctgcaaccgtcatctgacatttctgacatttctgacatttctgacatttctgacattactcccatttctgacatttctgacatttctgacattactcccatttctgacattactcccatttctgacattactcccatttctgacatttctgacatttctgacattactcccatttccgactcggaccgatg

SEQ ID NO: 16591 - DNA, 203 bp, Artificial sequence
  synthetic
ggcgcgccagtcctgcttgagctttctgacatttctgacatttctgacatttctgacatttctgacattactcccatttctgacatttctgacatttctgacattactcccatttctgacattactcccatttctgacatttctgacatttctgacattactcccatttctgacatttctgacatttccgactcggaccgatg

SEQ ID NO: 16592 - DNA, 203 bp, Artificial sequence
  synthetic
ggcgcgccagtcctgcctcttaagtctgacatttctgacatttctgacatttctgacatttctgacattactcccatttctgacatttctgacatttctgacattactcccatttctgacattactcccatttctgacatttctgacatttctgacatttctgacatttctgacattactcccatttccgactcggaccgatg

SEQ ID NO: 16593 - DNA, 203 bp, Artificial sequence
  synthetic
ggcgcgccagtcctgctaagacgatctgacatttctgacatttctgacatttctgacatttctgacattactcccatttctgacatttctgacatttctgacattactcccatttctgacatttctgacatttctgacattactcccatttctgacatttctgacatttctgacatttctgacatttccgactcggaccgatg

SEQ ID NO: 16594 - DNA, 203 bp, Artificial sequence
  synthetic
ggcgcgccagtcctgcaacgtttctctgacatttctgacatttctgacatttctgacatttctgacattactcccatttctgacatttctgacatttctgacattactcccatttctgacatttctgacatttctgacatttctgacatttctgacattactcccatttctgacattactcccatttccgactcggaccgatg

SEQ ID NO: 16595 - DNA, 203 bp, Artificial sequence
  synthetic
ggcgcgccagtcctgctcgtcaggtctgacatttctgacatttctgacatttctgacatttctgacattactcccatttctgacatttctgacatttctgacattactcccatttctgacatttctgacatttctgacatttctgacatttctgacatttctgacatttctgacattactcccatttccgactcggaccgatg

SEQ ID NO: 16596 - DNA, 203 bp, Artificial sequence
  synthetic
ggcgcgccagtcctgcctgaccaatctgacatttctgacatttctgacatttctgacatttctgacattactcccatttctgacatttctgacatttctgacatttctgacatttctgacattactcccatttctgacattactcccatttctgacattactcccatttctgacatttctgacatttccgactcggaccgatg

SEQ ID NO: 16597 - DNA, 203 bp, Artificial sequence
  synthetic
ggcgcgccagtcctgcaaaggccttctgacatttctgacatttctgacatttctgacatttctgacattactcccatttctgacatttctgacatttctgacatttctgacatttctgacattactcccatttctgacattactcccatttctgacatttctgacatttctgacatttctgacatttccgactcggaccgatg

SEQ ID NO: 16598 - DNA, 203 bp, Artificial sequence
  synthetic
ggcgcgccagtcctgccttcagcttctgacatttctgacatttctgacatttctgacatttctgacattactcccatttctgacatttctgacatttctgacatttctgacatttctgacattactcccatttctgacatttctgacatttctgacatttctgacatttctgacatttctgacatttccgactcggaccgatg

SEQ ID NO: 16599 - DNA, 203 bp, Artificial sequence
  synthetic
ggcgcgccagtcctgctgaatggttctgacatttctgacatttctgacatttctgacatttctgacattactcccatttctgacatttctgacatttctgacatttctgacatttctgacatttctgacatttctgacattactcccatttctgacattactcccatttctgacattactcccatttccgactcggaccgatg

SEQ ID NO: 16600 - DNA, 203 bp, Artificial sequence
  synthetic
ggcgcgccagtcctgctactctagtctgacatttctgacatttctgacatttctgacatttctgacattactcccatttctgacatttctgacatttctgacatttctgacatttctgacatttctgacatttctgacattactcccatttctgacatttctgacatttctgacattactcccatttccgactcggaccgatg

SEQ ID NO: 16601 - DNA, 203 bp, Artificial sequence
  synthetic
ggcgcgccagtcctgctaacctcttctgacatttctgacatttctgacatttctgacatttctgacattactcccatttctgacatttctgacatttctgacatttctgacatttctgacatttctgacatttctgacatttctgacatttctgacattactcccatttctgacatttctgacatttccgactcggaccgatg

SEQ ID NO: 16602 - DNA, 203 bp, Artificial sequence
  synthetic
ggcgcgccagtcctgccttactgctctgacatttctgacatttctgacatttctgacatttctgacattactcccatttctgacatttctgacatttctgacatttctgacatttctgacatttctgacatttctgacatttctgacatttctgacatttctgacatttctgacattactcccatttccgactcggaccgatg

SEQ ID NO: 16603 - DNA, 203 bp, Artificial sequence
  synthetic
ggcgcgccagtcctgctcaagttgtctgacatttctgacatttctgacatttctgacatttctgacattactcccatttctgacatttctgacatttctgacatttctgacatttctgacatttctgacatttctgacatttctgacatttctgacatttctgacatttctgacatttctgacatttccgactcggaccgatg

SEQ ID NO: 16604 - DNA, 203 bp, Artificial sequence
  synthetic
ggcgcgccagtcctgctctgcaagtctgacatttctgacatttctgacatttctgacatttctgacattcacggaatcgagaacatttctgacatttctgacatttctgacatttctgacatttctgacatttctgacatttctgacatttctgacatttctgacatttctgacatttctgacatttccgactcggaccgatg

SEQ ID NO: 16605 - DNA, 203 bp, Artificial sequence
  synthetic
ggcgcgccagtcctgctaaaggattctgacatttctgacatttctgacatttctgacatttctgacattcacggaatcgagaacatttctgacatttctgacatttctgacatttctgacatttctgacatttctgacatttctgacatttctgacatttctgacatttctgaccgtcaattcctttacgactcggaccgatg

SEQ ID NO: 16606 - DNA, 203 bp, Artificial sequence
  synthetic
ggcgcgccagtcctgctcttaagatctgacatttctgacatttctgacatttctgacatttctgacattctccccccggaacccaaagactttggtttcccggaagctgcccggcgggtcatgggaataacgccgccgcatcgccggtcggcatcgttttctgacatttctgacatttctgacatttccgactcggaccgatg

SEQ ID NO: 16607 - DNA, 203 bp, Artificial sequence
  synthetic
ggcgcgccagtcctgcagtatgcatctgacatttctgacatttctgacatttctgacatttctgacattgaaccataactgatttaatgagccattcgcagtttcactgtaccggccgtgcgtactcagacatgcatggcttaatctttgagacaagcatctgacatttctgacatttctgacatttccgactcggaccgatg

SEQ ID NO: 16608 - DNA, 203 bp, Artificial sequence
  synthetic
ggcgcgccagtcctctgaatgaaatctgacatttctgacatttctgacatttctgacatttctgacatttaccggccgtctgacatttctgacatttctgacatttctgacatttctgacatttctgacatttctgacatttctgacatttctgacatttctgacatttctgacattttcttggcaaacgactcggaccgatg

SEQ ID NO: 16609 - DNA, 203 bp, Artificial sequence
  synthetic
ggcgcgccagtcctgagaatcgtatctgacatttctgacatttctgacatttctgacatttctgacatttactccctttctgacatttctgacatttctgacatttctgacatttctgacatttctgacatttctgacatttctgacatttctgacatttctgacatttctgacatttctgtactccccgactcggaccgatg

SEQ ID NO: 16610 - DNA, 203 bp, Artificial sequence
  synthetic
ggcgcgccagtcctgagtgaactgtctgacatttctgacatttctgacatttctgacatttctgacatttcaccataactgatttaatgagccattcgcagtttcactgtaccggccgtgcgtactcagacatgcatggcttaatctttgagacaagtttctgacatttctgacatttctgacatttccgactcggaccgatg

SEQ ID NO: 16611 - DNA, 203 bp, Artificial sequence
  synthetic
ggcgcgccagtcctaacagttctttctgacatttctgacatttctgacatttctgacatttctgacatttcattaagccgcaggctccactcctggtggtgcccttccgtcaattcctttaagtttcagctttgcaaccatactccccccggaaccctttctgacatttctgacatttctgacatttccgactcggaccgatg

SEQ ID NO: 16612 - DNA, 203 bp, Artificial sequence
  synthetic
ggcgcgccagtcctacaagtgctctctgacatttctgacatttctgacatttctgacatttctgacatttcgcccttccgtcaattcctttaagtttcagctttgcaaccatactccccccggaacccaaagactttggtttcccggaagctgcccgtttctgacatttctgacatttctgacatttccgactcggaccgatg

SEQ ID NO: 16613 - DNA, 203 bp, Artificial sequence
  synthetic
ggcgcgccagtccttcaacgtaggtctgacatttctgacatttctgacatttctgacatttctgacatttctcccttccgtcaattcctttaagtttcagctttgcaaccatactccccccggaacccaaagactttggtttcccggaagctgcccatttctgacatttctgacatttctgacatttccgactcggaccgatg

SEQ ID NO: 16614 - DNA, 203 bp, Artificial sequence
  synthetic
ggcgcgccagtcctttgacctttatctgacatttctgacatttctgacatttctgacatttctgacatttctccggcgggtgacatttctgacatttctgacatttctgacatttctgacatttctgacatttctgacatttctgacatttctgacatttctgacatttctgacatttcccggcgggtcgactcggaccgatg

SEQ ID NO: 16615 - DNA, 203 bp, Artificial sequence
  synthetic
ggcgcgccagtcctaagctaacactctgacatttctgacatttctgacatttctgacatttctgacatttctcgtcaattcctttattctgacatttctgacatttctgacatttctgacatttctgacatttctgacatttctgacatttctgacatttctgacatttctgacattttcttggcaaacgactcggaccgatg

SEQ ID NO: 16616 - DNA, 203 bp, Artificial sequence
  synthetic
ggcgcgccagtcctgtagtgctaatctgacatttctgacatttctgacatttctgacatttctgacatttctgaaccggccgtcatttctgacatttctgacatttctgacatttctgacatttctgacatttctgacatttctgacatttctgacatttctgacatttctgaccacggaatcgagaacgactcggaccgatg

SEQ ID NO: 16617 - DNA, 203 bp, Artificial sequence
  synthetic
ggcgcgccagtcctgtaaagtggttctgacatttctgacatttctgacatttctgacatttctgacatttctgacacaccaactaagaacggccatgcaccaccacccacggaatcgagaaagagctatcaatctgtcaatcctgtccgtgttgacatttctgacatttctgacatttctgacatttccgactcggaccgatg

SEQ ID NO: 16618 - DNA, 203 bp, Artificial sequence
  synthetic
ggcgcgccagtcctctgtgtacactctgacatttctgacatttctgacatttctgacatttctgacatttctgacacacggaatcgagaagacatttctgacatttctgacatttctgacatttctgacatttctgacatttctgacatttctgacatttctgacatttctgacatttctgacatttccgactcggaccgatg

SEQ ID NO: 16619 - DNA, 203 bp, Artificial sequence
  synthetic
ggcgcgccagtcctgtgaatgttgtctgacatttctgacatttctgacatttctgacatttctgacatttctgacacacggaatcgagaagacatttctgacatttctgacatttctgacatttctgacatttctgacatttctgacatttctgacatttctgacatttctgacatttctgtactccccgactcggaccgatg

SEQ ID NO: 16620 - DNA, 203 bp, Artificial sequence
  synthetic
ggcgcgccagtcctgtctgagaaatctgacatttctgacatttctgacatttctgacatttctgacatttctgacacggaatcgagaactgacatttctgacatttctgacatttctgacatttctgacatttctgacatttctgacatttctgacatttctgacatttctgacatttcaccggccgtcgactcggaccgatg

SEQ ID NO: 16621 - DNA, 203 bp, Artificial sequence
  synthetic
ggcgcgccagtcctgaccgagaactctgacatttctgacatttctgacatttctgacatttctgacatttctgacacggaatcgagaactgacatttctgacatttctgacatttctgacatttctgacatttctgacatttctgacatttctgacatttctgacatttctgacatttcccggcgggtcgactcggaccgatg

SEQ ID NO: 16622 - DNA, 203 bp, Artificial sequence
  synthetic
ggcgcgccagtcctgtctcatgactctgacatttctgacatttctgacatttctgacatttctgacatttctgacacgtcaattcctttagacatttctgacatttctgacatttctgacatttctgacatttctgacatttctgacatttctgacatttctgacatttctgaccgtcaattcctttacgactcggaccgatg

SEQ ID NO: 16623 - DNA, 203 bp, Artificial sequence
  synthetic
ggcgcgccagtcctctaagaagactctgacatttctgacatttctgacatttctgacatttctgacatttctgacagccgcaggctccactcctggtggtgcccttccgtcaattcctttaagtttcagctttgcaaccatactccccccggagacatttctgacatttctgacatttctgacatttccgactcggaccgatg

SEQ ID NO: 16624 - DNA, 203 bp, Artificial sequence
  synthetic
ggcgcgccagtcctgtaacggtattctgacatttctgacatttctgacatttctgacatttctgacatttctgacataccggccgtttctgacatttctgacatttctgacatttctgacatttctgacatttctgacatttctgacatttctgacatttctgacatttctgacattttcttggcaaacgactcggaccgatg

SEQ ID NO: 16625 - DNA, 203 bp, Artificial sequence
  synthetic
ggcgcgccagtcctgtccagaggctctgacatttctgacatttctgacatttctgacatttctgacatttctgacatactccccatttctgacatttctgacatttctgacatttctgacatttctgacatttctgacatttctgacatttctgacatttctgacatttctgacatttctgtactccccgactcggaccgatg

SEQ ID NO: 16626 - DNA, 203 bp, Artificial sequence
  synthetic
ggcgcgccagtcctgtagttagcttctgacatttctgacatttctgacatttctgacatttctgacatttctgacatactgatttaatgagccattcgcagtttcactgtaccggccgtgcgtactcagacatgcatggcttaatctttgactgacatttctgacatttctgacatttctgacatttccgactcggaccgatg

SEQ ID NO: 16627 - DNA, 203 bp, Artificial sequence
  synthetic
ggcgcgccagtcctgtggttgacttctgacatttctgacatttctgacatttctgacatttctgacatttctgacatccgcaggctccactcctggtggtgcccttccgtcaattcctttaagtttcagctttgcaaccatactccccccgctgacatttctgacatttctgacatttctgacatttccgactcggaccgatg

SEQ ID NO: 16628 - DNA, 203 bp, Artificial sequence
  synthetic
ggcgcgccagtcctctgacaaaactctgacatttctgacatttctgacatttctgacatttctgacatttctgacatttaacccaaagactttggtttcccggaagctgcccggcgggtcatgggaataacgccgccgcatcgccggtcttctgacatttctgacatttctgacatttctgacatttccgactcggaccgatg

SEQ ID NO: 16629 - DNA, 203 bp, Artificial sequence
  synthetic
ggcgcgccagtcctcagtaactactctgacatttctgacatttctgacatttctgacatttctgacatttctgacatttaccggccgtctgacatttctgacatttctgacatttctgacatttctgacatttctgacatttctgacatttctgacatttctgacatttctgacatttcaccggccgtcgactcggaccgatg

SEQ ID NO: 16630 - DNA, 203 bp, Artificial sequence
  synthetic
ggcgcgccagtcctgtgaactgtctctgacatttctgacatttctgacatttctgacatttctgacatttctgacatttcccgactttcgttcttgattaatgaaaacattcttggcaaatgctttcgctctggtccgtcttgcgccgtttctgacatttctgacatttctgacatttctgacatttccgactcggaccgatg

SEQ ID NO: 16631 - DNA, 203 bp, Artificial sequence
  synthetic
ggcgcgccagtcctgttcaagaactctgacatttctgacatttctgacatttctgacatttctgacatttctgacatttcgatttaatgagccattcgcagtttcactgtaccggccgtgcgtactcagacatgcatggcttaatctttttctgacatttctgacatttctgacatttctgacatttccgactcggaccgatg

SEQ ID NO: 16632 - DNA, 203 bp, Artificial sequence
  synthetic
ggcgcgccagtcctctaacgttactctgacatttctgacatttctgacatttctgacatttctgacatttctgacatttctaggctccactcctggtggtgcccttccgtcaattcctttaagtttcagctttgcaaccatactcccatttctgacatttctgacatttctgacatttctgacatttccgactcggaccgatg

SEQ ID NO: 16633 - DNA, 203 bp, Artificial sequence
  synthetic
ggcgcgccagtcctgtgagagccttctgacatttctgacatttctgacatttctgacatttctgacatttctgacatttctcccaaagactttggtttcccggaagctgcccggcgggtcatgggaataacgccgccgcatcgccggatttctgacatttctgacatttctgacatttctgacatttccgactcggaccgatg

SEQ ID NO: 16634 - DNA, 203 bp, Artificial sequence
  synthetic
ggcgcgccagtcctgtatggttgctctgacatttctgacatttctgacatttctgacatttctgacatttctgacatttctccggcgggtgacatttctgacatttctgacatttctgacatttctgacatttctgacatttctgacatttctgacatttctgacatttctgacatttctgacatttccgactcggaccgatg

SEQ ID NO: 16635 - DNA, 203 bp, Artificial sequence
  synthetic
ggcgcgccagtcctcagtccaaactctgacatttctgacatttctgacatttctgacatttctgacatttctgacatttctccggcgggtgacatttctgacatttctgacatttctgacatttctgacatttctgacatttctgacatttctgacatttctgacatttctgacatttctgtactccccgactcggaccgatg

SEQ ID NO: 16636 - DNA, 203 bp, Artificial sequence
  synthetic
ggcgcgccagtcctcctcggtcactctgacatttctgacatttctgacatttctgacatttctgacatttctgacatttctccggcgggtgacatttctgacatttctgacatttctgacatttctgacatttctgacatttctgacatttctgacatttctgacatttctgaccgtcaattcctttacgactcggaccgatg

SEQ ID NO: 16637 - DNA, 203 bp, Artificial sequence
  synthetic
ggcgcgccagtcctgagtagatactctgacatttctgacatttctgacatttctgacatttctgacatttctgacatttctgaactttcgttcttgattaatgaaaacattcttggcaaatgctttcgctctggtccgtcttgcgacatttctgacatttctgacatttctgacatttctgacatttccgactcggaccgatg

SEQ ID NO: 16638 - DNA, 203 bp, Artificial sequence
  synthetic
ggcgcgccagtcctgttcaccatttctgacatttctgacatttctgacatttctgacatttctgacatttctgacatttctgacaaagactttggtttcccggaagctgcccggcgggtcatgggaataacgccgccgcatcgccacatttctgacatttctgacatttctgacatttctgacatttccgactcggaccgatg

SEQ ID NO: 16639 - DNA, 203 bp, Artificial sequence
  synthetic
ggcgcgccagtcctcctctgctactctgacatttctgacatttctgacatttctgacatttctgacatttctgacatttctgacaaagactttggtttcccggaagctgcccggcgggtcatgggaataacgccgccgcatcgcgacatttctgacatttctgacatttctgacatttctgacatttccgactcggaccgatg

SEQ ID NO: 16640 - DNA, 203 bp, Artificial sequence
  synthetic
ggcgcgccagtcctgtgaccggtttctgacatttctgacatttctgacatttctgacatttctgacatttctgacatttctgacaaagactttggtttcccggaagctgcccggcgggtcatgggaataacgccgccgcatcgtgacatttctgacatttctgacatttctgacatttctgacatttccgactcggaccgatg

SEQ ID NO: 16641 - DNA, 203 bp, Artificial sequence
  synthetic
ggcgcgccagtcctactagtagactctgacatttctgacatttctgacatttctgacatttctgacatttctgacatttctgacaaatgagccattcgcagtttcactgtaccggccgtgcgtactcagacatgcatggcttatgacatttctgacatttctgacatttctgacatttctgacatttccgactcggaccgatg

SEQ ID NO: 16642 - DNA, 203 bp, Artificial sequence
  synthetic
ggcgcgccagtcctgactctgtactctgacatttctgacatttctgacatttctgacatttctgacatttctgacatttctgacaagaacggccatgcaccaccacccacggaatcgagaaagagctatcaatctgtcaatcctgacatttctgacatttctgacatttctgacatttctgacatttccgactcggaccgatg

SEQ ID NO: 16643 - DNA, 203 bp, Artificial sequence
  synthetic
ggcgcgccagtcctgctgaacaactctgacatttctgacatttctgacatttctgacatttctgacatttctgacatttctgacaccggccgtatttctgacatttctgacatttctgacatttctgacatttctgacatttctgacatttctgacatttctgacatttctgacattttcttggcaaacgactcggaccgatg

SEQ ID NO: 16644 - DNA, 203 bp, Artificial sequence
  synthetic
ggcgcgccagtcctgagtggtcactctgacatttctgacatttctgacatttctgacatttctgacatttctgacatttctgacacggaatcgagaactgacatttctgacatttctgacatttctgacatttctgacatttctgacatttctgacatttctgacatttctgacatttctgacatttccgactcggaccgatg

SEQ ID NO: 16645 - DNA, 203 bp, Artificial sequence
  synthetic
ggcgcgccagtcctgtcaacgtactctgacatttctgacatttctgacatttctgacatttctgacatttctgacatttctgacacggaatcgagaactgacatttctgacatttctgacatttctgacatttctgacatttctgacatttctgacatttctgacatttctgaccacggaatcgagaacgactcggaccgatg

SEQ ID NO: 16646 - DNA, 203 bp, Artificial sequence
  synthetic
ggcgcgccagtccttgctgagcactctgacatttctgacatttctgacatttctgacatttctgacatttctgacatttctgacataacggaatcgagaaacataacggaatcgagaaacataacggaatcgagaaacataacggaatcgagaaacataacggaatcgagaaacatttctgacatttccgactcggaccgatg

SEQ ID NO: 16647 - DNA, 203 bp, Artificial sequence
  synthetic
ggcgcgccagtcctgtgagtactctctgacatttctgacatttctgacatttctgacatttctgacatttctgacatttctgacataaggcgggtttctgacataaggcgggtttctgacataaggcgggtttctgacataaggcgggtttctgacataaggcgggtttctgacatttctgacatttccgactcggaccgatg

SEQ ID NO: 16648 - DNA, 203 bp, Artificial sequence
  synthetic
ggcgcgccagtccttgaatcctactctgacatttctgacatttctgacatttctgacatttctgacatttctgacatttctgacatacccgccgtttctgacatacccgccgtttctgacatacccgccgtttctgacatacccgccgtttctgacatacccgccgtttctgacatttctgacatttccgactcggaccgatg

SEQ ID NO: 16649 - DNA, 203 bp, Artificial sequence
  synthetic
ggcgcgccagtcctagtggtcaactctgacatttctgacatttctgacatttctgacatttctgacatttctgacatttctgacataccgatcgtttctgacataccgatcgtttctgacataccgatcgtttctgacataccgatcgtttctgacataccgatcgtttctgacatttctgacatttccgactcggaccgatg

SEQ ID NO: 16650 - DNA, 203 bp, Artificial sequence
  synthetic
ggcgcgccagtcctcagaagttactctgacatttctgacatttctgacatttctgacatttctgacatttctgacatttctgacataccgcacgtttctgacataccgcacgtttctgacataccgcacgtttctgacataccgcacgtttctgacataccgcacgtttctgacatttctgacatttccgactcggaccgatg

SEQ ID NO: 16651 - DNA, 203 bp, Artificial sequence
  synthetic
ggcgcgccagtcctgttaacagactctgacatttctgacatttctgacatttctgacatttctgacatttctgacatttctgacataccgcgcgtttctgacataccgcgcgtttctgacataccgcgcgtttctgacataccgcgcgtttctgacataccgcgcgtttctgacatttctgacatttccgactcggaccgatg

SEQ ID NO: 16652 - DNA, 203 bp, Artificial sequence
  synthetic
ggcgcgccagtccttgagcaccactctgacatttctgacatttctgacatttctgacatttctgacatttctgacatttctgacataccgctcgtttctgacataccgctcgtttctgacataccgctcgtttctgacataccgctcgtttctgacataccgctcgtttctgacatttctgacatttccgactcggaccgatg

SEQ ID NO: 16653 - DNA, 203 bp, Artificial sequence
  synthetic
ggcgcgccagtccttgcaagtaactctgacatttctgacatttctgacatttctgacatttctgacatttctgacatttctgacataccggaatcgagaaacataccggaatcgagaaacataccggaatcgagaaacataccggaatcgagaaacataccggaatcgagaaacatttctgacatttccgactcggaccgatg

SEQ ID NO: 16654 - DNA, 203 bp, Artificial sequence
  synthetic
ggcgcgccagtcctgtcagtagattctgacatttctgacatttctgacatttctgacatttctgacatttctgacatttctgacataccggccaattctgacataccggccaattctgacataccggccaattctgacataccggccaattctgacataccggccaattctgacatttctgacatttccgactcggaccgatg

SEQ ID NO: 16655 - DNA, 203 bp, Artificial sequence
  synthetic
ggcgcgccagtcctctaagttcactctgacatttctgacatttctgacatttctgacatttctgacatttctgacatttctgacataccggccagttctgacataccggccagttctgacataccggccagttctgacataccggccagttctgacataccggccagttctgacatttctgacatttccgactcggaccgatg

SEQ ID NO: 16656 - DNA, 203 bp, Artificial sequence
  synthetic
ggcgcgccagtcctattctgttcatctgacatttctgacatttctgacatttctgacatttctgacatttctgacatttctgacataccggccccttctgacataccggccccttctgacataccggccccttctgacataccggccccttctgacataccggccccttctgacatttctgacatttccgactcggaccgatg

SEQ ID NO: 16657 - DNA, 203 bp, Artificial sequence
  synthetic
ggcgcgccagtcctcaacgaatactctgacatttctgacatttctgacatttctgacatttctgacatttctgacatttctgacataccggccgcttctgacataccggccgcttctgacataccggccgcttctgacataccggccgcttctgacataccggccgcttctgacatttctgacatttccgactcggaccgatg

SEQ ID NO: 16658 - DNA, 203 bp, Artificial sequence
  synthetic
ggcgcgccagtcctatgaatcgaatctgacatttctgacatttctgacatttctgacatttctgacatttctgacatttctgacataccggccgtttctgacataccggccgtttctgacataccggccgtttctgacataccggccgtttctgacatttctgacatttctgacataccggccgtttccgactcggaccgatg

SEQ ID NO: 16659 - DNA, 203 bp, Artificial sequence
  synthetic
ggcgcgccagtcctgtttgaactctctgacatttctgacatttctgacatttctgacatttctgacatttctgacatttctgacataccggccgtttctgacataccggccgtttctgacataccggccgtttctgacatttctgacatttctgacatttctgacatttctgacataccggccgtttccgactcggaccgatg

SEQ ID NO: 16660 - DNA, 203 bp, Artificial sequence
  synthetic
ggcgcgccagtcctctcaccatgttctgacatttctgacatttctgacatttctgacatttctgacatttctgacatttctgacataccggccgtttctgacataccggccgtttctgacataccggccgtttctgacatttctgacatttctgacatttctgacatttctgacatttctgacatttccgactcggaccgatg

SEQ ID NO: 16661 - DNA, 203 bp, Artificial sequence
  synthetic
ggcgcgccagtcctttaggctcactctgacatttctgacatttctgacatttctgacatttctgacatttctgacatttctgacataccggccgtttctgacataccggccgtttctgacatttctgacatttctgacataccggccgtttctgacataccggccgtttctgacatttctgacatttccgactcggaccgatg

SEQ ID NO: 16662 - DNA, 203 bp, Artificial sequence
  synthetic
ggcgcgccagtcctcatgctctggtctgacatttctgacatttctgacatttctgacatttctgacatttctgacatttctgacataccggccgtttctgacataccggccgtttctgacatttctgacatttctgacatttctgacatttctgacataccggccgtttctgacatttctgacatttccgactcggaccgatg

SEQ ID NO: 16663 - DNA, 203 bp, Artificial sequence
  synthetic
ggcgcgccagtcctcacagcatggtctgacatttctgacatttctgacatttctgacatttctgacatttctgacatttctgacataccggccgtttctgacataccggccgtttctgacatttctgacatttctgacatttctgacatttctgacatttctgacatttctgacatttctgacatttccgactcggaccgatg

SEQ ID NO: 16664 - DNA, 203 bp, Artificial sequence
  synthetic
ggcgcgccagtccttgaagacgactctgacatttctgacatttctgacatttctgacatttctgacatttctgacatttctgacataccggccgtttctgacatttctgacatttctgacataccggccgtttctgacataccggccgtttctgacataccggccgtttctgacataccggccgtttccgactcggaccgatg

SEQ ID NO: 16665 - DNA, 203 bp, Artificial sequence
  synthetic
ggcgcgccagtcctgatcacaagttctgacatttctgacatttctgacatttctgacatttctgacatttctgacatttctgacataccggccgtttctgacatttctgacatttctgacataccggccgtttctgacataccggccgtttctgacataccggccgtttctgacatttctgacatttccgactcggaccgatg

SEQ ID NO: 16666 - DNA, 203 bp, Artificial sequence
  synthetic
ggcgcgccagtcctatcatggtgctctgacatttctgacatttctgacatttctgacatttctgacatttctgacatttctgacataccggccgtttctgacatttctgacatttctgacataccggccgtttctgacataccggccgtttctgacatttctgacatttctgacatttctgacatttccgactcggaccgatg

SEQ ID NO: 16667 - DNA, 203 bp, Artificial sequence
  synthetic
ggcgcgccagtccttcagcaagcatctgacatttctgacatttctgacatttctgacatttctgacatttctgacatttctgacataccggccgtttctgacatttctgacatttctgacataccggccgtttctgacatttctgacatttctgacataccggccgtttctgacataccggccgtttccgactcggaccgatg

SEQ ID NO: 16668 - DNA, 203 bp, Artificial sequence
  synthetic
ggcgcgccagtcctagagtcctagtctgacatttctgacatttctgacatttctgacatttctgacatttctgacatttctgacataccggccgtttctgacatttctgacatttctgacataccggccgtttctgacatttctgacatttctgacatttctgacatttctgacatttctgacatttccgactcggaccgatg

SEQ ID NO: 16669 - DNA, 203 bp, Artificial sequence
  synthetic
ggcgcgccagtcctcagagtcctatctgacatttctgacatttctgacatttctgacatttctgacatttctgacatttctgacataccggccgtttctgacatttctgacatttctgacatttctgacatttctgacataccggccgtttctgacataccggccgtttctgacataccggccgtttccgactcggaccgatg

SEQ ID NO: 16670 - DNA, 203 bp, Artificial sequence
  synthetic
ggcgcgccagtcctccaaagtgcatctgacatttctgacatttctgacatttctgacatttctgacatttctgacatttctgacataccggccgtttctgacatttctgacatttctgacatttctgacatttctgacataccggccgtttctgacataccggccgtttctgacatttctgacatttccgactcggaccgatg

SEQ ID NO: 16671 - DNA, 203 bp, Artificial sequence
  synthetic
ggcgcgccagtcctgtgcacttcttctgacatttctgacatttctgacatttctgacatttctgacatttctgacatttctgacataccggccgtttctgacatttctgacatttctgacatttctgacatttctgacataccggccgtttctgacatttctgacatttctgacataccggccgtttccgactcggaccgatg

SEQ ID NO: 16672 - DNA, 203 bp, Artificial sequence
  synthetic
ggcgcgccagtcctaccgtcagtgtctgacatttctgacatttctgacatttctgacatttctgacatttctgacatttctgacataccggccgtttctgacatttctgacatttctgacatttctgacatttctgacatttctgacatttctgacataccggccgtttctgacataccggccgtttccgactcggaccgatg

SEQ ID NO: 16673 - DNA, 203 bp, Artificial sequence
  synthetic
ggcgcgccagtcctaccgttcatatctgacatttctgacatttctgacatttctgacatttctgacatttctgacatttctgacataccggcctcttctgacataccggcctcttctgacataccggcctcttctgacataccggcctcttctgacataccggcctcttctgacatttctgacatttccgactcggaccgatg

SEQ ID NO: 16674 - DNA, 203 bp, Artificial sequence
  synthetic
ggcgcgccagtcctagcaccgttctctgacatttctgacatttctgacatttctgacatttctgacatttctgacatttctgacataccggcctgttctgacataccggcctgttctgacataccggcctgttctgacataccggcctgttctgacataccggcctgttctgacatttctgacatttccgactcggaccgatg

SEQ ID NO: 16675 - DNA, 203 bp, Artificial sequence
  synthetic
ggcgcgccagtcctgctgtgaccatctgacatttctgacatttctgacatttctgacatttctgacatttctgacatttctgacataccggcggtttctgacataccggcggtttctgacataccggcggtttctgacataccggcggtttctgacataccggcggtttctgacatttctgacatttccgactcggaccgatg

SEQ ID NO: 16676 - DNA, 203 bp, Artificial sequence
  synthetic
ggcgcgccagtccttgtgaccgactctgacatttctgacatttctgacatttctgacatttctgacatttctgacatttctgacataccggcgttttctgacataccggcgttttctgacataccggcgttttctgacataccggcgttttctgacataccggcgttttctgacatttctgacatttccgactcggaccgatg

SEQ ID NO: 16677 - DNA, 203 bp, Artificial sequence
  synthetic
ggcgcgccagtcctgaggtcacactctgacatttctgacatttctgacatttctgacatttctgacatttctgacatttctgacataccggctctttctgacataccggctctttctgacataccggctctttctgacataccggctctttctgacataccggctctttctgacatttctgacatttccgactcggaccgatg

SEQ ID NO: 16678 - DNA, 203 bp, Artificial sequence
  synthetic
ggcgcgccagtcctcatgttcgtttctgacatttctgacatttctgacatttctgacatttctgacatttctgacatttctgacataccggctgtttctgacataccggctgtttctgacataccggctgtttctgacataccggctgtttctgacataccggctgtttctgacatttctgacatttccgactcggaccgatg

SEQ ID NO: 16679 - DNA, 203 bp, Artificial sequence
  synthetic
ggcgcgccagtcctaatgagcctttctgacatttctgacatttctgacatttctgacatttctgacatttctgacatttctgacataccgtgcgtttctgacataccgtgcgtttctgacataccgtgcgtttctgacataccgtgcgtttctgacataccgtgcgtttctgacatttctgacatttccgactcggaccgatg

SEQ ID NO: 16680 - DNA, 203 bp, Artificial sequence
  synthetic
ggcgcgccagtccttacgttcttatctgacatttctgacatttctgacatttctgacatttctgacatttctgacatttctgacatacgcgccgtttctgacatacgcgccgtttctgacatacgcgccgtttctgacatacgcgccgtttctgacatacgcgccgtttctgacatttctgacatttccgactcggaccgatg

SEQ ID NO: 16681 - DNA, 203 bp, Artificial sequence
  synthetic
ggcgcgccagtcctagctaacgtatctgacatttctgacatttctgacatttctgacatttctgacatttctgacatttctgacatacggccggtttctgacatacggccggtttctgacatacggccggtttctgacatacggccggtttctgacatacggccggtttctgacatttctgacatttccgactcggaccgatg

SEQ ID NO: 16682 - DNA, 203 bp, Artificial sequence
  synthetic
ggcgcgccagtcctttggactgaatctgacatttctgacatttctgacatttctgacatttctgacatttctgacatttctgacatacgtgccgtttctgacatacgtgccgtttctgacatacgtgccgtttctgacatacgtgccgtttctgacatacgtgccgtttctgacatttctgacatttccgactcggaccgatg

SEQ ID NO: 16683 - DNA, 203 bp, Artificial sequence
  synthetic
ggcgcgccagtcctttcagtgtactctgacatttctgacatttctgacatttctgacatttctgacatttctgacatttctgacatactcgccgtttctgacatactcgccgtttctgacatactcgccgtttctgacatactcgccgtttctgacatactcgccgtttctgacatttctgacatttccgactcggaccgatg

SEQ ID NO: 16684 - DNA, 203 bp, Artificial sequence
  synthetic
ggcgcgccagtcctttactgaatttctgacatttctgacatttctgacatttctgacatttctgacatttctgacatttctgacatagcggccgtttctgacatagcggccgtttctgacatagcggccgtttctgacatagcggccgtttctgacatagcggccgtttctgacatttctgacatttccgactcggaccgatg

SEQ ID NO: 16685 - DNA, 203 bp, Artificial sequence
  synthetic
ggcgcgccagtcctacccaactggtctgacatttctgacatttctgacatttctgacatttctgacatttctgacatttctgacatatctcccatttctgacatatctcccatttctgacatatctcccatttctgacatatctcccatttctgacatatctcccatttctgacatttctgacatttccgactcggaccgatg

SEQ ID NO: 16686 - DNA, 203 bp, Artificial sequence
  synthetic
ggcgcgccagtcctgttgggtcagtctgacatttctgacatttctgacatttctgacatttctgacatttctgacatttctgacatatgagccattcgcagtttcactgtaccggccgtgcgtactcagacatgcatggcttctgacatttctgacatttctgacatttctgacatttctgacatttccgactcggaccgatg

SEQ ID NO: 16687 - DNA, 203 bp, Artificial sequence
  synthetic
ggcgcgccagtcctaaagagagactctgacatttctgacatttctgacatttctgacatttctgacatttctgacatttctgacatcacgaaatcgagaaacatcacgaaatcgagaaacatcacgaaatcgagaaacatcacgaaatcgagaaacatcacgaaatcgagaaacatttctgacatttccgactcggaccgatg

SEQ ID NO: 16688 - DNA, 203 bp, Artificial sequence
  synthetic
ggcgcgccagtcctagtcacagtttctgacatttctgacatttctgacatttctgacatttctgacatttctgacatttctgacatcacggaatcaagaaacatcacggaatcaagaaacatcacggaatcaagaaacatcacggaatcaagaaacatcacggaatcaagaaacatttctgacatttccgactcggaccgatg

SEQ ID NO: 16689 - DNA, 203 bp, Artificial sequence
  synthetic
ggcgcgccagtcctaatcagagcttctgacatttctgacatttctgacatttctgacatttctgacatttctgacatttctgacatcacggaatccagaaacatcacggaatccagaaacatcacggaatccagaaacatcacggaatccagaaacatcacggaatccagaaacatttctgacatttccgactcggaccgatg

SEQ ID NO: 16690 - DNA, 203 bp, Artificial sequence
  synthetic
ggcgcgccagtcctgaccaccgtgtctgacatttctgacatttctgacatttctgacatttctgacatttctgacatttctgacatcacggaatcgaaaaacatcacggaatcgaaaaacatcacggaatcgaaaaacatcacggaatcgaaaaacatcacggaatcgaaaaacatttctgacatttccgactcggaccgatg

SEQ ID NO: 16691 - DNA, 203 bp, Artificial sequence
  synthetic
ggcgcgccagtcctacggtggttttctgacatttctgacatttctgacatttctgacatttctgacatttctgacatttctgacatcacggaatcgacaaacatcacggaatcgacaaacatcacggaatcgacaaacatcacggaatcgacaaacatcacggaatcgacaaacatttctgacatttccgactcggaccgatg

SEQ ID NO: 16692 - DNA, 203 bp, Artificial sequence
  synthetic
ggcgcgccagtccttccaggtggttctgacatttctgacatttctgacatttctgacatttctgacatttctgacatttctgacatcacggaatcgagaaacatcacggaatcgagaaacatcacggaatcgagaaacatcacggaatcgagaaacatcacggaatcgagaaacatttctgacatttccgactcggaccgatg

SEQ ID NO: 16693 - DNA, 203 bp, Artificial sequence
  synthetic
ggcgcgccagtccttttggtgaaatctgacatttctgacatttctgacatttctgacatttctgacatttctgacatttctgacatcacggaatcgagaaacatcacggaatcgagaaacatcacggaatcgagaaacatttctgacatttctgacatcacggaatcgagaaacatttctgacatttccgactcggaccgatg

SEQ ID NO: 16694 - DNA, 203 bp, Artificial sequence
  synthetic
ggcgcgccagtccttaaccgtaactctgacatttctgacatttctgacatttctgacatttctgacatttctgacatttctgacatcacggaatcgagaaacatcacggaatcgagaaacatttctgacatttctgacatttctgacatttctgacatttctgacatttctgacatttctgacatttccgactcggaccgatg

SEQ ID NO: 16695 - DNA, 203 bp, Artificial sequence
  synthetic
ggcgcgccagtcctaccgtagccttctgacatttctgacatttctgacatttctgacatttctgacatttctgacatttctgacatcacggaatcgagaaacatttctgacatttctgacatcacggaatcgagaaacatttctgacatttctgacatttctgacatttctgacatttctgacatttccgactcggaccgatg

SEQ ID NO: 16696 - DNA, 203 bp, Artificial sequence
  synthetic
ggcgcgccagtcctctacggttaatctgacatttctgacatttctgacatttctgacatttctgacatttctgacatttctgacatcacggaatcgagaaacatttctgacatttctgacatttctgacatttctgacatttctgacatttctgacatcacggaatcgagaaacatttctgacatttccgactcggaccgatg

SEQ ID NO: 16697 - DNA, 203 bp, Artificial sequence
  synthetic
ggcgcgccagtcctcaaagagacttctgacatttctgacatttctgacatttctgacatttctgacatttctgacatttctgacatcacggaatcgagaaacatttctgacatttctgacatttctgacatttctgacatttctgacatttctgacatttctgacatttctgacatttctgacatttccgactcggaccgatg

SEQ ID NO: 16698 - DNA, 203 bp, Artificial sequence
  synthetic
ggcgcgccagtcctaatgcacatttctgacatttctgacatttctgacatttctgacatttctgacatttctgacatttctgacatcacggaatcgagagacatcacggaatcgagagacatcacggaatcgagagacatcacggaatcgagagacatcacggaatcgagagacatttctgacatttccgactcggaccgatg

SEQ ID NO: 16699 - DNA, 203 bp, Artificial sequence
  synthetic
ggcgcgccagtcctccagaagtgttctgacatttctgacatttctgacatttctgacatttctgacatttctgacatttctgacatcacggaatcgagggacatcacggaatcgagggacatcacggaatcgagggacatcacggaatcgagggacatcacggaatcgagggacatttctgacatttccgactcggaccgatg

SEQ ID NO: 16700 - DNA, 203 bp, Artificial sequence
  synthetic
ggcgcgccagtcctacttgggtcttctgacatttctgacatttctgacatttctgacatttctgacatttctgacatttctgacatcacggaatcgagtaacatcacggaatcgagtaacatcacggaatcgagtaacatcacggaatcgagtaacatcacggaatcgagtaacatttctgacatttccgactcggaccgatg

SEQ ID NO: 16701 - DNA, 203 bp, Artificial sequence
  synthetic
ggcgcgccagtcctgctacccatttctgacatttctgacatttctgacatttctgacatttctgacatttctgacatttctgacatcacggaatcggaaaacatcacggaatcggaaaacatcacggaatcggaaaacatcacggaatcggaaaacatcacggaatcggaaaacatttctgacatttccgactcggaccgatg

SEQ ID NO: 16702 - DNA, 203 bp, Artificial sequence
  synthetic
ggcgcgccagtccttgcaagcctttctgacatttctgacatttctgacatttctgacatttctgacatttctgacatttctgacatcacggaatcgtgaaacatcacggaatcgtgaaacatcacggaatcgtgaaacatcacggaatcgtgaaacatcacggaatcgtgaaacatttctgacatttccgactcggaccgatg

SEQ ID NO: 16703 - DNA, 203 bp, Artificial sequence
  synthetic
ggcgcgccagtcctacgtttcgtttctgacatttctgacatttctgacatttctgacatttctgacatttctgacatttctgacatcacggaatgtagaaacatcacggaatgtagaaacatcacggaatgtagaaacatcacggaatgtagaaacatcacggaatgtagaaacatttctgacatttccgactcggaccgatg

SEQ ID NO: 16704 - DNA, 203 bp, Artificial sequence
  synthetic
ggcgcgccagtcctttagctgcactctgacatttctgacatttctgacatttctgacatttctgacatttctgacatttctgacatcacggaattaagaaacatcacggaattaagaaacatcacggaattaagaaacatcacggaattaagaaacatcacggaattaagaaacatttctgacatttccgactcggaccgatg

SEQ ID NO: 16705 - DNA, 203 bp, Artificial sequence
  synthetic
ggcgcgccagtccttatgcagttgtctgacatttctgacatttctgacatttctgacatttctgacatttctgacatttctgacatcacggcatcgagaaacatcacggcatcgagaaacatcacggcatcgagaaacatcacggcatcgagaaacatcacggcatcgagaaacatttctgacatttccgactcggaccgatg

SEQ ID NO: 16706 - DNA, 203 bp, Artificial sequence
  synthetic
ggcgcgccagtcctgaaactgcattctgacatttctgacatttctgacatttctgacatttctgacatttctgacatttctgacatcacggccgtttctgacatcacggccgtttctgacatcacggccgtttctgacatcacggccgtttctgacatcacggccgtttctgacatttctgacatttccgactcggaccgatg

SEQ ID NO: 16707 - DNA, 203 bp, Artificial sequence
  synthetic
ggcgcgccagtcctccaagcctgttctgacatttctgacatttctgacatttctgacatttctgacatttctgacatttctgacatcacgggatcgagaaacatcacgggatcgagaaacatcacgggatcgagaaacatcacgggatcgagaaacatcacgggatcgagaaacatttctgacatttccgactcggaccgatg

SEQ ID NO: 16708 - DNA, 203 bp, Artificial sequence
  synthetic
ggcgcgccagtccttaggatcaagtctgacatttctgacatttctgacatttctgacatttctgacatttctgacatttctgacatcacgtcatcgagaaacatcacgtcatcgagaaacatcacgtcatcgagaaacatcacgtcatcgagaaacatcacgtcatcgagaaacatttctgacatttccgactcggaccgatg

SEQ ID NO: 16709 - DNA, 203 bp, Artificial sequence
  synthetic
ggcgcgccagtcctttcaacgaaatctgacatttctgacatttctgacatttctgacatttctgacatttctgacatttctgacatcactcccatttctgacatcactcccatttctgacatcactcccatttctgacatcactcccatttctgacatcactcccatttctgacatttctgacatttccgactcggaccgatg

SEQ ID NO: 16710 - DNA, 203 bp, Artificial sequence
  synthetic
ggcgcgccagtcctacaccgaacttctgacatttctgacatttctgacatttctgacatttctgacatttctgacatttctgacatcactgaatcgagaaacatcactgaatcgagaaacatcactgaatcgagaaacatcactgaatcgagaaacatcactgaatcgagaaacatttctgacatttccgactcggaccgatg

SEQ ID NO: 16711 - DNA, 203 bp, Artificial sequence
  synthetic
ggcgcgccagtcctaactgaggcatctgacatttctgacatttctgacatttctgacatttctgacatttctgacatttctgacatcagggaatcgagaaacatcagggaatcgagaaacatcagggaatcgagaaacatcagggaatcgagaaacatcagggaatcgagaaacatttctgacatttccgactcggaccgatg

SEQ ID NO: 16712 - DNA, 203 bp, Artificial sequence
  synthetic
ggcgcgccagtcctgacgaagttctctgacatttctgacatttctgacatttctgacatttctgacatttctgacatttctgacatcattgaatcgagaaacatcattgaatcgagaaacatcattgaatcgagaaacatcattgaatcgagaaacatcattgaatcgagaaacatttctgacatttccgactcggaccgatg

SEQ ID NO: 16713 - DNA, 203 bp, Artificial sequence
  synthetic
ggcgcgccagtcctcaaccgagtatctgacatttctgacatttctgacatttctgacatttctgacatttctgacatttctgacatcccggccgtttctgacatcccggccgtttctgacatcccggccgtttctgacatcccggccgtttctgacatcccggccgtttctgacatttctgacatttccgactcggaccgatg

SEQ ID NO: 16714 - DNA, 203 bp, Artificial sequence
  synthetic
ggcgcgccagtcctcactagtgattctgacatttctgacatttctgacatttctgacatttctgacatttctgacatttctgacatccgccgggtttctgacatccgccgggtttctgacatccgccgggtttctgacatccgccgggtttctgacatccgccgggtttctgacatttctgacatttccgactcggaccgatg

SEQ ID NO: 16715 - DNA, 203 bp, Artificial sequence
  synthetic
ggcgcgccagtcctttcggtccaatctgacatttctgacatttctgacatttctgacatttctgacatttctgacatttctgacatccggatggtttctgacatccggatggtttctgacatccggatggtttctgacatccggatggtttctgacatccggatggtttctgacatttctgacatttccgactcggaccgatg

SEQ ID NO: 16716 - DNA, 203 bp, Artificial sequence
  synthetic
ggcgcgccagtcctaggtctgacttctgacatttctgacatttctgacatttctgacatttctgacatttctgacatttctgacatccggcgactttctgacatccggcgactttctgacatccggcgactttctgacatccggcgactttctgacatccggcgactttctgacatttctgacatttccgactcggaccgatg

SEQ ID NO: 16717 - DNA, 203 bp, Artificial sequence
  synthetic
ggcgcgccagtcctagtgcaactatctgacatttctgacatttctgacatttctgacatttctgacatttctgacatttctgacatccggcggacttctgacatccggcggacttctgacatccggcggacttctgacatccggcggacttctgacatccggcggacttctgacatttctgacatttccgactcggaccgatg

SEQ ID NO: 16718 - DNA, 203 bp, Artificial sequence
  synthetic
ggcgcgccagtccttccaactagttctgacatttctgacatttctgacatttctgacatttctgacatttctgacatttctgacatccggcggccttctgacatccggcggccttctgacatccggcggccttctgacatccggcggccttctgacatccggcggccttctgacatttctgacatttccgactcggaccgatg

SEQ ID NO: 16719 - DNA, 203 bp, Artificial sequence
  synthetic
ggcgcgccagtcctacatgagacatctgacatttctgacatttctgacatttctgacatttctgacatttctgacatttctgacatccggcgggcttctgacatccggcgggcttctgacatccggcgggcttctgacatccggcgggcttctgacatccggcgggcttctgacatttctgacatttccgactcggaccgatg

SEQ ID NO: 16720 - DNA, 203 bp, Artificial sequence
  synthetic
ggcgcgccagtccttaacggtgtatctgacatttctgacatttctgacatttctgacatttctgacatttctgacatttctgacatccggcggggttctgacatccggcggggttctgacatccggcggggttctgacatccggcggggttctgacatccggcggggttctgacatttctgacatttccgactcggaccgatg

SEQ ID NO: 16721 - DNA, 203 bp, Artificial sequence
  synthetic
ggcgcgccagtcctttcgatcgattctgacatttctgacatttctgacatttctgacatttctgacatttctgacatttctgacatccggcgggtttctgacatccggcgggtttctgacatccggcgggtttctgacatccggcgggtttctgacatccggcgggtttctgacatccggcgggtttccgactcggaccgatg

SEQ ID NO: 16722 - DNA, 203 bp, Artificial sequence
  synthetic
ggcgcgccagtcctctgttgtcactctgacatttctgacatttctgacatttctgacatttctgacatttctgacatttctgacatccggcgggtttctgacatccggcgggtttctgacatccggcgggtttctgacatccggcgggtttctgacatccggcgggtttctgacatccggcgggtttccgactcggaccgatg

SEQ ID NO: 16723 - DNA, 203 bp, Artificial sequence
  synthetic
ggcgcgccagtcctacaacagttttctgacatttctgacatttctgacatttctgacatttctgacatttctgacatttctgacatccggcgggtttctgacatccggcgggtttctgacatccggcgggtttctgacatccggcgggtttctgacatccggcgggtttctgacatccggcgggtttccgactcggaccgatg

SEQ ID NO: 16724 - DNA, 203 bp, Artificial sequence
  synthetic
ggcgcgccagtcctagcattcacatctgacatttctgacatttctgacatttctgacatttctgacatttctgacatttctgacatccggcgggtttctgacatccggcgggtttctgacatccggcgggtttctgacatccggcgggtttctgacatccggcgggtttctgacatccggcgggtttccgactcggaccgatg

SEQ ID NO: 16725 - DNA, 203 bp, Artificial sequence
  synthetic
ggcgcgccagtccttgaagttaactctgacatttctgacatttctgacatttctgacatttctgacatttctgacatttctgacatccggcgggtttctgacatccggcgggtttctgacatccggcgggtttctgacatccggcgggtttctgacatccggcgggtttctgacatccggcgggtttccgactcggaccgatg

SEQ ID NO: 16726 - DNA, 203 bp, Artificial sequence
  synthetic
ggcgcgccagtcctgtgaagtttatctgacatttctgacatttctgacatttctgacatttctgacatttctgacatttctgacatccggcgggtttctgacatccggcgggtttctgacatccggcgggtttctgacatccggcgggtttctgacatttctgacatttctgacatccggcgggtttccgactcggaccgatg

SEQ ID NO: 16727 - DNA, 203 bp, Artificial sequence
  synthetic
ggcgcgccagtcctgttgtagtattctgacatttctgacatttctgacatttctgacatttctgacatttctgacatttctgacatccggcgggtttctgacatccggcgggtttctgacatttctgacatttctgacatccggcgggtttctgacatccggcgggtttctgacatttctgacatttccgactcggaccgatg

SEQ ID NO: 16728 - DNA, 203 bp, Artificial sequence
  synthetic
ggcgcgccagtcctgttttgtacttctgacatttctgacatttctgacatttctgacatttctgacatttctgacatttctgacatccggcgggtttctgacatccggcgggtttctgacatttctgacatttctgacatccggcgggtttctgacatttctgacatttctgacatttctgacatttccgactcggaccgatg

SEQ ID NO: 16729 - DNA, 203 bp, Artificial sequence
  synthetic
ggcgcgccagtcctgcaaagaatttctgacatttctgacatttctgacatttctgacatttctgacatttctgacatttctgacatccggcgggtttctgacatttctgacatttctgacatccggcgggtttctgacatccggcgggtttctgacatttctgacatttctgacatccggcgggtttccgactcggaccgatg

SEQ ID NO: 16730 - DNA, 203 bp, Artificial sequence
  synthetic
ggcgcgccagtcctatgtagaaactctgacatttctgacatttctgacatttctgacatttctgacatttctgacatttctgacatccggcgggtttctgacatttctgacatttctgacatccggcgggtttctgacatttctgacatttctgacatttctgacatttctgacatttctgacatttccgactcggaccgatg

SEQ ID NO: 16731 - DNA, 203 bp, Artificial sequence
  synthetic
ggcgcgccagtcctccttgtagaatctgacatttctgacatttctgacatttctgacatttctgacatttctgacatttctgacatccggcgggtttctgacatttctgacatttctgacatttctgacatttctgacatccggcgggtttctgacatccggcgggtttctgacatccggcgggtttccgactcggaccgatg

SEQ ID NO: 16732 - DNA, 203 bp, Artificial sequence
  synthetic
ggcgcgccagtcctgcatacattctctgacatttctgacatttctgacatttctgacatttctgacatttctgacatttctgacatccggcgggtttctgacatttctgacatttctgacatttctgacatttctgacatttctgacatttctgacatccggcgggtttctgacatttctgacatttccgactcggaccgatg

SEQ ID NO: 16733 - DNA, 203 bp, Artificial sequence
  synthetic
ggcgcgccagtcctcatacagaaatctgacatttctgacatttctgacatttctgacatttctgacatttctgacatttctgacatccggcgggtttctgacatttctgacatttctgacatttctgacatttctgacatttctgacatttctgacatttctgacatttctgacatttcccggcgggtcgactcggaccgatg

SEQ ID NO: 16734 - DNA, 203 bp, Artificial sequence
  synthetic
ggcgcgccagtccttcgttgtatgtctgacatttctgacatttctgacatttctgacatttctgacatttctgacatttctgacatccggcggtcttctgacatccggcggtcttctgacatccggcggtcttctgacatccggcggtcttctgacatccggcggtcttctgacatttctgacatttccgactcggaccgatg

SEQ ID NO: 16735 - DNA, 203 bp, Artificial sequence
  synthetic
ggcgcgccagtcctatgtatgtagtctgacatttctgacatttctgacatttctgacatttctgacatttctgacatttctgacatccggcggttttctgacatccggcggttttctgacatccggcggttttctgacatccggcggttttctgacatccggcggttttctgacatttctgacatttccgactcggaccgatg

SEQ ID NO: 16736 - DNA, 203 bp, Artificial sequence
  synthetic
ggcgcgccagtcctaatctgtatgtctgacatttctgacatttctgacatttctgacatttctgacatttctgacatttctgacatccggctggtttctgacatccggctggtttctgacatccggctggtttctgacatccggctggtttctgacatccggctggtttctgacatttctgacatttccgactcggaccgatg

SEQ ID NO: 16737 - DNA, 203 bp, Artificial sequence
  synthetic
ggcgcgccagtcctatcagacgaatctgacatttctgacatttctgacatttctgacatttctgacatttctgacatttctgacatccgggaggtttctgacatccgggaggtttctgacatccgggaggtttctgacatccgggaggtttctgacatccgggaggtttctgacatttctgacatttccgactcggaccgatg

SEQ ID NO: 16738 - DNA, 203 bp, Artificial sequence
  synthetic
ggcgcgccagtcctactggtaggatctgacatttctgacatttctgacatttctgacatttctgacatttctgacatttctgacatccggtcggtttctgacatccggtcggtttctgacatccggtcggtttctgacatccggtcggtttctgacatccggtcggtttctgacatttctgacatttccgactcggaccgatg

SEQ ID NO: 16739 - DNA, 203 bp, Artificial sequence
  synthetic
ggcgcgccagtcctgatacctctttctgacatttctgacatttctgacatttctgacatttctgacatttctgacatttctgacatccggttggtttctgacatccggttggtttctgacatccggttggtttctgacatccggttggtttctgacatccggttggtttctgacatttctgacatttccgactcggaccgatg

SEQ ID NO: 16740 - DNA, 203 bp, Artificial sequence
  synthetic
ggcgcgccagtcctaggatacctctctgacatttctgacatttctgacatttctgacatttctgacatttctgacatttctgacatccgtcgggtttctgacatccgtcgggtttctgacatccgtcgggtttctgacatccgtcgggtttctgacatccgtcgggtttctgacatttctgacatttccgactcggaccgatg

SEQ ID NO: 16741 - DNA, 203 bp, Artificial sequence
  synthetic
ggcgcgccagtcctactcagcgtctctgacatttctgacatttctgacatttctgacatttctgacatttctgacatttctgacatcctccgggtttctgacatcctccgggtttctgacatcctccgggtttctgacatcctccgggtttctgacatcctccgggtttctgacatttctgacatttccgactcggaccgatg

SEQ ID NO: 16742 - DNA, 203 bp, Artificial sequence
  synthetic
ggcgcgccagtcctgcagttcacatctgacatttctgacatttctgacatttctgacatttctgacatttctgacatttctgacatcgacaattcctttaacatcgacaattcctttaacatcgacaattcctttaacatcgacaattcctttaacatcgacaattcctttaacatttctgacatttccgactcggaccgatg

SEQ ID NO: 16743 - DNA, 203 bp, Artificial sequence
  synthetic
ggcgcgccagtcctcctgctgacatctgacatttctgacatttctgacatttctgacatttctgacatttctgacatttctgacatcgccaattcctttaacatcgccaattcctttaacatcgccaattcctttaacatcgccaattcctttaacatcgccaattcctttaacatttctgacatttccgactcggaccgatg

SEQ ID NO: 16744 - DNA, 203 bp, Artificial sequence
  synthetic
ggcgcgccagtccttgtcagcatttctgacatttctgacatttctgacatttctgacatttctgacatttctgacatttctgacatcgcgaattcctttaacatcgcgaattcctttaacatcgcgaattcctttaacatcgcgaattcctttaacatcgcgaattcctttaacatttctgacatttccgactcggaccgatg

SEQ ID NO: 16745 - DNA, 203 bp, Artificial sequence
  synthetic
ggcgcgccagtccttcgcaagatatctgacatttctgacatttctgacatttctgacatttctgacatttctgacatttctgacatcgctcccatttctgacatcgctcccatttctgacatcgctcccatttctgacatcgctcccatttctgacatcgctcccatttctgacatttctgacatttccgactcggaccgatg

SEQ ID NO: 16746 - DNA, 203 bp, Artificial sequence
  synthetic
ggcgcgccagtcctgtggtgattctctgacatttctgacatttctgacatttctgacatttctgacatttctgacatttctgacatcgcttggcaaactgacatcgcttggcaaactgacatcgcttggcaaactgacatcgcttggcaaactgacatcgcttggcaaactgacatttctgacatttccgactcggaccgatg

SEQ ID NO: 16747 - DNA, 203 bp, Artificial sequence
  synthetic
ggcgcgccagtccttctgtgcatttctgacatttctgacatttctgacatttctgacatttctgacatttctgacatttctgacatcggcaattcctttaacatcggcaattcctttaacatcggcaattcctttaacatcggcaattcctttaacatcggcaattcctttaacatttctgacatttccgactcggaccgatg

SEQ ID NO: 16748 - DNA, 203 bp, Artificial sequence
  synthetic
ggcgcgccagtcctcttgttcagatctgacatttctgacatttctgacatttctgacatttctgacatttctgacatttctgacatcgtcaacgcctttaacatcgtcaacgcctttaacatcgtcaacgcctttaacatcgtcaacgcctttaacatcgtcaacgcctttaacatttctgacatttccgactcggaccgatg

SEQ ID NO: 16749 - DNA, 203 bp, Artificial sequence
  synthetic
ggcgcgccagtcctaccactcagatctgacatttctgacatttctgacatttctgacatttctgacatttctgacatttctgacatcgtcaagacctttaacatcgtcaagacctttaacatcgtcaagacctttaacatcgtcaagacctttaacatcgtcaagacctttaacatttctgacatttccgactcggaccgatg

SEQ ID NO: 16750 - DNA, 203 bp, Artificial sequence
  synthetic
ggcgcgccagtcctccaggcttcttctgacatttctgacatttctgacatttctgacatttctgacatttctgacatttctgacatcgtcaaggcctttaacatcgtcaaggcctttaacatcgtcaaggcctttaacatcgtcaaggcctttaacatcgtcaaggcctttaacatttctgacatttccgactcggaccgatg

SEQ ID NO: 16751 - DNA, 203 bp, Artificial sequence
  synthetic
ggcgcgccagtccttacaacctggtctgacatttctgacatttctgacatttctgacatttctgacatttctgacatttctgacatcgtcaatacctttaacatcgtcaatacctttaacatcgtcaatacctttaacatcgtcaatacctttaacatcgtcaatacctttaacatttctgacatttccgactcggaccgatg

SEQ ID NO: 16752 - DNA, 203 bp, Artificial sequence
  synthetic
ggcgcgccagtccttgagcaactgtctgacatttctgacatttctgacatttctgacatttctgacatttctgacatttctgacatcgtcaatgcctttaacatcgtcaatgcctttaacatcgtcaatgcctttaacatcgtcaatgcctttaacatcgtcaatgcctttaacatttctgacatttccgactcggaccgatg

SEQ ID NO: 16753 - DNA, 203 bp, Artificial sequence
  synthetic
ggcgcgccagtcctcatgaggccatctgacatttctgacatttctgacatttctgacatttctgacatttctgacatttctgacatcgtcaattagtttaacatcgtcaattagtttaacatcgtcaattagtttaacatcgtcaattagtttaacatcgtcaattagtttaacatttctgacatttccgactcggaccgatg

SEQ ID NO: 16754 - DNA, 203 bp, Artificial sequence
  synthetic
ggcgcgccagtccttctgacgatttctgacatttctgacatttctgacatttctgacatttctgacatttctgacatttctgacatcgtcaattcatttaacatcgtcaattcatttaacatcgtcaattcatttaacatcgtcaattcatttaacatcgtcaattcatttaacatttctgacatttccgactcggaccgatg

SEQ ID NO: 16755 - DNA, 203 bp, Artificial sequence
  synthetic
ggcgcgccagtcctaggtttcaagtctgacatttctgacatttctgacatttctgacatttctgacatttctgacatttctgacatcgtcaattccaataacatcgtcaattccaataacatcgtcaattccaataacatcgtcaattccaataacatcgtcaattccaataacatttctgacatttccgactcggaccgatg

SEQ ID NO: 16756 - DNA, 203 bp, Artificial sequence
  synthetic
ggcgcgccagtcctaatacgttgctctgacatttctgacatttctgacatttctgacatttctgacatttctgacatttctgacatcgtcaattcccgtaacatcgtcaattcccgtaacatcgtcaattcccgtaacatcgtcaattcccgtaacatcgtcaattcccgtaacatttctgacatttccgactcggaccgatg

SEQ ID NO: 16757 - DNA, 203 bp, Artificial sequence
  synthetic
ggcgcgccagtcctggcaacgagctctgacatttctgacatttctgacatttctgacatttctgacatttctgacatttctgacatcgtcaattccgttaacatcgtcaattccgttaacatcgtcaattccgttaacatcgtcaattccgttaacatcgtcaattccgttaacatttctgacatttccgactcggaccgatg

SEQ ID NO: 16758 - DNA, 203 bp, Artificial sequence
  synthetic
ggcgcgccagtcctctttgtaacatctgacatttctgacatttctgacatttctgacatttctgacatttctgacatttctgacatcgtcaattccttctacatcgtcaattccttctacatcgtcaattccttctacatcgtcaattccttctacatcgtcaattccttctacatttctgacatttccgactcggaccgatg

SEQ ID NO: 16759 - DNA, 203 bp, Artificial sequence
  synthetic
ggcgcgccagtcctacaaagcctttctgacatttctgacatttctgacatttctgacatttctgacatttctgacatttctgacatcgtcaattccttgcacatcgtcaattccttgcacatcgtcaattccttgcacatcgtcaattccttgcacatcgtcaattccttgcacatttctgacatttccgactcggaccgatg

SEQ ID NO: 16760 - DNA, 203 bp, Artificial sequence
  synthetic
ggcgcgccagtcctgacgaaagcctctgacatttctgacatttctgacatttctgacatttctgacatttctgacatttctgacatcgtcaattcctttaacatcgtcaattcctttaacatcgtcaattcctttaacatcgtcaattcctttaacatcgtcaattcctttaacatttctgacatttccgactcggaccgatg

SEQ ID NO: 16761 - DNA, 203 bp, Artificial sequence
  synthetic
ggcgcgccagtcctctgaaaggcctctgacatttctgacatttctgacatttctgacatttctgacatttctgacatttctgacatcgtcaattcctttaacatttctgacatttctgacatttctgacatttctgacatcgtcaattcctttaacatttctgacatttctgacatttctgacatttccgactcggaccgatg

SEQ ID NO: 16762 - DNA, 203 bp, Artificial sequence
  synthetic
ggcgcgccagtcctggctctgcaatctgacatttctgacatttctgacatttctgacatttctgacatttctgacatttctgacatcgtcaattcctttcacatcgtcaattcctttcacatcgtcaattcctttcacatcgtcaattcctttcacatcgtcaattcctttcacatttctgacatttccgactcggaccgatg

SEQ ID NO: 16763 - DNA, 203 bp, Artificial sequence
  synthetic
ggcgcgccagtcctggcctcacaatctgacatttctgacatttctgacatttctgacatttctgacatttctgacatttctgacatcgtcaattccttttacatcgtcaattccttttacatcgtcaattccttttacatcgtcaattccttttacatcgtcaattccttttacatttctgacatttccgactcggaccgatg

SEQ ID NO: 16764 - DNA, 203 bp, Artificial sequence
  synthetic
ggcgcgccagtcctgaagaccacctctgacatttctgacatttctgacatttctgacatttctgacatttctgacatttctgacatcgtcccttcctttaacatcgtcccttcctttaacatcgtcccttcctttaacatcgtcccttcctttaacatcgtcccttcctttaacatttctgacatttccgactcggaccgatg

SEQ ID NO: 16765 - DNA, 203 bp, Artificial sequence
  synthetic
ggcgcgccagtcctcacactagcctctgacatttctgacatttctgacatttctgacatttctgacatttctgacatttctgacatcgtccgttcctttaacatcgtccgttcctttaacatcgtccgttcctttaacatcgtccgttcctttaacatcgtccgttcctttaacatttctgacatttccgactcggaccgatg

SEQ ID NO: 16766 - DNA, 203 bp, Artificial sequence
  synthetic
ggcgcgccagtcctggtgtcctactctgacatttctgacatttctgacatttctgacatttctgacatttctgacatttctgacatcgtcgattcctttaacatcgtcgattcctttaacatcgtcgattcctttaacatcgtcgattcctttaacatcgtcgattcctttaacatttctgacatttccgactcggaccgatg

SEQ ID NO: 16767 - DNA, 203 bp, Artificial sequence
  synthetic
ggcgcgccagtcctggttctgctctctgacatttctgacatttctgacatttctgacatttctgacatttctgacatttctgacatcgtcggttcctttaacatcgtcggttcctttaacatcgtcggttcctttaacatcgtcggttcctttaacatcgtcggttcctttaacatttctgacatttccgactcggaccgatg

SEQ ID NO: 16768 - DNA, 203 bp, Artificial sequence
  synthetic
ggcgcgccagtcctggtgctctgttctgacatttctgacatttctgacatttctgacatttctgacatttctgacatttctgacatcgtcgtttcctttaacatcgtcgtttcctttaacatcgtcgtttcctttaacatcgtcgtttcctttaacatcgtcgtttcctttaacatttctgacatttccgactcggaccgatg

SEQ ID NO: 16769 - DNA, 203 bp, Artificial sequence
  synthetic
ggcgcgccagtcctggtagccttctctgacatttctgacatttctgacatttctgacatttctgacatttctgacatttctgacatcgtctattcctttaacatcgtctattcctttaacatcgtctattcctttaacatcgtctattcctttaacatcgtctattcctttaacatttctgacatttccgactcggaccgatg

SEQ ID NO: 16770 - DNA, 203 bp, Artificial sequence
  synthetic
ggcgcgccagtcctggtgtagagctctgacatttctgacatttctgacatttctgacatttctgacatttctgacatttctgacatcgtctgttcctttaacatcgtctgttcctttaacatcgtctgttcctttaacatcgtctgttcctttaacatcgtctgttcctttaacatttctgacatttccgactcggaccgatg

SEQ ID NO: 16771 - DNA, 203 bp, Artificial sequence
  synthetic
ggcgcgccagtcctggtttcggtctctgacatttctgacatttctgacatttctgacatttctgacatttctgacatttctgacatcgtcttttcctttaacatcgtcttttcctttaacatcgtcttttcctttaacatcgtcttttcctttaacatcgtcttttcctttaacatttctgacatttccgactcggaccgatg

SEQ ID NO: 16772 - DNA, 203 bp, Artificial sequence
  synthetic
ggcgcgccagtcctggactgagtctctgacatttctgacatttctgacatttctgacatttctgacatttctgacatttctgacatctcggccgtttctgacatctcggccgtttctgacatctcggccgtttctgacatctcggccgtttctgacatctcggccgtttctgacatttctgacatttccgactcggaccgatg

SEQ ID NO: 16773 - DNA, 203 bp, Artificial sequence
  synthetic
ggcgcgccagtcctgacatgacgatctgacatttctgacatttctgacatttctgacatttctgacatttctgacatttctgacatctcttggcaaactgacatctcttggcaaactgacatctcttggcaaactgacatctcttggcaaactgacatctcttggcaaactgacatttctgacatttccgactcggaccgatg

SEQ ID NO: 16774 - DNA, 203 bp, Artificial sequence
  synthetic
ggcgcgccagtcctcctctttgtgtctgacatttctgacatttctgacatttctgacatttctgacatttctgacatttctgacatctggcgggtttctgacatctggcgggtttctgacatctggcgggtttctgacatctggcgggtttctgacatctggcgggtttctgacatttctgacatttccgactcggaccgatg

SEQ ID NO: 16775 - DNA, 203 bp, Artificial sequence
  synthetic
ggcgcgccagtcctagaatctttttctgacatttctgacatttctgacatttctgacatttctgacatttctgacatttctgacatcttcaattcctttaacatcttcaattcctttaacatcttcaattcctttaacatcttcaattcctttaacatcttcaattcctttaacatttctgacatttccgactcggaccgatg

SEQ ID NO: 16776 - DNA, 203 bp, Artificial sequence
  synthetic
ggcgcgccagtcctctctcgtagctctgacatttctgacatttctgacatttctgacatttctgacatttctgacatttctgacatgatcaattcctttaacatgatcaattcctttaacatgatcaattcctttaacatgatcaattcctttaacatgatcaattcctttaacatttctgacatttccgactcggaccgatg

SEQ ID NO: 16777 - DNA, 203 bp, Artificial sequence
  synthetic
ggcgcgccagtcctgctctacgaatctgacatttctgacatttctgacatttctgacatttctgacatttctgacatttctgacatgccggccgtttctgacatgccggccgtttctgacatgccggccgtttctgacatgccggccgtttctgacatgccggccgtttctgacatttctgacatttccgactcggaccgatg

SEQ ID NO: 16778 - DNA, 203 bp, Artificial sequence
  synthetic
ggcgcgccagtcctcctacgaatctctgacatttctgacatttctgacatttctgacatttctgacatttctgacatttctgacatgcggcgggtttctgacatgcggcgggtttctgacatgcggcgggtttctgacatgcggcgggtttctgacatgcggcgggtttctgacatttctgacatttccgactcggaccgatg

SEQ ID NO: 16779 - DNA, 203 bp, Artificial sequence
  synthetic
ggcgcgccagtcctttcactacgatctgacatttctgacatttctgacatttctgacatttctgacatttctgacatttctgacatgctcaattcctttaacatgctcaattcctttaacatgctcaattcctttaacatgctcaattcctttaacatgctcaattcctttaacatttctgacatttccgactcggaccgatg

SEQ ID NO: 16780 - DNA, 203 bp, Artificial sequence
  synthetic
ggcgcgccagtccttccatggacctctgacatttctgacatttctgacatttctgacatttctgacatttctgacatttctgacatggtcaattcctttaacatggtcaattcctttaacatggtcaattcctttaacatggtcaattcctttaacatggtcaattcctttaacatttctgacatttccgactcggaccgatg

SEQ ID NO: 16781 - DNA, 203 bp, Artificial sequence
  synthetic
ggcgcgccagtcctatgtgtcctttctgacatttctgacatttctgacatttctgacatttctgacatttctgacatttctgacatgtcggaatcgagaaacatgtcggaatcgagaaacatgtcggaatcgagaaacatgtcggaatcgagaaacatgtcggaatcgagaaacatttctgacatttccgactcggaccgatg

SEQ ID NO: 16782 - DNA, 203 bp, Artificial sequence
  synthetic
ggcgcgccagtcctacactgcagttctgacatttctgacatttctgacatttctgacatttctgacatttctgacatttctgacatgtggcgggtttctgacatgtggcgggtttctgacatgtggcgggtttctgacatgtggcgggtttctgacatgtggcgggtttctgacatttctgacatttccgactcggaccgatg

SEQ ID NO: 16783 - DNA, 203 bp, Artificial sequence
  synthetic
ggcgcgccagtcctgtcgtcatgttctgacatttctgacatttctgacatttctgacatttctgacatttctgacatttctgacattaaccccatttctgacattaaccccatttctgacattaaccccatttctgacattaaccccatttctgacattaaccccatttctgacatttctgacatttccgactcggaccgatg

SEQ ID NO: 16784 - DNA, 203 bp, Artificial sequence
  synthetic
ggcgcgccagtcctcagtcaccattctgacatttctgacatttctgacatttctgacatttctgacatttctgacatttctgacattaacggccatgcaccaccacccacggaatcgagaaagagctatcaatctgtcaattctgacatttctgacatttctgacatttctgacatttctgacatttccgactcggaccgatg

SEQ ID NO: 16785 - DNA, 203 bp, Artificial sequence
  synthetic
ggcgcgccagtcctgatcaagcagtctgacatttctgacatttctgacatttctgacatttctgacatttctgacatttctgacattaagcccatttctgacattaagcccatttctgacattaagcccatttctgacattaagcccatttctgacattaagcccatttctgacatttctgacatttccgactcggaccgatg

SEQ ID NO: 16786 - DNA, 203 bp, Artificial sequence
  synthetic
ggcgcgccagtccttgtaacaaggtctgacatttctgacatttctgacatttctgacatttctgacatttctgacatttctgacattaatcccatttctgacattaatcccatttctgacattaatcccatttctgacattaatcccatttctgacattaatcccatttctgacatttctgacatttccgactcggaccgatg

SEQ ID NO: 16787 - DNA, 203 bp, Artificial sequence
  synthetic
ggcgcgccagtcctgccttgttaatctgacatttctgacatttctgacatttctgacatttctgacatttctgacatttctgacattacggaatcgagaaacattacggaatcgagaaacattacggaatcgagaaacattacggaatcgagaaacattacggaatcgagaaacatttctgacatttccgactcggaccgatg

SEQ ID NO: 16788 - DNA, 203 bp, Artificial sequence
  synthetic
ggcgcgccagtcctacagttgatttctgacatttctgacatttctgacatttctgacatttctgacatttctgacatttctgacattactagcatttctgacattactagcatttctgacattactagcatttctgacattactagcatttctgacattactagcatttctgacatttctgacatttccgactcggaccgatg

SEQ ID NO: 16789 - DNA, 203 bp, Artificial sequence
  synthetic
ggcgcgccagtcctttgctagagatctgacatttctgacatttctgacatttctgacatttctgacatttctgacatttctgacattactcagatttctgacattactcagatttctgacattactcagatttctgacattactcagatttctgacattactcagatttctgacatttctgacatttccgactcggaccgatg

SEQ ID NO: 16790 - DNA, 203 bp, Artificial sequence
  synthetic
ggcgcgccagtccttctagcaaactctgacatttctgacatttctgacatttctgacatttctgacatttctgacatttctgacattactcccatttctgacattactcccatttctgacattactcccatttctgacattactcccatttctgacattactcccatttctgacattactcccatttccgactcggaccgatg

SEQ ID NO: 16791 - DNA, 203 bp, Artificial sequence
  synthetic
ggcgcgccagtcctgtagcaaacatctgacatttctgacatttctgacatttctgacatttctgacatttctgacatttctgacattactcccatttctgacattactcccatttctgacattactcccatttctgacattactcccatttctgacattactcccatttctgacatttctgacatttccgactcggaccgatg

SEQ ID NO: 16792 - DNA, 203 bp, Artificial sequence
  synthetic
ggcgcgccagtcctttaaagctaatctgacatttctgacatttctgacatttctgacatttctgacatttctgacatttctgacattactcccatttctgacattactcccatttctgacattactcccatttctgacattactcccatttctgacatttctgacatttctgacatttctgacatttccgactcggaccgatg

SEQ ID NO: 16793 - DNA, 203 bp, Artificial sequence
  synthetic
ggcgcgccagtccttaggatcgtctctgacatttctgacatttctgacatttctgacatttctgacatttctgacatttctgacattactcccatttctgacattactcccatttctgacattactcccatttctgacatttctgacatttctgacattactcccatttctgacattactcccatttccgactcggaccgatg

SEQ ID NO: 16794 - DNA, 203 bp, Artificial sequence
  synthetic
ggcgcgccagtcctggatcgtcagtctgacatttctgacatttctgacatttctgacatttctgacatttctgacatttctgacattactcccatttctgacattactcccatttctgacattactcccatttctgacatttctgacatttctgacattactcccatttctgacatttctgacatttccgactcggaccgatg

SEQ ID NO: 16795 - DNA, 203 bp, Artificial sequence
  synthetic
ggcgcgccagtccttgcttgggtctctgacatttctgacatttctgacatttctgacatttctgacatttctgacatttctgacattactcccatttctgacattactcccatttctgacattactcccatttctgacatttctgacatttctgacatttctgacatttctgacattactcccatttccgactcggaccgatg

SEQ ID NO: 16796 - DNA, 203 bp, Artificial sequence
  synthetic
ggcgcgccagtccttctcttacagtctgacatttctgacatttctgacatttctgacatttctgacatttctgacatttctgacattactcccatttctgacattactcccatttctgacattactcccatttctgacatttctgacatttctgacatttctgacatttctgacatttctgacatttccgactcggaccgatg

SEQ ID NO: 16797 - DNA, 203 bp, Artificial sequence
  synthetic
ggcgcgccagtccttcctgtgaactctgacatttctgacatttctgacatttctgacatttctgacatttctgacatttctgacattactcccatttctgacattactcccatttctgacatttctgacatttctgacattactcccatttctgacatttctgacatttctgacattactcccatttccgactcggaccgatg

SEQ ID NO: 16798 - DNA, 203 bp, Artificial sequence
  synthetic
ggcgcgccagtcctgaaaccgtactctgacatttctgacatttctgacatttctgacatttctgacatttctgacatttctgacattactcccatttctgacattactcccatttctgacatttctgacatttctgacatttctgacatttctgacatttctgacatttctgacattactcccatttccgactcggaccgatg

SEQ ID NO: 16799 - DNA, 203 bp, Artificial sequence
  synthetic
ggcgcgccagtcctgtacggtgagtctgacatttctgacatttctgacatttctgacatttctgacatttctgacatttctgacattactcccatttctgacattactcccatttctgacatttctgacatttctgacatttctgacatttctgacatttctgacatttctgacatttctgacatttccgactcggaccgatg

SEQ ID NO: 16800 - DNA, 203 bp, Artificial sequence
  synthetic
ggcgcgccagtccttagtacggtatctgacatttctgacatttctgacatttctgacatttctgacatttctgacatttctgacattactcccatttctgacatttctgacatttctgacattactcccatttctgacattactcccatttctgacattactcccatttctgacattactcccatttccgactcggaccgatg

SEQ ID NO: 16801 - DNA, 203 bp, Artificial sequence
  synthetic
ggcgcgccagtcctggtacggtgatctgacatttctgacatttctgacatttctgacatttctgacatttctgacatttctgacattactcccatttctgacatttctgacatttctgacattactcccatttctgacattactcccatttctgacattactcccatttctgacatttctgacatttccgactcggaccgatg

SEQ ID NO: 16802 - DNA, 203 bp, Artificial sequence
  synthetic
ggcgcgccagtccttcaggacacatctgacatttctgacatttctgacatttctgacatttctgacatttctgacatttctgacattactcccatttctgacatttctgacatttctgacattactcccatttctgacattactcccatttctgacatttctgacatttctgacattactcccatttccgactcggaccgatg

SEQ ID NO: 16803 - DNA, 203 bp, Artificial sequence
  synthetic
ggcgcgccagtcctggcagtcgtatctgacatttctgacatttctgacatttctgacatttctgacatttctgacatttctgacattactcccatttctgacatttctgacatttctgacattactcccatttctgacattactcccatttctgacatttctgacatttctgacatttctgacatttccgactcggaccgatg

SEQ ID NO: 16804 - DNA, 203 bp, Artificial sequence
  synthetic
ggcgcgccagtcctccaggctgtatctgacatttctgacatttctgacatttctgacatttctgacatttctgacatttctgacattactcccatttctgacatttctgacatttctgacattactcccatttctgacatttctgacatttctgacattactcccatttctgacattactcccatttccgactcggaccgatg

SEQ ID NO: 16805 - DNA, 203 bp, Artificial sequence
  synthetic
ggcgcgccagtcctcctcactgcctctgacatttctgacatttctgacatttctgacatttctgacatttctgacatttctgacattactcccatttctgacatttctgacatttctgacattactcccatttctgacatttctgacatttctgacattactcccatttctgacatttctgacatttccgactcggaccgatg

SEQ ID NO: 16806 - DNA, 203 bp, Artificial sequence
  synthetic
ggcgcgccagtccttaggctgtgttctgacatttctgacatttctgacatttctgacatttctgacatttctgacatttctgacattactcccatttctgacatttctgacatttctgacattactcccatttctgacatttctgacatttctgacatttctgacatttctgacattactcccatttccgactcggaccgatg

SEQ ID NO: 16807 - DNA, 203 bp, Artificial sequence
  synthetic
ggcgcgccagtcctggctgtcaggtctgacatttctgacatttctgacatttctgacatttctgacatttctgacatttctgacattactcccatttctgacatttctgacatttctgacatttctgacatttctgacattactcccatttctgacattactcccatttctgacattactcccatttccgactcggaccgatg

SEQ ID NO: 16808 - DNA, 203 bp, Artificial sequence
  synthetic
ggcgcgccagtccttacactgccttctgacatttctgacatttctgacatttctgacatttctgacatttctgacatttctgacattactcccatttctgacatttctgacatttctgacatttctgacatttctgacattactcccatttctgacattactcccatttctgacatttctgacatttccgactcggaccgatg

SEQ ID NO: 16809 - DNA, 203 bp, Artificial sequence
  synthetic
ggcgcgccagtcctaggcagtctttctgacatttctgacatttctgacatttctgacatttctgacatttctgacatttctgacattactcccatttctgacatttctgacatttctgacatttctgacatttctgacattactcccatttctgacatttctgacatttctgacatttctgacatttccgactcggaccgatg

SEQ ID NO: 16810 - DNA, 203 bp, Artificial sequence
  synthetic
ggcgcgccagtccttcatggtggatctgacatttctgacatttctgacatttctgacatttctgacatttctgacatttctgacattactcccatttctgacatttctgacatttctgacatttctgacatttctgacatttctgacatttctgacattactcccatttctgacatttctgacatttccgactcggaccgatg

SEQ ID NO: 16811 - DNA, 203 bp, Artificial sequence
  synthetic
ggcgcgccagtcctttaaggatcttctgacatttctgacatttctgacatttctgacatttctgacatttctgacatttctgacattactcccatttctgacatttctgacatttctgacatttctgacatttctgacatttctgacatttctgacatttctgacatttctgacattactcccatttccgactcggaccgatg

SEQ ID NO: 16812 - DNA, 203 bp, Artificial sequence
  synthetic
ggcgcgccagtcctctctaccagatctgacatttctgacatttctgacatttctgacatttctgacatttctgacatttctgacattactcgtatttctgacattactcgtatttctgacattactcgtatttctgacattactcgtatttctgacattactcgtatttctgacatttctgacatttccgactcggaccgatg

SEQ ID NO: 16813 - DNA, 203 bp, Artificial sequence
  synthetic
ggcgcgccagtcctacaggcttactctgacatttctgacatttctgacatttctgacatttctgacatttctgacatttctgacattactgacatttctgacattactgacatttctgacattactgacatttctgacattactgacatttctgacattactgacatttctgacatttctgacatttccgactcggaccgatg

SEQ ID NO: 16814 - DNA, 203 bp, Artificial sequence
  synthetic
ggcgcgccagtcctaggacaacagtctgacatttctgacatttctgacatttctgacatttctgacatttctgacatttctgacattacttggcaaactgacattacttggcaaactgacattacttggcaaactgacattacttggcaaactgacattacttggcaaactgacatttctgacatttccgactcggaccgatg

SEQ ID NO: 16815 - DNA, 203 bp, Artificial sequence
  synthetic
ggcgcgccagtcctgctacgagtttctgacatttctgacatttctgacatttctgacatttctgacatttctgacatttctgacattactttcatttctgacattactttcatttctgacattactttcatttctgacattactttcatttctgacattactttcatttctgacatttctgacatttccgactcggaccgatg

SEQ ID NO: 16816 - DNA, 203 bp, Artificial sequence
  synthetic
ggcgcgccagtcctcctgagacaatctgacatttctgacatttctgacatttctgacatttctgacatttctgacatttctgacattagccccatttctgacattagccccatttctgacattagccccatttctgacattagccccatttctgacattagccccatttctgacatttctgacatttccgactcggaccgatg

SEQ ID NO: 16817 - DNA, 203 bp, Artificial sequence
  synthetic
ggcgcgccagtcctgtagacaacttctgacatttctgacatttctgacatttctgacatttctgacatttctgacatttctgacattaggcccatttctgacattaggcccatttctgacattaggcccatttctgacattaggcccatttctgacattaggcccatttctgacatttctgacatttccgactcggaccgatg

SEQ ID NO: 16818 - DNA, 203 bp, Artificial sequence
  synthetic
ggcgcgccagtccttcagacaagctctgacatttctgacatttctgacatttctgacatttctgacatttctgacatttctgacattaggcgggtttctgacattaggcgggtttctgacattaggcgggtttctgacattaggcgggtttctgacattaggcgggtttctgacatttctgacatttccgactcggaccgatg

SEQ ID NO: 16819 - DNA, 203 bp, Artificial sequence
  synthetic
ggcgcgccagtcctcatgggtatttctgacatttctgacatttctgacatttctgacatttctgacatttctgacatttctgacattccggaatcgagaaacattccggaatcgagaaacattccggaatcgagaaacattccggaatcgagaaacattccggaatcgagaaacatttctgacatttccgactcggaccgatg

SEQ ID NO: 16820 - DNA, 203 bp, Artificial sequence
  synthetic
ggcgcgccagtcctgtcatgttcatctgacatttctgacatttctgacatttctgacatttctgacatttctgacatttctgacattcctcccatttctgacattcctcccatttctgacattcctcccatttctgacattcctcccatttctgacattcctcccatttctgacatttctgacatttccgactcggaccgatg

SEQ ID NO: 16821 - DNA, 203 bp, Artificial sequence
  synthetic
ggcgcgccagtcctgtgagaagtttctgacatttctgacatttctgacatttctgacatttctgacatttctgacatttctgacattgcggccgtttctgacattgcggccgtttctgacattgcggccgtttctgacattgcggccgtttctgacattgcggccgtttctgacatttctgacatttccgactcggaccgatg

SEQ ID NO: 16822 - DNA, 203 bp, Artificial sequence
  synthetic
ggcgcgccagtcctgtatctaagttctgacatttctgacatttctgacatttctgacatttctgacatttctgacatttctgacattgctcccatttctgacattgctcccatttctgacattgctcccatttctgacattgctcccatttctgacattgctcccatttctgacatttctgacatttccgactcggaccgatg

SEQ ID NO: 16823 - DNA, 203 bp, Artificial sequence
  synthetic
ggcgcgccagtccttctaagctcatctgacatttctgacatttctgacatttctgacatttctgacatttctgacatttctgacattgggcgggtttctgacattgggcgggtttctgacattgggcgggtttctgacattgggcgggtttctgacattgggcgggtttctgacatttctgacatttccgactcggaccgatg

SEQ ID NO: 16824 - DNA, 203 bp, Artificial sequence
  synthetic
ggcgcgccagtcctaatctaaggatctgacatttctgacatttctgacatttctgacatttctgacatttctgacatttctgacattgtcaattcctttaacattgtcaattcctttaacattgtcaattcctttaacattgtcaattcctttaacattgtcaattcctttaacatttctgacatttccgactcggaccgatg

SEQ ID NO: 16825 - DNA, 203 bp, Artificial sequence
  synthetic
ggcgcgccagtcctccacttagactctgacatttctgacatttctgacatttctgacatttctgacatttctgacatttctgacatttaccggccgtctgacatttctgacatttctgacatttctgacatttctgacatttctgacatttctgacatttctgacatttctgacatttctgtactccccgactcggaccgatg

SEQ ID NO: 16826 - DNA, 203 bp, Artificial sequence
  synthetic
ggcgcgccagtccttcttagactgtctgacatttctgacatttctgacatttctgacatttctgacatttctgacatttctgacatttaccggccgtctgacatttctgacatttctgacatttctgacatttctgacatttctgacatttctgacatttctgacatttctgaccacggaatcgagaacgactcggaccgatg

SEQ ID NO: 16827 - DNA, 203 bp, Artificial sequence
  synthetic
ggcgcgccagtccttcttagagactctgacatttctgacatttctgacatttctgacatttctgacatttctgacatttctgacatttaccggccgtctgacatttctgacatttctgacatttctgacatttctgacatttctgacatttctgacatttctgacatttctgaccgtcaattcctttacgactcggaccgatg

SEQ ID NO: 16828 - DNA, 203 bp, Artificial sequence
  synthetic
ggcgcgccagtcctccaccgtgcctctgacatttctgacatttctgacatttctgacatttctgacatttctgacatttctgacatttactggcaaactgacatttactggcaaactgacatttactggcaaactgacatttactggcaaactgacatttactggcaaactgacatttctgacatttccgactcggaccgatg

SEQ ID NO: 16829 - DNA, 203 bp, Artificial sequence
  synthetic
ggcgcgccagtcctagtttgggtatctgacatttctgacatttctgacatttctgacatttctgacatttctgacatttctgacatttcagccattcgcagtttcactgtaccggccgtgcgtactcagacatgcatggtttctgacatttctgacatttctgacatttctgacatttctgacatttccgactcggaccgatg

SEQ ID NO: 16830 - DNA, 203 bp, Artificial sequence
  synthetic
ggcgcgccagtcctcaacagtgactctgacatttctgacatttctgacatttctgacatttctgacatttctgacatttctgacatttccggccatgcaccaccacccacggaatcgagaaagagctatcaatctgtcatttctgacatttctgacatttctgacatttctgacatttctgacatttccgactcggaccgatg

SEQ ID NO: 16831 - DNA, 203 bp, Artificial sequence
  synthetic
ggcgcgccagtcctttgaacagcatctgacatttctgacatttctgacatttctgacatttctgacatttctgacatttctgacatttccggcgggtctgacatttctgacatttctgacatttctgacatttctgacatttctgacatttctgacatttctgacatttctgacatttctgtactccccgactcggaccgatg

SEQ ID NO: 16832 - DNA, 203 bp, Artificial sequence
  synthetic
ggcgcgccagtcctaacgctactctctgacatttctgacatttctgacatttctgacatttctgacatttctgacatttctgacatttcctggcaaactgacatttcctggcaaactgacatttcctggcaaactgacatttcctggcaaactgacatttcctggcaaactgacatttctgacatttccgactcggaccgatg

SEQ ID NO: 16833 - DNA, 203 bp, Artificial sequence
  synthetic
ggcgcgccagtcctcagatcagtgtctgacatttctgacatttctgacatttctgacatttctgacatttctgacatttctgacatttcggccgtttctgacatttcggccgtttctgacatttcggccgtttctgacatttcggccgtttctgacatttcggccgtttctgacatttctgacatttccgactcggaccgatg

SEQ ID NO: 16834 - DNA, 203 bp, Artificial sequence
  synthetic
ggcgcgccagtcctgactgcagtctctgacatttctgacatttctgacatttctgacatttctgacatttctgacatttctgacatttcgtcaattcctttaatttctgacatttctgacatttctgacatttctgacatttctgacatttctgacatttctgacatttctgacatttcaccggccgtcgactcggaccgatg

SEQ ID NO: 16835 - DNA, 203 bp, Artificial sequence
  synthetic
ggcgcgccagtcctcttaacacattctgacatttctgacatttctgacatttctgacatttctgacatttctgacatttctgacatttcgtcaattcctttaatttctgacatttctgacatttctgacatttctgacatttctgacatttctgacatttctgacatttctgacatttcccggcgggtcgactcggaccgatg

SEQ ID NO: 16836 - DNA, 203 bp, Artificial sequence
  synthetic
ggcgcgccagtcctaggttgacgatctgacatttctgacatttctgacatttctgacatttctgacatttctgacatttctgacatttcgttcttgattaatgaaaacattcttggcaaatgctttcgctctggtccgtcttctgacatttctgacatttctgacatttctgacatttctgacatttccgactcggaccgatg

SEQ ID NO: 16837 - DNA, 203 bp, Artificial sequence
  synthetic
ggcgcgccagtcctctcgtcaacctctgacatttctgacatttctgacatttctgacatttctgacatttctgacatttctgacatttcgttcttgattaatgaaaacattcttggcaaatgctttcgctctggtccgttttctgacatttctgacatttctgacatttctgacatttctgacatttccgactcggaccgatg

SEQ ID NO: 16838 - DNA, 203 bp, Artificial sequence
  synthetic
ggcgcgccagtcctgaggatcacttctgacatttctgacatttctgacatttctgacatttctgacatttctgacatttctgacatttctaggcaaactgacatttctaggcaaactgacatttctaggcaaactgacatttctaggcaaactgacatttctaggcaaactgacatttctgacatttccgactcggaccgatg

SEQ ID NO: 16839 - DNA, 203 bp, Artificial sequence
  synthetic
ggcgcgccagtcctcactgggttctctgacatttctgacatttctgacatttctgacatttctgacatttctgacatttctgacatttctcacggaatcgagaattctgacatttctgacatttctgacatttctgacatttctgacatttctgacatttctgacatttctgaccacggaatcgagaacgactcggaccgatg

SEQ ID NO: 16840 - DNA, 203 bp, Artificial sequence
  synthetic
ggcgcgccagtcctgacccagtattctgacatttctgacatttctgacatttctgacatttctgacatttctgacatttctgacatttctcacggaatcgagaattctgacatttctgacatttctgacatttctgacatttctgacatttctgacatttctgacatttctgaccgtcaattcctttacgactcggaccgatg

SEQ ID NO: 16841 - DNA, 203 bp, Artificial sequence
  synthetic
ggcgcgccagtcctacccagtatgtctgacatttctgacatttctgacatttctgacatttctgacatttctgacatttctgacatttctcagcaaactgacatttctcagcaaactgacatttctcagcaaactgacatttctcagcaaactgacatttctcagcaaactgacatttctgacatttccgactcggaccgatg

SEQ ID NO: 16842 - DNA, 203 bp, Artificial sequence
  synthetic
ggcgcgccagtcctcccagtttgctctgacatttctgacatttctgacatttctgacatttctgacatttctgacatttctgacatttctcgattccgtgacatttctcgattccgtgacatttctcgattccgtgacatttctcgattccgtgacatttctcgattccgtgacatttctgacatttccgactcggaccgatg

SEQ ID NO: 16843 - DNA, 203 bp, Artificial sequence
  synthetic
ggcgcgccagtcctgatcctgaactctgacatttctgacatttctgacatttctgacatttctgacatttctgacatttctgacatttctcggcaaactgacatttctcggcaaactgacatttctcggcaaactgacatttctcggcaaactgacatttctcggcaaactgacatttctgacatttccgactcggaccgatg

SEQ ID NO: 16844 - DNA, 203 bp, Artificial sequence
  synthetic
ggcgcgccagtcctaaacggtgcctctgacatttctgacatttctgacatttctgacatttctgacatttctgacatttctgacatttctgaagtttcagctttgcaaccatactccccccggaacccaaagacttacatttctgacatttctgacatttctgacatttctgacatttctgacatttccgactcggaccgatg

SEQ ID NO: 16845 - DNA, 203 bp, Artificial sequence
  synthetic
ggcgcgccagtcctagagaggatctctgacatttctgacatttctgacatttctgacatttctgacatttctgacatttctgacatttctgacaccggccgtatttctgacatttctgacatttctgacatttctgacatttctgacatttctgacatttctgacatttctgacatttcccggcgggtcgactcggaccgatg

SEQ ID NO: 16846 - DNA, 203 bp, Artificial sequence
  synthetic
ggcgcgccagtcctatgggttaaatctgacatttctgacatttctgacatttctgacatttctgacatttctgacatttctgacatttctgacagtttcccggaagctgcccggcgggtcatgggaataacgcctgacatttctgacatttctgacatttctgacatttctgacatttctgacatttccgactcggaccgatg

SEQ ID NO: 16847 - DNA, 203 bp, Artificial sequence
  synthetic
ggcgcgccagtcctagttaaaggatctgacatttctgacatttctgacatttctgacatttctgacatttctgacatttctgacatttctgacataccggccgtttctgacatttctgacatttctgacatttctgacatttctgacatttctgacatttctgacatttctgacatttctgacatttccgactcggaccgatg

SEQ ID NO: 16848 - DNA, 203 bp, Artificial sequence
  synthetic
ggcgcgccagtcctcgaaaactgttctgacatttctgacatttctgacatttctgacatttctgacatttctgacatttctgacatttctgacatccggcgggtttctgacatttctgacatttctgacatttctgacatttctgacatttctgacatttctgacatttctgacatttctgtactccccgactcggaccgatg

SEQ ID NO: 16849 - DNA, 203 bp, Artificial sequence
  synthetic
ggcgcgccagtccttgtatcctcgtctgacatttctgacatttctgacatttctgacatttctgacatttctgacatttctgacatttctgacatccggcgggtttctgacatttctgacatttctgacatttctgacatttctgacatttctgacatttctgacatttctgaccgtcaattcctttacgactcggaccgatg

SEQ ID NO: 16850 - DNA, 203 bp, Artificial sequence
  synthetic
ggcgcgccagtcctcgaaaaccagtctgacatttctgacatttctgacatttctgacatttctgacatttctgacatttctgacatttctgacatcgtcaattcctttaacatttctgacatttctgacatttctgacatttctgacatttctgacatttctgacatttctgacatttcaccggccgtcgactcggaccgatg

SEQ ID NO: 16851 - DNA, 203 bp, Artificial sequence
  synthetic
ggcgcgccagtcctggaccactcgtctgacatttctgacatttctgacatttctgacatttctgacatttctgacatttctgacatttctgacatgattaatgaaaacattcttggcaaatgctttcgctctgctgacatttctgacatttctgacatttctgacatttctgacatttctgacatttccgactcggaccgatg

SEQ ID NO: 16852 - DNA, 203 bp, Artificial sequence
  synthetic
ggcgcgccagtcctttgagtatcgtctgacatttctgacatttctgacatttctgacatttctgacatttctgacatttctgacatttctgacatgtggtgcccttccgtcaattcctttaagtttcagctttctgacatttctgacatttctgacatttctgacatttctgacatttctgacatttccgactcggaccgatg

SEQ ID NO: 16853 - DNA, 203 bp, Artificial sequence
  synthetic
ggcgcgccagtcctttactgctcgtctgacatttctgacatttctgacatttctgacatttctgacatttctgacatttctgacatttctgacattcgcagtttcactgtaccggccgtgcgtactcagacatctgacatttctgacatttctgacatttctgacatttctgacatttctgacatttccgactcggaccgatg

SEQ ID NO: 16854 - DNA, 203 bp, Artificial sequence
  synthetic
ggcgcgccagtcctcgaagcagtttctgacatttctgacatttctgacatttctgacatttctgacatttctgacatttctgacatttctgacattcgcagtttcactgtaccggccgtgcgtactcagacatgcgacatttctgacatttctgacatttctgacatttctgacatttctgacatttccgactcggaccgatg

SEQ ID NO: 16855 - DNA, 203 bp, Artificial sequence
  synthetic
ggcgcgccagtcctgttggactcgtctgacatttctgacatttctgacatttctgacatttctgacatttctgacatttctgacatttctgacattgcaccaccacccacggaatcgagaaagagctatcaatctgacatttctgacatttctgacatttctgacatttctgacatttctgacatttccgactcggaccgatg

SEQ ID NO: 16856 - DNA, 203 bp, Artificial sequence
  synthetic
ggcgcgccagtcctatccacctcgtctgacatttctgacatttctgacatttctgacatttctgacatttctgacatttctgacatttctgacatttcaccggccgttgacatttctgacatttctgacatttctgacatttctgacatttctgacatttctgacatttctgacattttcttggcaaacgactcggaccgatg

SEQ ID NO: 16857 - DNA, 203 bp, Artificial sequence
  synthetic
ggcgcgccagtcctgaggccttcgtctgacatttctgacatttctgacatttctgacatttctgacatttctgacatttctgacatttctgacatttcacggaatcgagaaatttctgacatttctgacatttctgacatttctgacatttctgacatttctgacatttctgaccacggaatcgagaacgactcggaccgatg

SEQ ID NO: 16858 - DNA, 203 bp, Artificial sequence
  synthetic
ggcgcgccagtcctcgacaacgtttctgacatttctgacatttctgacatttctgacatttctgacatttctgacatttctgacatttctgacatttcagctttgcaaccatactccccccggaacccaaagtctgacatttctgacatttctgacatttctgacatttctgacatttctgacatttccgactcggaccgatg

SEQ ID NO: 16859 - DNA, 203 bp, Artificial sequence
  synthetic
ggcgcgccagtcctcgactctgtgtctgacatttctgacatttctgacatttctgacatttctgacatttctgacatttctgacatttctgacatttcagctttgcaaccatactccccccggaacccaaattctgacatttctgacatttctgacatttctgacatttctgacatttctgacatttccgactcggaccgatg

SEQ ID NO: 16860 - DNA, 203 bp, Artificial sequence
  synthetic
ggcgcgccagtcctctgttgctcgtctgacatttctgacatttctgacatttctgacatttctgacatttctgacatttctgacatttctgacatttcccggcgggttgacatttctgacatttctgacatttctgacatttctgacatttctgacatttctgacatttctgacattttcttggcaaacgactcggaccgatg

SEQ ID NO: 16861 - DNA, 203 bp, Artificial sequence
  synthetic
ggcgcgccagtcctcgagttcacctctgacatttctgacatttctgacatttctgacatttctgacatttctgacatttctgacatttctgacatttcgtgcccttccgtcaattcctttaagtttcagctttctgacatttctgacatttctgacatttctgacatttctgacatttctgacatttccgactcggaccgatg

SEQ ID NO: 16862 - DNA, 203 bp, Artificial sequence
  synthetic
ggcgcgccagtcctcgaatcctggtctgacatttctgacatttctgacatttctgacatttctgacatttctgacatttctgacatttctgacatttctaatgaaaacattcttggcaaatgctttcgcttttctgacatttctgacatttctgacatttctgacatttctgacatttctgacatttccgactcggaccgatg

SEQ ID NO: 16863 - DNA, 203 bp, Artificial sequence
  synthetic
ggcgcgccagtcctcgatacgttatctgacatttctgacatttctgacatttctgacatttctgacatttctgacatttctgacatttctgacatttctgaaccacccacggaatcgagaaagagctacatttctgacatttctgacatttctgacatttctgacatttctgacatttctgacatttccgactcggaccgatg

SEQ ID NO: 16864 - DNA, 203 bp, Artificial sequence
  synthetic
ggcgcgccagtccttgctctgtcgtctgacatttctgacatttctgacatttctgacatttctgacatttctgacatttctgacatttctgacatttctgacatacccgccggttctgacatacccgccggttctgacatacccgccggttctgacatacccgccggttctgacatttctgacatttccgactcggaccgatg

SEQ ID NO: 16865 - DNA, 203 bp, Artificial sequence
  synthetic
ggcgcgccagtcctcacaacgtcgtctgacatttctgacatttctgacatttctgacatttctgacatttctgacatttctgacatttctgacatttctgacataccggccgtttctgacataccggccgtttctgacatttctgacatttctgacataccggccgtttctgacataccggccgtttccgactcggaccgatg

SEQ ID NO: 16866 - DNA, 203 bp, Artificial sequence
  synthetic
ggcgcgccagtcctcgagcaagtttctgacatttctgacatttctgacatttctgacatttctgacatttctgacatttctgacatttctgacatttctgacataccggccgtttctgacatttctgacatttctgacataccggccgtttctgacatttctgacatttctgacataccggccgtttccgactcggaccgatg

SEQ ID NO: 16867 - DNA, 203 bp, Artificial sequence
  synthetic
ggcgcgccagtcctcgagttgaggtctgacatttctgacatttctgacatttctgacatttctgacatttctgacatttctgacatttctgacatttctgacataccggccgtttctgacatttctgacatttctgacatttctgacatttctgacatttctgacatttctgacataccggccgtttccgactcggaccgatg

SEQ ID NO: 16868 - DNA, 203 bp, Artificial sequence
  synthetic
ggcgcgccagtcctgttttgaatatctgacatttctgacatttctgacatttctgacatttctgacatttctgacatttctgacatttctgacatttctgacataccggccgtttctgacatttctgacatttctgacatttctgacatttctgacatttctgacatttctgacatttctgacatttccgactcggaccgatg

SEQ ID NO: 16869 - DNA, 203 bp, Artificial sequence
  synthetic
ggcgcgccagtcctgtttaacttatctgacatttctgacatttctgacatttctgacatttctgacatttctgacatttctgacatttctgacatttctgacatacggccggtttctgacatacggccggtttctgacatacggccggtttctgacatacggccggtttctgacatttctgacatttccgactcggaccgatg

SEQ ID NO: 16870 - DNA, 203 bp, Artificial sequence
  synthetic
ggcgcgccagtcctccactttctttctgacatttctgacatttctgacatttctgacatttctgacatttctgacatttctgacatttctgacatttctgacatagctgcccggcgggtcatggctgacatttctgacatttctgacatttctgacatttctgacatttctgacatttctgacatttccgactcggaccgatg

SEQ ID NO: 16871 - DNA, 203 bp, Artificial sequence
  synthetic
ggcgcgccagtcctaaatcacagctctgacatttctgacatttctgacatttctgacatttctgacatttctgacatttctgacatttctgacatttctgacatcacggaatcgagaaacatcacggaatcgagaaacatcacggaatcgagaaacatttctgacatttctgacatttctgacatttccgactcggaccgatg

SEQ ID NO: 16872 - DNA, 203 bp, Artificial sequence
  synthetic
ggcgcgccagtcctagcaaaatgctctgacatttctgacatttctgacatttctgacatttctgacatttctgacatttctgacatttctgacatttctgacatcacggaatcgagaaacatttctgacatttctgacatttctgacatttctgacatcacggaatcgagaaacatttctgacatttccgactcggaccgatg

SEQ ID NO: 16873 - DNA, 203 bp, Artificial sequence
  synthetic
ggcgcgccagtcctaaatctctagtctgacatttctgacatttctgacatttctgacatttctgacatttctgacatttctgacatttctgacatttctgacatcacggaatcgagaaacatttctgacatttctgacatttctgacatttctgacatttctgacatttctgacatttctgacatttccgactcggaccgatg

SEQ ID NO: 16874 - DNA, 203 bp, Artificial sequence
  synthetic
ggcgcgccagtccttgcacaaatgtctgacatttctgacatttctgacatttctgacatttctgacatttctgacatttctgacatttctgacatttctgacatcacggaatcgagaaacatttctgacatttctgacatttctgacatttctgacatttctgacatttctgacatttctgtactccccgactcggaccgatg

SEQ ID NO: 16875 - DNA, 203 bp, Artificial sequence
  synthetic
ggcgcgccagtcctcttgcaaatctctgacatttctgacatttctgacatttctgacatttctgacatttctgacatttctgacatttctgacatttctgacatccggcgggtttctgacatccggcgggtttctgacatccggcgggtttctgacatccggcgggtttctgacatccggcgggtttccgactcggaccgatg

SEQ ID NO: 16876 - DNA, 203 bp, Artificial sequence
  synthetic
ggcgcgccagtcctgctagaaatctctgacatttctgacatttctgacatttctgacatttctgacatttctgacatttctgacatttctgacatttctgacatccggcgggtttctgacatccggcgggtttctgacatccggcgggtttctgacatccggcgggtttctgacatccggcgggtttccgactcggaccgatg

SEQ ID NO: 16877 - DNA, 203 bp, Artificial sequence
  synthetic
ggcgcgccagtcctaaatgagttgtctgacatttctgacatttctgacatttctgacatttctgacatttctgacatttctgacatttctgacatttctgacatccggcgggtttctgacatccggcgggtttctgacatccggcgggtttctgacatccggcgggtttctgacatccggcgggtttccgactcggaccgatg

SEQ ID NO: 16878 - DNA, 203 bp, Artificial sequence
  synthetic
ggcgcgccagtcctcctgaaaatgtctgacatttctgacatttctgacatttctgacatttctgacatttctgacatttctgacatttctgacatttctgacatccggcgggtttctgacatccggcgggtttctgacatccggcgggtttctgacatttctgacatttctgacatccggcgggtttccgactcggaccgatg

SEQ ID NO: 16879 - DNA, 203 bp, Artificial sequence
  synthetic
ggcgcgccagtccttgctgaaatctctgacatttctgacatttctgacatttctgacatttctgacatttctgacatttctgacatttctgacatttctgacatccggcgggtttctgacatccggcgggtttctgacatttctgacatttctgacatccggcgggtttctgacatttctgacatttccgactcggaccgatg

SEQ ID NO: 16880 - DNA, 203 bp, Artificial sequence
  synthetic
ggcgcgccagtcctctcaaatggttctgacatttctgacatttctgacatttctgacatttctgacatttctgacatttctgacatttctgacatttctgacatccggcgggtttctgacatccggcgggtttctgacatttctgacatttctgacatttctgacatttctgacatccggcgggtttccgactcggaccgatg

SEQ ID NO: 16881 - DNA, 203 bp, Artificial sequence
  synthetic
ggcgcgccagtcctcagatttgattctgacatttctgacatttctgacatttctgacatttctgacatttctgacatttctgacatttctgacatttctgacatccggcgggtttctgacatttctgacatttctgacatccggcgggtttctgacatttctgacatttctgacatttctgacatttccgactcggaccgatg

SEQ ID NO: 16882 - DNA, 203 bp, Artificial sequence
  synthetic
ggcgcgccagtcctgaatgatttctctgacatttctgacatttctgacatttctgacatttctgacatttctgacatttctgacatttctgacatttctgacatccggcgggtttctgacatttctgacatttctgacatttctgacatttctgacatttctgacatttctgacatccggcgggtttccgactcggaccgatg

SEQ ID NO: 16883 - DNA, 203 bp, Artificial sequence
  synthetic
ggcgcgccagtcctgatttcacaatctgacatttctgacatttctgacatttctgacatttctgacatttctgacatttctgacatttctgacatttctgacatcgtcaattcctttaacatcgtcaattcctttaacatcgtcaattcctttaacatcgtcaattcctttaacatttctgacatttccgactcggaccgatg

SEQ ID NO: 16884 - DNA, 203 bp, Artificial sequence
  synthetic
ggcgcgccagtccttacttgattttctgacatttctgacatttctgacatttctgacatttctgacatttctgacatttctgacatttctgacatttctgacatcgtcaattcctttaacatcgtcaattcctttaacatcgtcaattcctttaacatttctgacatttctgacatttctgacatttccgactcggaccgatg

SEQ ID NO: 16885 - DNA, 203 bp, Artificial sequence
  synthetic
ggcgcgccagtcctatttgatcagtctgacatttctgacatttctgacatttctgacatttctgacatttctgacatttctgacatttctgacatttctgacatcgtcaattcctttaacatttctgacatttctgacatttctgacatttctgacatcgtcaattcctttaacatttctgacatttccgactcggaccgatg

SEQ ID NO: 16886 - DNA, 203 bp, Artificial sequence
  synthetic
ggcgcgccagtcctgtgatttcactctgacatttctgacatttctgacatttctgacatttctgacatttctgacatttctgacatttctgacatttctgacatgcaaccatactccccccggaatgacatttctgacatttctgacatttctgacatttctgacatttctgacatttctgacatttccgactcggaccgatg

SEQ ID NO: 16887 - DNA, 203 bp, Artificial sequence
  synthetic
ggcgcgccagtcctgcagatttgttctgacatttctgacatttctgacatttctgacatttctgacatttctgacatttctgacatttctgacatttctgacattactcccatttctgacattactcccatttctgacattactcccatttctgacatttctgacatttctgacattactcccatttccgactcggaccgatg

SEQ ID NO: 16888 - DNA, 203 bp, Artificial sequence
  synthetic
ggcgcgccagtcctttagatttggtctgacatttctgacatttctgacatttctgacatttctgacatttctgacatttctgacatttctgacatttctgacattactcccatttctgacattactcccatttctgacatttctgacatttctgacattactcccatttctgacatttctgacatttccgactcggaccgatg

SEQ ID NO: 16889 - DNA, 203 bp, Artificial sequence
  synthetic
ggcgcgccagtccttaggatttcgtctgacatttctgacatttctgacatttctgacatttctgacatttctgacatttctgacatttctgacatttctgacattactcccatttctgacatttctgacatttctgacattactcccatttctgacattactcccatttctgacattactcccatttccgactcggaccgatg

SEQ ID NO: 16890 - DNA, 203 bp, Artificial sequence
  synthetic
ggcgcgccagtcctagaacactagtctgacatttctgacatttctgacatttctgacatttctgacatttctgacatttctgacatttctgacatttctgacattactcccatttctgacatttctgacatttctgacattactcccatttctgacattactcccatttctgacatttctgacatttccgactcggaccgatg

SEQ ID NO: 16891 - DNA, 203 bp, Artificial sequence
  synthetic
ggcgcgccagtccttgatcctacatctgacatttctgacatttctgacatttctgacatttctgacatttctgacatttctgacatttctgacatttctgacattactcccatttctgacatttctgacatttctgacattactcccatttctgacatttctgacatttctgacattactcccatttccgactcggaccgatg

SEQ ID NO: 16892 - DNA, 203 bp, Artificial sequence
  synthetic
ggcgcgccagtcctcgacctacaatctgacatttctgacatttctgacatttctgacatttctgacatttctgacatttctgacatttctgacatttctgacattactcccatttctgacatttctgacatttctgacatttctgacatttctgacattactcccatttctgacattactcccatttccgactcggaccgatg

SEQ ID NO: 16893 - DNA, 203 bp, Artificial sequence
  synthetic
ggcgcgccagtcctccaaccagtgtctgacatttctgacatttctgacatttctgacatttctgacatttctgacatttctgacatttctgacatttctgacattactcccatttctgacatttctgacatttctgacatttctgacatttctgacatttctgacatttctgacattactcccatttccgactcggaccgatg

SEQ ID NO: 16894 - DNA, 203 bp, Artificial sequence
  synthetic
ggcgcgccagtcctcatgtatgcatctgacatttctgacatttctgacatttctgacatttctgacatttctgacatttctgacatttctgacatttctgacattactgtaccggccgtgcgttctgacatttctgacatttctgacatttctgacatttctgacatttctgacatttctgacatttccgactcggaccgatg

SEQ ID NO: 16895 - DNA, 203 bp, Artificial sequence
  synthetic
ggcgcgccagtcctactacatgagtctgacatttctgacatttctgacatttctgacatttctgacatttctgacatttctgacatttctgacatttctgacattccggcgggttctgacatttctgacatttctgacatttctgacatttctgacatttctgacatttctgacattttcttggcaaacgactcggaccgatg

SEQ ID NO: 16896 - DNA, 203 bp, Artificial sequence
  synthetic
ggcgcgccagtccttacaggttggtctgacatttctgacatttctgacatttctgacatttctgacatttctgacatttctgacatttctgacatttctgacatttaaccatactccccccgttctgacatttctgacatttctgacatttctgacatttctgacatttctgacatttctgacatttccgactcggaccgatg

SEQ ID NO: 16897 - DNA, 203 bp, Artificial sequence
  synthetic
ggcgcgccagtccttcgcaggtggtctgacatttctgacatttctgacatttctgacatttctgacatttctgacatttctgacatttctgacatttctgacatttcaccggccgttgacatttctgacatttctgacatttctgacatttctgacatttctgacatttctgacatttcccggcgggtcgactcggaccgatg

SEQ ID NO: 16898 - DNA, 203 bp, Artificial sequence
  synthetic
ggcgcgccagtcctgtcactcatttctgacatttctgacatttctgacatttctgacatttctgacatttctgacatttctgacatttctgacatttctgacatttccacggaatcgagaatttctgacatttctgacatttctgacatttctgacatttctgacatttctgacatttctgacatttccgactcggaccgatg

SEQ ID NO: 16899 - DNA, 203 bp, Artificial sequence
  synthetic
ggcgcgccagtcctacgagcagcatctgacatttctgacatttctgacatttctgacatttctgacatttctgacatttctgacatttctgacatttctgacatttcccggcgggttgacatttctgacatttctgacatttctgacatttctgacatttctgacatttctgacatttcaccggccgtcgactcggaccgatg

SEQ ID NO: 16900 - DNA, 203 bp, Artificial sequence
  synthetic
ggcgcgccagtcctgtgcagcatatctgacatttctgacatttctgacatttctgacatttctgacatttctgacatttctgacatttctgacatttctgacatttccgtcaattcctttaattctgacatttctgacatttctgacatttctgacatttctgacatttctgacatttctgacatttccgactcggaccgatg

SEQ ID NO: 16901 - DNA, 203 bp, Artificial sequence
  synthetic
ggcgcgccagtcctatccaacagttctgacatttctgacatttctgacatttctgacatttctgacatttctgacatttctgacatttctgacatttctgacatttctcgattccgtgacatttctcgattccgtgacatttctcgattccgtgacatttctcgattccgtgacatttctgacatttccgactcggaccgatg

SEQ ID NO: 16902 - DNA, 203 bp, Artificial sequence
  synthetic
ggcgcgccagtcctgttaggcctctctgacatttctgacatttctgacatttctgacatttctgacatttctgacatttctgacatttctgacatttctgacatttctgacaaccggccgttttctgacatttctgacatttctgacatttctgacatttctgacatttctgacattttcttggcaaacgactcggaccgatg

SEQ ID NO: 16903 - DNA, 203 bp, Artificial sequence
  synthetic
ggcgcgccagtcctgagctttctatctgacatttctgacatttctgacatttctgacatttctgacatttctgacatttctgacatttctgacatttctgacatttctgacaattcctacatttctgacatttctgacatttctgacatttctgacatttctgacatttctgacatttctgacatttccgactcggaccgatg

SEQ ID NO: 16904 - DNA, 203 bp, Artificial sequence
  synthetic
ggcgcgccagtccttaacttgaaatctgacatttctgacatttctgacatttctgacatttctgacatttctgacatttctgacatttctgacatttctgacatttctgacaattctgacatttctgacatttctgacatttctgacatttctgacatttctgacatttctgacatttctgacatttccgactcggaccgatg

SEQ ID NO: 16905 - DNA, 203 bp, Artificial sequence
  synthetic
ggcgcgccagtcctcaagcacttgtctgacatttctgacatttctgacatttctgacatttctgacatttctgacatttctgacatttctgacatttctgacatttctgacatatctgacatttctgacatttctgacatttctgacatttctgacatttctgacatttctgacatttctgacatttccgactcggaccgatg

SEQ ID NO: 16906 - DNA, 203 bp, Artificial sequence
  synthetic
ggcgcgccagtcctatgtgcttactctgacatttctgacatttctgacatttctgacatttctgacatttctgacatttctgacatttctgacatttctgacatttctgacatgcctgacatttctgacatttctgacatttctgacatttctgacatttctgacatttctgacatttctgacatttccgactcggaccgatg

SEQ ID NO: 16907 - DNA, 203 bp, Artificial sequence
  synthetic
ggcgcgccagtcctcatgaagcactctgacatttctgacatttctgacatttctgacatttctgacatttctgacatttctgacatttctgacatttctgacatttctgacattaccggccgttctgacatttctgacatttctgacatttctgacatttctgacatttctgacatttcaccggccgtcgactcggaccgatg

SEQ ID NO: 16908 - DNA, 203 bp, Artificial sequence
  synthetic
ggcgcgccagtcctagtgcttttctctgacatttctgacatttctgacatttctgacatttctgacatttctgacatttctgacatttctgacatttctgacatttctgacattccggcgggttctgacatttctgacatttctgacatttctgacatttctgacatttctgacatttcaccggccgtcgactcggaccgatg

SEQ ID NO: 16909 - DNA, 203 bp, Artificial sequence
  synthetic
ggcgcgccagtcctgagtgctttatctgacatttctgacatttctgacatttctgacatttctgacatttctgacatttctgacatttctgacatttctgacatttctgacattcgtcaattcctttacatttctgacatttctgacatttctgacatttctgacatttctgacattttcttggcaaacgactcggaccgatg

SEQ ID NO: 16910 - DNA, 203 bp, Artificial sequence
  synthetic
ggcgcgccagtcctactaacaagatctgacatttctgacatttctgacatttctgacatttctgacatttctgacatttctgacatttctgacatttctgacatttctgacattcttggcaaatctgacatttctgacatttctgacatttctgacatttctgacatttctgacatttcaccggccgtcgactcggaccgatg

SEQ ID NO: 16911 - DNA, 203 bp, Artificial sequence
  synthetic
ggcgcgccagtccttagttagtagtctgacatttctgacatttctgacatttctgacatttctgacatttctgacatttctgacatttctgacatttctgacatttctgacattggtgacatttctgacatttctgacatttctgacatttctgacatttctgacatttctgacatttctgacatttccgactcggaccgatg

SEQ ID NO: 16912 - DNA, 203 bp, Artificial sequence
  synthetic
ggcgcgccagtccttactaacaggtctgacatttctgacatttctgacatttctgacatttctgacatttctgacatttctgacatttctgacatttctgacatttctgacatttactccctttctgacatttctgacatttctgacatttctgacatttctgacatttctgacattttcttggcaaacgactcggaccgatg

SEQ ID NO: 16913 - DNA, 203 bp, Artificial sequence
  synthetic
ggcgcgccagtcctctgtactaactctgacatttctgacatttctgacatttctgacatttctgacatttctgacatttctgacatttctgacatttctgacatttctgacatttcaccggccgttgacatttctgacatttctgacatttctgacatttctgacatttctgacatttctgtactccccgactcggaccgatg

SEQ ID NO: 16914 - DNA, 203 bp, Artificial sequence
  synthetic
ggcgcgccagtccttcctcaaaattctgacatttctgacatttctgacatttctgacatttctgacatttctgacatttctgacatttctgacatttctgacatttctgacatttccacggaatcgagaatttctgacatttctgacatttctgacatttctgacatttctgacatttcaccggccgtcgactcggaccgatg

SEQ ID NO: 16915 - DNA, 203 bp, Artificial sequence
  synthetic
ggcgcgccagtccttcctctgcagtctgacatttctgacatttctgacatttctgacatttctgacatttctgacatttctgacatttctgacatttctgacatttctgacatttcccggcgggttgacatttctgacatttctgacatttctgacatttctgacatttctgacatttctgtactccccgactcggaccgatg

SEQ ID NO: 16916 - DNA, 203 bp, Artificial sequence
  synthetic
ggcgcgccagtcctaactcggttatctgacatttctgacatttctgacatttctgacatttctgacatttctgacatttctgacatttctgacatttctgacatttctgacatttccgtcaattcctttatttctgacatttctgacatttctgacatttctgacatttctgacatttcaccggccgtcgactcggaccgatg

SEQ ID NO: 16917 - DNA, 203 bp, Artificial sequence
  synthetic
ggcgcgccagtcctcactcagcagtctgacatttctgacatttctgacatttctgacatttctgacatttctgacatttctgacatttctgacatttctgacatttctgacatttctactccctctgacatttctgacatttctgacatttctgacatttctgacatttctgacatttcaccggccgtcgactcggaccgatg

SEQ ID NO: 16918 - DNA, 203 bp, Artificial sequence
  synthetic
ggcgcgccagtcctcacgcctagctctgacatttctgacatttctgacatttctgacatttctgacatttctgacatttctgacatttctgacatttctgacatttctgacatttctgaaccggccgtcatttctgacatttctgacatttctgacatttctgacatttctgacattttcttggcaaacgactcggaccgatg

SEQ ID NO: 16919 - DNA, 203 bp, Artificial sequence
  synthetic
ggcgcgccagtcctatggacttcgtctgacatttctgacatttctgacatttctgacatttctgacatttctgacatttctgacatttctgacatttctgacatttctgacatttctgacaaccggccgttttctgacatttctgacatttctgacatttctgacatttctgacatttcccggcgggtcgactcggaccgatg

SEQ ID NO: 16920 - DNA, 203 bp, Artificial sequence
  synthetic
ggcgcgccagtcctttgagacccatctgacatttctgacatttctgacatttctgacatttctgacatttctgacatttctgacatttctgacatttctgacatttctgacatttctgacataccggccgtttctgacataccggccgtttctgacatttctgacatttctgacataccggccgtttccgactcggaccgatg

SEQ ID NO: 16921 - DNA, 203 bp, Artificial sequence
  synthetic
ggcgcgccagtccttgttcgtcactctgacatttctgacatttctgacatttctgacatttctgacatttctgacatttctgacatttctgacatttctgacatttctgacatttctgacataccggccgtttctgacatttctgacatttctgacataccggccgtttctgacataccggccgtttccgactcggaccgatg

SEQ ID NO: 16922 - DNA, 203 bp, Artificial sequence
  synthetic
ggcgcgccagtcctgatcaaccgttctgacatttctgacatttctgacatttctgacatttctgacatttctgacatttctgacatttctgacatttctgacatttctgacatttctgacataccggccgtttctgacatttctgacatttctgacataccggccgtttctgacatttctgacatttccgactcggaccgatg

SEQ ID NO: 16923 - DNA, 203 bp, Artificial sequence
  synthetic
ggcgcgccagtcctcagcttaacctctgacatttctgacatttctgacatttctgacatttctgacatttctgacatttctgacatttctgacatttctgacatttctgacatttctgacatcacggaatcgagaaacatcacggaatcgagaaacatttctgacatttctgacatttctgacatttccgactcggaccgatg

SEQ ID NO: 16924 - DNA, 203 bp, Artificial sequence
  synthetic
ggcgcgccagtcctggcagtattctctgacatttctgacatttctgacatttctgacatttctgacatttctgacatttctgacatttctgacatttctgacatttctgacatttctgacatcacggaatcgagaaacatttctgacatttctgacatcacggaatcgagaaacatttctgacatttccgactcggaccgatg

SEQ ID NO: 16925 - DNA, 203 bp, Artificial sequence
  synthetic
ggcgcgccagtcctcaagtgaacctctgacatttctgacatttctgacatttctgacatttctgacatttctgacatttctgacatttctgacatttctgacatttctgacatttctgacatcacggaatcgagaaacatttctgacatttctgacatttctgacatttctgacatttctgacatttccgactcggaccgatg

SEQ ID NO: 16926 - DNA, 203 bp, Artificial sequence
  synthetic
ggcgcgccagtccttctctaagcctctgacatttctgacatttctgacatttctgacatttctgacatttctgacatttctgacatttctgacatttctgacatttctgacatttctgacatccggcgggtttctgacatccggcgggtttctgacatccggcgggtttctgacatccggcgggtttccgactcggaccgatg

SEQ ID NO: 16927 - DNA, 203 bp, Artificial sequence
  synthetic
ggcgcgccagtcctacagtgtacctctgacatttctgacatttctgacatttctgacatttctgacatttctgacatttctgacatttctgacatttctgacatttctgacatttctgacatccggcgggtttctgacatccggcgggtttctgacatccggcgggtttctgacatccggcgggtttccgactcggaccgatg

SEQ ID NO: 16928 - DNA, 203 bp, Artificial sequence
  synthetic
ggcgcgccagtcctttgcaacacctctgacatttctgacatttctgacatttctgacatttctgacatttctgacatttctgacatttctgacatttctgacatttctgacatttctgacatccggcgggtttctgacatccggcgggtttctgacatccggcgggtttctgacatccggcgggtttccgactcggaccgatg

SEQ ID NO: 16929 - DNA, 203 bp, Artificial sequence
  synthetic
ggcgcgccagtccttgcaaagacctctgacatttctgacatttctgacatttctgacatttctgacatttctgacatttctgacatttctgacatttctgacatttctgacatttctgacatccggcgggtttctgacatccggcgggtttctgacatccggcgggtttctgacatccggcgggtttccgactcggaccgatg

SEQ ID NO: 16930 - DNA, 203 bp, Artificial sequence
  synthetic
ggcgcgccagtcctctgagaatcctctgacatttctgacatttctgacatttctgacatttctgacatttctgacatttctgacatttctgacatttctgacatttctgacatttctgacatccggcgggtttctgacatccggcgggtttctgacatccggcgggtttctgacatccggcgggtttccgactcggaccgatg

SEQ ID NO: 16931 - DNA, 203 bp, Artificial sequence
  synthetic
ggcgcgccagtcctggtaactacctctgacatttctgacatttctgacatttctgacatttctgacatttctgacatttctgacatttctgacatttctgacatttctgacatttctgacatccggcgggtttctgacatttctgacatttctgacatccggcgggtttctgacatccggcgggtttccgactcggaccgatg

SEQ ID NO: 16932 - DNA, 203 bp, Artificial sequence
  synthetic
ggcgcgccagtcctggtctaagactctgacatttctgacatttctgacatttctgacatttctgacatttctgacatttctgacatttctgacatttctgacatttctgacatttctgacatccggcgggtttctgacatttctgacatttctgacatccggcgggtttctgacatttctgacatttccgactcggaccgatg

SEQ ID NO: 16933 - DNA, 203 bp, Artificial sequence
  synthetic
ggcgcgccagtcctggcctgaaattctgacatttctgacatttctgacatttctgacatttctgacatttctgacatttctgacatttctgacatttctgacatttctgacatttctgacatccggcgggtttctgacatttctgacatttctgacatttctgacatttctgacatccggcgggtttccgactcggaccgatg

SEQ ID NO: 16934 - DNA, 203 bp, Artificial sequence
  synthetic
ggcgcgccagtcctggtcaaagcttctgacatttctgacatttctgacatttctgacatttctgacatttctgacatttctgacatttctgacatttctgacatttctgacatttctgacatcgtcaattcctttaacatcgtcaattcctttaacatcgtcaattcctttaacatttctgacatttccgactcggaccgatg

SEQ ID NO: 16935 - DNA, 203 bp, Artificial sequence
  synthetic
ggcgcgccagtcctggtcctttcatctgacatttctgacatttctgacatttctgacatttctgacatttctgacatttctgacatttctgacatttctgacatttctgacatttctgacatgggagtaatttctgacatgggagtaatttctgacatgggagtaatttctgacatttctgacatttccgactcggaccgatg

SEQ ID NO: 16936 - DNA, 203 bp, Artificial sequence
  synthetic
ggcgcgccagtcctggtaagcttgtctgacatttctgacatttctgacatttctgacatttctgacatttctgacatttctgacatttctgacatttctgacatttctgacatttctgacattactcccatttctgacattactcccatttctgacattactcccatttctgacatttctgacatttccgactcggaccgatg

SEQ ID NO: 16937 - DNA, 203 bp, Artificial sequence
  synthetic
ggcgcgccagtcctggctaaaggttctgacatttctgacatttctgacatttctgacatttctgacatttctgacatttctgacatttctgacatttctgacatttctgacatttctgacattactcccatttctgacattactcccatttctgacatttctgacatttctgacatttctgacatttccgactcggaccgatg

SEQ ID NO: 16938 - DNA, 203 bp, Artificial sequence
  synthetic
ggcgcgccagtcctggactgtctttctgacatttctgacatttctgacatttctgacatttctgacatttctgacatttctgacatttctgacatttctgacatttctgacatttctgacattccggcgggttctgacatttctgacatttctgacatttctgacatttctgacatttctgacatttccgactcggaccgatg

SEQ ID NO: 16939 - DNA, 203 bp, Artificial sequence
  synthetic
ggcgcgccagtccttacagtcgattctgacatttctgacatttctgacatttctgacatttctgacatttctgacatttctgacatttctgacatttctgacatttctgacatttctgacattcttggcaaatctgacatttctgacatttctgacatttctgacatttctgacatttctgacatttccgactcggaccgatg

SEQ ID NO: 16940 - DNA, 203 bp, Artificial sequence
  synthetic
ggcgcgccagtcctttgagtcgagtctgacatttctgacatttctgacatttctgacatttctgacatttctgacatttctgacatttctgacatttctgacatttctgacatttctgacattcttggcaaatctgacatttctgacatttctgacatttctgacatttctgaccacggaatcgagaacgactcggaccgatg

SEQ ID NO: 16941 - DNA, 203 bp, Artificial sequence
  synthetic
ggcgcgccagtcctcagtcgactttctgacatttctgacatttctgacatttctgacatttctgacatttctgacatttctgacatttctgacatttctgacatttctgacatttctgacatttactccctttctgacatttctgacatttctgacatttctgacatttctgacatttcccggcgggtcgactcggaccgatg

SEQ ID NO: 16942 - DNA, 203 bp, Artificial sequence
  synthetic
ggcgcgccagtccttcgactgtcatctgacatttctgacatttctgacatttctgacatttctgacatttctgacatttctgacatttctgacatttctgacatttctgacatttctgacatttccacggaatcgagaatttctgacatttctgacatttctgacatttctgacatttctgacatttccgactcggaccgatg

SEQ ID NO: 16943 - DNA, 203 bp, Artificial sequence
  synthetic
ggcgcgccagtccttggaccaacatctgacatttctgacatttctgacatttctgacatttctgacatttctgacatttctgacatttctgacatttctgacatttctgacatttctgacatttccgtcaattcctttatttctgacatttctgacatttctgacatttctgacatttctgacatttccgactcggaccgatg

SEQ ID NO: 16944 - DNA, 203 bp, Artificial sequence
  synthetic
ggcgcgccagtcctggcgtttgcttctgacatttctgacatttctgacatttctgacatttctgacatttctgacatttctgacatttctgacatttctgacatttctgacatttctgacatttctaccggccgtgacatttctgacatttctgacatttctgacatttctgacattttcttggcaaacgactcggaccgatg

SEQ ID NO: 16945 - DNA, 203 bp, Artificial sequence
  synthetic
ggcgcgccagtcctaaacgctcgttctgacatttctgacatttctgacatttctgacatttctgacatttctgacatttctgacatttctgacatttctgacatttctgacatttctgacatttctactccctctgacatttctgacatttctgacatttctgacatttctgaccacggaatcgagaacgactcggaccgatg

SEQ ID NO: 16946 - DNA, 203 bp, Artificial sequence
  synthetic
ggcgcgccagtcctcgaagtaccttctgacatttctgacatttctgacatttctgacatttctgacatttctgacatttctgacatttctgacatttctgacatttctgacatttctgacatttctgacaaccggccgttttctgacatttctgacatttctgacatttctgaccacggaatcgagaacgactcggaccgatg

SEQ ID NO: 16947 - DNA, 203 bp, Artificial sequence
  synthetic
ggcgcgccagtcctactgtacctctctgacatttctgacatttctgacatttctgacatttctgacatttctgacatttctgacatttctgacatttctgacatttctgacatttctgacatttctgacacacggaatcgagaagacatttctgacatttctgacatttctgacatttcaccggccgtcgactcggaccgatg

SEQ ID NO: 16948 - DNA, 203 bp, Artificial sequence
  synthetic
ggcgcgccagtcctaaaattcgtctctgacatttctgacatttctgacatttctgacatttctgacatttctgacatttctgacatttctgacatttctgacatttctgacatttctgacatttctgacaccggcgggttttctgacatttctgacatttctgacatttctgacatttctgacatttccgactcggaccgatg

SEQ ID NO: 16949 - DNA, 203 bp, Artificial sequence
  synthetic
ggcgcgccagtcctccaccaaatttctgacatttctgacatttctgacatttctgacatttctgacatttctgacatttctgacatttctgacatttctgacatttctgacatttctgacatttctgacacggaatcgagaactgacatttctgacatttctgacatttctgacattttcttggcaaacgactcggaccgatg

SEQ ID NO: 16950 - DNA, 203 bp, Artificial sequence
  synthetic
ggcgcgccagtccttgtagaaatttctgacatttctgacatttctgacatttctgacatttctgacatttctgacatttctgacatttctgacatttctgacatttctgacatttctgacatttctgacacgtcaattcctttagacatttctgacatttctgacatttctgacatttcccggcgggtcgactcggaccgatg

SEQ ID NO: 16951 - DNA, 203 bp, Artificial sequence
  synthetic
ggcgcgccagtcctgcaagaattttctgacatttctgacatttctgacatttctgacatttctgacatttctgacatttctgacatttctgacatttctgacatttctgacatttctgacatttctgacatactccccatttctgacatttctgacatttctgacatttctgacatttcccggcgggtcgactcggaccgatg

SEQ ID NO: 16952 - DNA, 203 bp, Artificial sequence
  synthetic
ggcgcgccagtcctcacggtggactctgacatttctgacatttctgacatttctgacatttctgacatttctgacatttctgacatttctgacatttctgacatttctgacatttctgacatttctgacattcgtcaattcctttacatttctgacatttctgacatttctgaccgtcaattcctttacgactcggaccgatg

SEQ ID NO: 16953 - DNA, 203 bp, Artificial sequence
  synthetic
ggcgcgccagtcctatgcaccgtgtctgacatttctgacatttctgacatttctgacatttctgacatttctgacatttctgacatttctgacatttctgacatttctgacatttctgacatttctgacatttaccggccgtctgacatttctgacatttctgacatttctgacattttcttggcaaacgactcggaccgatg

SEQ ID NO: 16954 - DNA, 203 bp, Artificial sequence
  synthetic
ggcgcgccagtcctctgcaccgactctgacatttctgacatttctgacatttctgacatttctgacatttctgacatttctgacatttctgacatttctgacatttctgacatttctgacatttctgacatttactccctttctgacatttctgacatttctgacatttctgacatttctgtactccccgactcggaccgatg

SEQ ID NO: 16955 - DNA, 203 bp, Artificial sequence
  synthetic
ggcgcgccagtccttttcacaccatctgacatttctgacatttctgacatttctgacatttctgacatttctgacatttctgacatttctgacatttctgacatttctgacatttctgacatttctgacatttactccctttctgacatttctgacatttctgacatttctgaccacggaatcgagaacgactcggaccgatg

SEQ ID NO: 16956 - DNA, 203 bp, Artificial sequence
  synthetic
ggcgcgccagtcctaacagaagattctgacatttctgacatttctgacatttctgacatttctgacatttctgacatttctgacatttctgacatttctgacatttctgacatttctgacatttctgacatttctaccggccgtgacatttctgacatttctgacatttctgacatttcaccggccgtcgactcggaccgatg

SEQ ID NO: 16957 - DNA, 203 bp, Artificial sequence
  synthetic
ggcgcgccagtccttagaacttgctctgacatttctgacatttctgacatttctgacatttctgacatttctgacatttctgacatttctgacatttctgacatttctgacatttctgacatttctgacatttctaccggccgtgacatttctgacatttctgacatttctgacatttcccggcgggtcgactcggaccgatg

SEQ ID NO: 16958 - DNA, 203 bp, Artificial sequence
  synthetic
ggcgcgccagtcctctagaacttctctgacatttctgacatttctgacatttctgacatttctgacatttctgacatttctgacatttctgacatttctgacatttctgacatttctgacatttctgacatttctcacggaatcgagaattctgacatttctgacatttctgacattttcttggcaaacgactcggaccgatg

SEQ ID NO: 16959 - DNA, 203 bp, Artificial sequence
  synthetic
ggcgcgccagtcctcgaaatttcttctgacatttctgacatttctgacatttctgacatttctgacatttctgacatttctgacatttctgacatttctgacatttctgacatttctgacatttctgacatttctccggcgggtgacatttctgacatttctgacatttctgacatttcaccggccgtcgactcggaccgatg

SEQ ID NO: 16960 - DNA, 203 bp, Artificial sequence
  synthetic
ggcgcgccagtcctggttgacgtttctgacatttctgacatttctgacatttctgacatttctgacatttctgacatttctgacatttctgacatttctgacatttctgacatttctgacatttctgacatttctcgtcaattcctttattctgacatttctgacatttctgacattttcttggcaaacgactcggaccgatg

SEQ ID NO: 16961 - DNA, 203 bp, Artificial sequence
  synthetic
ggcgcgccagtcctctgttttcgttctgacatttctgacatttctgacatttctgacatttctgacatttctgacatttctgacatttctgacatttctgacatttctgacatttctgacatttctgacatttctgacacgtcaattcctttagacatttctgacatttctgacatttctgtactccccgactcggaccgatg

SEQ ID NO: 16962 - DNA, 203 bp, Artificial sequence
  synthetic
ggcgcgccagtccttcacaaagtatctgacatttctgacatttctgacatttctgacatttctgacatttctgacatttctgacatttctgacatttctgacatttctgacatttctgacatttctgacatttctgacacgtcaattcctttagacatttctgacatttctgaccgtcaattcctttacgactcggaccgatg

SEQ ID NO: 16963 - DNA, 203 bp, Artificial sequence
  synthetic
ggcgcgccagtcctcttgtagaactctgacatttctgacatttctgacatttctgacatttctgacatttctgacatttctgacatttctgacatttctgacatttctgacatttctgacatttctgacatttctgacatacccgccggttctgacatacccgccggttctgacatttctgacatttccgactcggaccgatg

SEQ ID NO: 16964 - DNA, 203 bp, Artificial sequence
  synthetic
ggcgcgccagtcctggcaggttactctgacatttctgacatttctgacatttctgacatttctgacatttctgacatttctgacatttctgacatttctgacatttctgacatttctgacatttctgacatttctgacataccggccgtttctgacatttctgacatttctgacataccggccgtttccgactcggaccgatg

SEQ ID NO: 16965 - DNA, 203 bp, Artificial sequence
  synthetic
ggcgcgccagtcctaacctacctctctgacatttctgacatttctgacatttctgacatttctgacatttctgacatttctgacatttctgacatttctgacatttctgacatttctgacatttctgacatttctgacataccggccgtttctgacatttctgacatttctgacattttcttggcaaacgactcggaccgatg

SEQ ID NO: 16966 - DNA, 203 bp, Artificial sequence
  synthetic
ggcgcgccagtccttagtaggttgtctgacatttctgacatttctgacatttctgacatttctgacatttctgacatttctgacatttctgacatttctgacatttctgacatttctgacatttctgacatttctgacatactccccatttctgacatttctgacatttctgacatttctgacatttccgactcggaccgatg

SEQ ID NO: 16967 - DNA, 203 bp, Artificial sequence
  synthetic
ggcgcgccagtcctgcacgatcgttctgacatttctgacatttctgacatttctgacatttctgacatttctgacatttctgacatttctgacatttctgacatttctgacatttctgacatttctgacatttctgacatactccccatttctgacatttctgacatttctgaccgtcaattcctttacgactcggaccgatg

SEQ ID NO: 16968 - DNA, 203 bp, Artificial sequence
  synthetic
ggcgcgccagtcctgacgtcactatctgacatttctgacatttctgacatttctgacatttctgacatttctgacatttctgacatttctgacatttctgacatttctgacatttctgacatttctgacatttctgacatcacggaatcgagaaacatttctgacatttctgacatttctgacatttccgactcggaccgatg

SEQ ID NO: 16969 - DNA, 203 bp, Artificial sequence
  synthetic
ggcgcgccagtcctagtcctcgtgtctgacatttctgacatttctgacatttctgacatttctgacatttctgacatttctgacatttctgacatttctgacatttctgacatttctgacatttctgacatttctgacatccggcgggtttctgacatccggcgggtttctgacatccggcgggtttccgactcggaccgatg

SEQ ID NO: 16970 - DNA, 203 bp, Artificial sequence
  synthetic
ggcgcgccagtcctctcgtgagcatctgacatttctgacatttctgacatttctgacatttctgacatttctgacatttctgacatttctgacatttctgacatttctgacatttctgacatttctgacatttctgacatccggcgggtttctgacatccggcgggtttctgacatccggcgggtttccgactcggaccgatg

SEQ ID NO: 16971 - DNA, 203 bp, Artificial sequence
  synthetic
ggcgcgccagtcctgtgctcgtggtctgacatttctgacatttctgacatttctgacatttctgacatttctgacatttctgacatttctgacatttctgacatttctgacatttctgacatttctgacatttctgacatccggcgggtttctgacatccggcgggtttctgacatccggcgggtttccgactcggaccgatg

SEQ ID NO: 16972 - DNA, 203 bp, Artificial sequence
  synthetic
ggcgcgccagtcctccacgagcagtctgacatttctgacatttctgacatttctgacatttctgacatttctgacatttctgacatttctgacatttctgacatttctgacatttctgacatttctgacatttctgacatccggcgggtttctgacatccggcgggtttctgacatccggcgggtttccgactcggaccgatg

SEQ ID NO: 16973 - DNA, 203 bp, Artificial sequence
  synthetic
ggcgcgccagtccttctgttgagctctgacatttctgacatttctgacatttctgacatttctgacatttctgacatttctgacatttctgacatttctgacatttctgacatttctgacatttctgacatttctgacatccggcgggtttctgacatttctgacatttctgacatttctgacatttccgactcggaccgatg

SEQ ID NO: 16974 - DNA, 203 bp, Artificial sequence
  synthetic
ggcgcgccagtccttatgcacggttctgacatttctgacatttctgacatttctgacatttctgacatttctgacatttctgacatttctgacatttctgacatttctgacatttctgacatttctgacatttctgacatcgtcaattcctttaacatcgtcaattcctttaacatttctgacatttccgactcggaccgatg

SEQ ID NO: 16975 - DNA, 203 bp, Artificial sequence
  synthetic
ggcgcgccagtccttcgatttctatctgacatttctgacatttctgacatttctgacatttctgacatttctgacatttctgacatttctgacatttctgacatttctgacatttctgacatttctgacatttctgacattactcccatttctgacattactcccatttctgacattactcccatttccgactcggaccgatg

SEQ ID NO: 16976 - DNA, 203 bp, Artificial sequence
  synthetic
ggcgcgccagtcctccactttagatctgacatttctgacatttctgacatttctgacatttctgacatttctgacatttctgacatttctgacatttctgacatttctgacatttctgacatttctgacatttctgacattactcccatttctgacatttctgacatttctgacattactcccatttccgactcggaccgatg

SEQ ID NO: 16977 - DNA, 203 bp, Artificial sequence
  synthetic
ggcgcgccagtcctataccatgtttctgacatttctgacatttctgacatttctgacatttctgacatttctgacatttctgacatttctgacatttctgacatttctgacatttctgacatttctgacatttctgacatttctaccggccgtgacatttctgacatttctgacatttctgtactccccgactcggaccgatg

SEQ ID NO: 16978 - DNA, 203 bp, Artificial sequence
  synthetic
ggcgcgccagtccttccagaaacgtctgacatttctgacatttctgacatttctgacatttctgacatttctgacatttctgacatttctgacatttctgacatttctgacatttctgacatttctgacatttctgacatttctaccggccgtgacatttctgacatttctgaccacggaatcgagaacgactcggaccgatg

SEQ ID NO: 16979 - DNA, 203 bp, Artificial sequence
  synthetic
ggcgcgccagtcctggtcatgacgtctgacatttctgacatttctgacatttctgacatttctgacatttctgacatttctgacatttctgacatttctgacatttctgacatttctgacatttctgacatttctgacatttctcacggaatcgagaattctgacatttctgacatttcccggcgggtcgactcggaccgatg

SEQ ID NO: 16980 - DNA, 203 bp, Artificial sequence
  synthetic
ggcgcgccagtcctcgtagcaagatctgacatttctgacatttctgacatttctgacatttctgacatttctgacatttctgacatttctgacatttctgacatttctgacatttctgacatttctgacatttctgacatttctccggcgggtgacatttctgacatttctgacatttctgacatttccgactcggaccgatg

SEQ ID NO: 16981 - DNA, 203 bp, Artificial sequence
  synthetic
ggcgcgccagtcctttcttgaacgtctgacatttctgacatttctgacatttctgacatttctgacatttctgacatttctgacatttctgacatttctgacatttctgacatttctgacatttctgacatttctgacatttctcgattccgtgacatttctcgattccgtgacatttctgacatttccgactcggaccgatg

SEQ ID NO: 16982 - DNA, 203 bp, Artificial sequence
  synthetic
ggcgcgccagtcctcgtcttgacttctgacatttctgacatttctgacatttctgacatttctgacatttctgacatttctgacatttctgacatttctgacatttctgacatttctgacatttctgacatttctgacatttctcgtcaattcctttattctgacatttctgacatttcccggcgggtcgactcggaccgatg

SEQ ID NO: 16983 - DNA, 203 bp, Artificial sequence
  synthetic
ggcgcgccagtcctcgacaagacgtctgacatttctgacatttctgacatttctgacatttctgacatttctgacatttctgacatttctgacatttctgacatttctgacatttctgacatttctgacatttctgacatttctgacacggaatcgagaactgacatttctgaccgtcaattcctttacgactcggaccgatg

SEQ ID NO: 16984 - DNA, 203 bp, Artificial sequence
  synthetic
ggcgcgccagtcctcgtctcggtttctgacatttctgacatttctgacatttctgacatttctgacatttctgacatttctgacatttctgacatttctgacatttctgacatttctgacatttctgacatttctgacatttctgacatccggcgggtttctgacatttctgacatttcccggcgggtcgactcggaccgatg

SEQ ID NO: 16985 - DNA, 203 bp, Artificial sequence
  synthetic
ggcgcgccagtcctaatcttaacgtctgacatttctgacatttctgacatttctgacatttctgacatttctgacatttctgacatttctgacatttctgacatttctgacatttctgacatttctgacatttctgacatttctgacatcgtcaattcctttaacatttctgacattttcttggcaaacgactcggaccgatg

SEQ ID NO: 16986 - DNA, 203 bp, Artificial sequence
  synthetic
ggcgcgccagtcctcgttgactgttctgacatttctgacatttctgacatttctgacatttctgacatttctgacatttctgacatttctgacatttctgacatttctgacatttctgacatttctgacatttctgacatttctgacatttaccggccgtctgacatttctgacatttctgacatttccgactcggaccgatg

SEQ ID NO: 16987 - DNA, 203 bp, Artificial sequence
  synthetic
ggcgcgccagtcctgtcttagacgtctgacatttctgacatttctgacatttctgacatttctgacatttctgacatttctgacatttctgacatttctgacatttctgacatttctgacatttctgacatttctgacatttctgacatttaccggccgtctgacatttctgacatttctgtactccccgactcggaccgatg

SEQ ID NO: 16988 - DNA, 203 bp, Artificial sequence
  synthetic
ggcgcgccagtcctctgtgcaacgtctgacatttctgacatttctgacatttctgacatttctgacatttctgacatttctgacatttctgacatttctgacatttctgacatttctgacatttctgacatttctgacatttctgacatttaccggccgtctgacatttctgaccgtcaattcctttacgactcggaccgatg

SEQ ID NO: 16989 - DNA, 203 bp, Artificial sequence
  synthetic
ggcgcgccagtcctgacatggacgtctgacatttctgacatttctgacatttctgacatttctgacatttctgacatttctgacatttctgacatttctgacatttctgacatttctgacatttctgacatttctgacatttctgacatttccggcgggtctgacatttctgaccgtcaattcctttacgactcggaccgatg

SEQ ID NO: 16990 - DNA, 203 bp, Artificial sequence
  synthetic
ggcgcgccagtcctcgttcacttatctgacatttctgacatttctgacatttctgacatttctgacatttctgacatttctgacatttctgacatttctgacatttctgacatttctgacatttctgacatttctgacatttctgacatttctcacggaatcgagaattctgaccacggaatcgagaacgactcggaccgatg

SEQ ID NO: 16991 - DNA, 203 bp, Artificial sequence
  synthetic
ggcgcgccagtcctgaatcagacgtctgacatttctgacatttctgacatttctgacatttctgacatttctgacatttctgacatttctgacatttctgacatttctgacatttctgacatttctgacatttctgacatttctgacatttctcgtcaattcctttattctgacatttctgtactccccgactcggaccgatg

SEQ ID NO: 16992 - DNA, 203 bp, Artificial sequence
  synthetic
ggcgcgccagtcctcgtaaagtgctctgacatttctgacatttctgacatttctgacatttctgacatttctgacatttctgacatttctgacatttctgacatttctgacatttctgacatttctgacatttctgacatttctgacatttctgacaccggccgtatttctgacatttcccggcgggtcgactcggaccgatg

SEQ ID NO: 16993 - DNA, 203 bp, Artificial sequence
  synthetic
ggcgcgccagtcctcaggactacgtctgacatttctgacatttctgacatttctgacatttctgacatttctgacatttctgacatttctgacatttctgacatttctgacatttctgacatttctgacatttctgacatttctgacatttctgacatcacggaatcgagaaacatttcaccggccgtcgactcggaccgatg

SEQ ID NO: 16994 - DNA, 203 bp, Artificial sequence
  synthetic
ggcgcgccagtcctgactgttacgtctgacatttctgacatttctgacatttctgacatttctgacatttctgacatttctgacatttctgacatttctgacatttctgacatttctgacatttctgacatttctgacatttctgacatttctgacatccggcgggtttctgacatccggcgggtttccgactcggaccgatg

SEQ ID NO: 16995 - DNA, 203 bp, Artificial sequence
  synthetic
ggcgcgccagtcctcgtcaccttctctgacatttctgacatttctgacatttctgacatttctgacatttctgacatttctgacatttctgacatttctgacatttctgacatttctgacatttctgacatttctgacatttctgacatttctgacatccggcgggtttctgacatccggcgggtttccgactcggaccgatg

SEQ ID NO: 16996 - DNA, 203 bp, Artificial sequence
  synthetic
ggcgcgccagtcctcgttaactcgtctgacatttctgacatttctgacatttctgacatttctgacatttctgacatttctgacatttctgacatttctgacatttctgacatttctgacatttctgacatttctgacatttctgacatttctgacatccggcgggtttctgacatccggcgggtttccgactcggaccgatg

SEQ ID NO: 16997 - DNA, 203 bp, Artificial sequence
  synthetic
ggcgcgccagtcctcgtagtcgagtctgacatttctgacatttctgacatttctgacatttctgacatttctgacatttctgacatttctgacatttctgacatttctgacatttctgacatttctgacatttctgacatttctgacatttctgacatccggcgggtttctgacatccggcgggtttccgactcggaccgatg

SEQ ID NO: 16998 - DNA, 203 bp, Artificial sequence
  synthetic
ggcgcgccagtcctgcaccaagcgtctgacatttctgacatttctgacatttctgacatttctgacatttctgacatttctgacatttctgacatttctgacatttctgacatttctgacatttctgacatttctgacatttctgacatttctgacatccggcgggtttctgaccgtcaattcctttacgactcggaccgatg

SEQ ID NO: 16999 - DNA, 203 bp, Artificial sequence
  synthetic
ggcgcgccagtcctgctgtctgcgtctgacatttctgacatttctgacatttctgacatttctgacatttctgacatttctgacatttctgacatttctgacatttctgacatttctgacatttctgacatttctgacatttctgacatttctgacatcgtcaattcctttaacatttcaccggccgtcgactcggaccgatg

SEQ ID NO: 17000 - DNA, 203 bp, Artificial sequence
  synthetic
ggcgcgccagtccttgggtctgcgtctgacatttctgacatttctgacatttctgacatttctgacatttctgacatttctgacatttctgacatttctgacatttctgacatttctgacatttctgacatttctgacatttctgacatttctgacatcgtcaattcctttaacatttcccggcgggtcgactcggaccgatg

SEQ ID NO: 17001 - DNA, 203 bp, Artificial sequence
  synthetic
ggcgcgccagtccttgctactgcgtctgacatttctgacatttctgacatttctgacatttctgacatttctgacatttctgacatttctgacatttctgacatttctgacatttctgacatttctgacatttctgacatttctgacatttctgacatcgtcaattcctttaacatttctgacatttccgactcggaccgatg

SEQ ID NO: 17002 - DNA, 203 bp, Artificial sequence
  synthetic
ggcgcgccagtcctcctacaagcgtctgacatttctgacatttctgacatttctgacatttctgacatttctgacatttctgacatttctgacatttctgacatttctgacatttctgacatttctgacatttctgacatttctgacatttctgacatgggagtaatttctgacatttctgacatttccgactcggaccgatg

SEQ ID NO: 17003 - DNA, 203 bp, Artificial sequence
  synthetic
ggcgcgccagtcctcttgttagcgtctgacatttctgacatttctgacatttctgacatttctgacatttctgacatttctgacatttctgacatttctgacatttctgacatttctgacatttctgacatttctgacatttctgacatttctgacatttcacggaatcgagaaatttctgacatttccgactcggaccgatg

SEQ ID NO: 17004 - DNA, 203 bp, Artificial sequence
  synthetic
ggcgcgccagtcctctcaagagcgtctgacatttctgacatttctgacatttctgacatttctgacatttctgacatttctgacatttctgacatttctgacatttctgacatttctgacatttctgacatttctgacatttctgacatttctgacatttcacggaatcgagaaatttctgtactccccgactcggaccgatg

SEQ ID NO: 17005 - DNA, 203 bp, Artificial sequence
  synthetic
ggcgcgccagtccttcgctttgcgtctgacatttctgacatttctgacatttctgacatttctgacatttctgacatttctgacatttctgacatttctgacatttctgacatttctgacatttctgacatttctgacatttctgacatttctgacatttcgtcaattcctttacgtcaattcctttacgactcggaccgatg

SEQ ID NO: 17006 - DNA, 203 bp, Artificial sequence
  synthetic
ggcgcgccagtcctcgctctaagatctgacatttctgacatttctgacatttctgacatttctgacatttctgacatttctgacatttctgacatttctgacatttctgacatttctgacatttctgacatttctgacatttctgacatttctgacatttctgacatcgtcaattcctttaacatttccgactcggaccgatg

SEQ ID NO: 17007 - DNA, 203 bp, Artificial sequence
  synthetic
ggcgcgccagtcctcgctaggatctctgacatttctgacatttctgacatttctgacatttctgacatttctgacatttctgacatttctgacatttctgacatttctgacatttctgacatttctgacatttctgacatttctgacatttctgacatttctgacattactccccgtcaattcctttacgactcggaccgatg

SEQ ID NO: 17008 - DNA, 203 bp, Artificial sequence
  synthetic
ggcgcgccagtcctcgcctcgtagtctgacatttctgacatttctgacatttctgacatttctgacatttctgacatttctgacatttctgacatttctgacatttctgacatttctgacatttctgacatttctgacatttctgacatttctgacatttctgacatttcaccggccgtccggcgggtcgactcggaccgatg

SEQ ID NO: 17009 - DNA, 203 bp, Artificial sequence
  synthetic
ggcgcgccagtcctcgctcagcgttctgacatttctgacatttctgacatttctgacatttctgacatttctgacatttctgacatttctgacatttctgacatttctgacatttctgacatttctgacatttctgacatttctgacatttctgacatttctgacatttctactcccttcttggcaaacgactcggaccgatg

SEQ ID NO: 17010 - DNA, 203 bp, Artificial sequence
  synthetic
ggcgcgccagtcctcgcctttcgttctgacatttctgacatttctgacatttctgacatttctgacatttctgacatttctgacatttctgacatttctgacatttctgacatttctgacatttctgacatttctgacatttctgacatttctgacatttctgacatttctgacatccggcgggtttccgactcggaccgatg

SEQ ID NO: 17011 - DNA, 203 bp, Artificial sequence
  synthetic
ggcgcgccagtcctcgcctagtcctctgacatttctgacatttctgacatttctgacatttctgacatttctgacatttctgacatttctgacatttctgacatttctgacatttctgacatttctgacatttctgacatttctgacatttctgacatttctgacatttctgacatccggcgggtttccgactcggaccgatg

SEQ ID NO: 17012 - DNA, 203 bp, Artificial sequence
  synthetic
ggcgcgccagtcctcgctttgagttctgacatttctgacatttctgacatttctgacatttctgacatttctgacatttctgacatttctgacatttctgacatttctgacatttctgacatttctgacatttctgacatttctgacatttctgacatttctgacatttctgacatccggcgggtttccgactcggaccgatg

SEQ ID NO: 17013 - DNA, 203 bp, Artificial sequence
  synthetic
ggcgcgccagtcctcgctgacaaatctgacatttctgacatttctgacatttctgacatttctgacatttctgacatttctgacatttctgacatttctgacatttctgacatttctgacatttctgacatttctgacatttctgacatttctgacatttctgacatttctgacatccggcgggtttccgactcggaccgatg

SEQ ID NO: 17014 - DNA, 203 bp, Artificial sequence
  synthetic
ggcgcgccagtcctcgctaccgtttctgacatttctgacatttctgacatttctgacatttctgacatttctgacatttctgacatttctgacatttctgacatttctgacatttctgacatttctgacatttctgacatttctgacatttctgacatttctgacatttctgacatccggcgggtttccgactcggaccgatg

SEQ ID NO: 17015 - DNA, 203 bp, Artificial sequence
  synthetic
ggcgcgccagtcctacaactcacgtctgacatttctgacatttctgacatttctgacatttctgacatttctgacatttctgacatttctgacatttctgacatttctgacatttctgacatttctgacatttctgacatttctgacatttctgacatttctgacatttctgacattactcccatttccgactcggaccgatg

SEQ ID NO: 17016 - DNA, 203 bp, Artificial sequence
  synthetic
ggcgcgccagtccttaacgaggcatctgacatttctgacatttctgacatttctgacatttctgacatttctgacatttctgacatttctgacatttctgacatttctgacatttctgacatttctgacatttctgacatttctgacatttctgacatttctgacatttctgacatttcccggcgggtcgactcggaccgatg

SEQ ID NO: 17017 - DNA, 203 bp, Artificial sequence
  synthetic
ggcgcgccagtcctagcttcgttatctgacatttctgacatttctgacatttctgacatttctgacatttctgacatttctgacatttctgacatttctgacatttctgacatttctgacatttctgacatttctgacatttctgacatttctgacatttctgacatttctgacatttctgacatttccgactcggaccgatg

SEQ ID NO: 17018 - DNA, 203 bp, Artificial sequence
  synthetic
ggcgcgccagtccttctttaacgatctgacatttctgacatttctgacatttctgacatttctgacatttctgacatttctgacatttctgacatttctgacatttctgacatttctgacatttctgacatttctgacatttctgacatttctgacatttctgacatttctgacatttctgacatttccgactcggaccgatg

SEQ ID NO: 17019 - DNA, 203 bp, Artificial sequence
  synthetic
ggcgcgccagtcctcttctcgttatctgacatttctgacatttctgacatttctgacatttctgacatttctgacatttctgacatttctgacatttctgacatttctgacatttctgacatttctgacatttctgacatttctgacatttctgacatttctgacatttctgacatttctgacatttccgactcggaccgatg

SEQ ID NO: 17020 - DNA, 203 bp, Artificial sequence
  synthetic
ggcgcgccagtccttaacgacatttctgacatttctgacatttctgacatttctgacatttctgacatttctgacatttctgacatttctgacatttctgacatttctgacatttctgacatttctgacatttctgacatttctgacatttctgacatttctgacatttctgacatttctgacatttccgactcggaccgatg

SEQ ID NO: 17021 - DNA, 203 bp, Artificial sequence
  synthetic
ggcgcgccagtccttaacgagtggtctgacatttctgacatttctgacatttctgacatttctgacatttctgacatttctgacatttctgacatttctgacatttctgacatttctgacatttctgacatttctgacatttctgacatttctgacatttctgacatttctgacatttctgacatttccgactcggaccgatg

SEQ ID NO: 17022 - DNA, 203 bp, Artificial sequence
  synthetic
ggcgcgccagtcctgcaaacgcactctgacatttctgacatttctgacatttctgacatttctgacatttctgacatttctgacatttctgacatttctgacatttctgacatttctgacatttctgacatttctgacatttctgacatttctgacatttctgacatttctgaccgtcaattcctttacgactcggaccgatg

SEQ ID NO: 17023 - DNA, 203 bp, Artificial sequence
  synthetic
ggcgcgccagtcctcgacctagtctctgacatttctgacatttctgacatttctgacatttctgacatttctgacatttctgacatttctgacatttctgacatttctgacatttctgacatttctgacatttctgacatttctgacatttctgacatttctgacatttctgactactccctactccccgactcggaccgatg

SEQ ID NO: 17024 - DNA, 203 bp, Artificial sequence
  synthetic
ggcgcgccagtcctcacgttaacatctgacatttctgacatttctgacatttctgacatttctgacatttctgacatttctgacatttctgacatttctgacatttctgacatttctgacatttctgacatttctgacatttctgacatttctgacatttctgacatttcttcttggcaaatactccccgactcggaccgatg

SEQ ID NO: 17025 - DNA, 203 bp, Artificial sequence
  synthetic
ggcgcgccagtcctgctaccacgttctgacatttctgacatttctgacatttctgacatttctgacatttctgacatttctgacatttctgacatttctgacatttctgacatttctgacatttctgacatttctgacatttctgacatttctgacatttctgactactcccacatttcaccggccgtcgactcggaccgatg

SEQ ID NO: 17026 - DNA, 203 bp, Artificial sequence
  synthetic
ggcgcgccagtcctttaaacgtgctctgacatttctgacatttctgacatttctgacatttctgacatttctgacatttctgacatttctgacatttctgacatttctgacatttctgacatttctgacatttctgacatttctgacatttctgacatttctgcacggaatcgagaattcttggcaaacgactcggaccgatg

SEQ ID NO: 17027 - DNA, 203 bp, Artificial sequence
  synthetic
ggcgcgccagtcctaacgtgcatttctgacatttctgacatttctgacatttctgacatttctgacatttctgacatttctgacatttctgacatttctgacatttctgacatttctgacatttctgacatttctgacatttctgacatttctgacatttctgccggcgggtacatttcaccggccgtcgactcggaccgatg

SEQ ID NO: 17028 - DNA, 203 bp, Artificial sequence
  synthetic
ggcgcgccagtcctacgtgcttcttctgacatttctgacatttctgacatttctgacatttctgacatttctgacatttctgacatttctgacatttctgacatttctgacatttctgacatttctgacatttctgacatttctgacatttctgacatttctgccggcgggtacatttcccggcgggtcgactcggaccgatg

SEQ ID NO: 17029 - DNA, 203 bp, Artificial sequence
  synthetic
ggcgcgccagtccttgcgttaaggtctgacatttctgacatttctgacatttctgacatttctgacatttctgacatttctgacatttctgacatttctgacatttctgacatttctgacatttctgacatttctgacatttctgacatttctgacatttctgtactccctgacattttcttggcaaacgactcggaccgatg

SEQ ID NO: 17030 - DNA, 203 bp, Artificial sequence
  synthetic
ggcgcgccagtcctttaacgcatttctgacatttctgacatttctgacatttctgacatttctgacatttctgacatttctgacatttctgacatttctgacatttctgacatttctgacatttctgacatttctgacatttctgacatttctgacatttctgttcttggcaaaatttctgacatttccgactcggaccgatg

SEQ ID NO: 17031 - DNA, 203 bp, Artificial sequence
  synthetic
ggcgcgccagtccttgtctaacgctctgacatttctgacatttctgacatttctgacatttctgacatttctgacatttctgacatttctgacatttctgacatttctgacatttctgacatttctgacatttctgacatttctgacatttctgacatttctgttcttggcaaacacggaatcgagaacgactcggaccgatg

SEQ ID NO: 17032 - DNA, 203 bp, Artificial sequence
  synthetic
ggcgcgccagtcctctgctgtgcgtctgacatttctgacatttctgacatttctgacatttctgacatttctgacatttctgacatttctgacatttctgacatttctgacatttctgacatttctgacatttctgacatttctgacatttctgacatttcttcttggcaaaacatttcccggcgggtcgactcggaccgatg

SEQ ID NO: 17033 - DNA, 203 bp, Artificial sequence
  synthetic
ggcgcgccagtccttgacatactctctgacatttctgacatttctgacatttctgacatttctgacatttctgacatttctgacatttctgacatttctgacatttctgacatttctgacatttctgacatttctgacatttctgacatttctgacccggcgggtatttctgacatttcaccggccgtcgactcggaccgatg

SEQ ID NO: 17034 - DNA, 203 bp, Artificial sequence
  synthetic
ggcgcgccagtcctgaccagtacatctgacatttctgacatttctgacatttctgacatttctgacatttctgacatttctgacatttctgacatttctgacatttctgacatttctgacatttctgacatttctgacatttctgacatttctgactactcccacatttctgacattttcttggcaaacgactcggaccgatg

SEQ ID NO: 17035 - DNA, 203 bp, Artificial sequence
  synthetic
ggcgcgccagtcctcgtctacagctctgacatttctgacatttctgacatttctgacatttctgacatttctgacatttctgacatttctgacatttctgacatttctgacatttctgacatttctgacatttctgacatttctgacatttctgacttcttggcaaattctgacatttctgacatttccgactcggaccgatg

SEQ ID NO: 17036 - DNA, 203 bp, Artificial sequence
  synthetic
ggcgcgccagtcctagacctgggttctgacatttctgacatttctgacatttctgacatttctgacatttctgacatttctgacatttctgacatttctgacatttctgacatttctgacatttctgacatttctgacatttctgacatttctgacttcttggcaaattctgacatttctgtactccccgactcggaccgatg

SEQ ID NO: 17037 - DNA, 203 bp, Artificial sequence
  synthetic
ggcgcgccagtcctgcagcctgggtctgacatttctgacatttctgacatttctgacatttctgacatttctgacatttctgacatttctgacatttctgacatttctgacatttctgacatttctgacatttctgacatttctgacatttctgacttcttggcaaattctgaccgtcaattcctttacgactcggaccgatg

SEQ ID NO: 17038 - DNA, 203 bp, Artificial sequence
  synthetic
ggcgcgccagtcctacccaggttctctgacatttctgacatttctgacatttctgacatttctgacatttctgacatttctgacatttctgacatttctgacatttctgacatttctgacatttctgacatttctgacatttctgacatttctgccggcgggtacatttctgacattttcttggcaaacgactcggaccgatg

SEQ ID NO: 17039 - DNA, 203 bp, Artificial sequence
  synthetic
ggcgcgccagtcctcattctactatctgacatttctgacatttctgacatttctgacatttctgacatttctgacatttctgacatttctgacatttctgacatttctgacatttctgacatttctgacatttctgacatttctgacatttcttactcccctgacatttctgaccgtcaattcctttacgactcggaccgatg

SEQ ID NO: 17040 - DNA, 203 bp, Artificial sequence
  synthetic
ggcgcgccagtcctggatcttgggtctgacatttctgacatttctgacatttctgacatttctgacatttctgacatttctgacatttctgacatttctgacatttctgacatttctgacatttctgacatttctgacatttctgacatttcttggcaaactgacatttctgacatttctgacatttccgactcggaccgatg

SEQ ID NO: 17041 - DNA, 203 bp, Artificial sequence
  synthetic
ggcgcgccagtcctgtctgacagttctgacatttctgacatttctgacatttctgacatttctgacatttctgacatttctgacatttctgacatttctgacatttctgacatttctgacatttctgacatttctgacatttctgacattttactcccttctgacatttctgacatttcaccggccgtcgactcggaccgatg

SEQ ID NO: 17042 - DNA, 203 bp, Artificial sequence
  synthetic
ggcgcgccagtcctcagtctgacatctgacatttctgacatttctgacatttctgacatttctgacatttctgacatttctgacatttctgacatttctgacatttctgacatttctgacatttctgacatttctgacatttctgacattttactcccttctgacatttctgacatttcccggcgggtcgactcggaccgatg

SEQ ID NO: 17043 - DNA, 203 bp, Artificial sequence
  synthetic
ggcgcgccagtccttgtcagacagtctgacatttctgacatttctgacatttctgacatttctgacatttctgacatttctgacatttctgacatttctgacatttctgacatttctgacatttctgacatttctgacatttctgacccggcgggtatttctgacatttctgacattttcttggcaaacgactcggaccgatg

SEQ ID NO: 17044 - DNA, 203 bp, Artificial sequence
  synthetic
ggcgcgccagtcctacgtctacgttctgacatttctgacatttctgacatttctgacatttctgacatttctgacatttctgacatttctgacatttctgacatttctgacatttctgacatttctgacatttctgacatttcttggcaaactgacatttcttggcaaactgacatttcttggcaaaccgactcggaccgatg

SEQ ID NO: 17045 - DNA, 203 bp, Artificial sequence
  synthetic
ggcgcgccagtccttgttagacgttctgacatttctgacatttctgacatttctgacatttctgacatttctgacatttctgacatttctgacatttctgacatttctgacatttctgacatttctgacatttctgacattttactcccttctgacatttctgacatttctgacattttcttggcaaacgactcggaccgatg

SEQ ID NO: 17046 - DNA, 203 bp, Artificial sequence
  synthetic
ggcgcgccagtcctagacgtacagtctgacatttctgacatttctgacatttctgacatttctgacatttctgacatttctgacatttctgacatttctgacatttctgacatttctgacatttctgacatttctgaccggcgggtcatttctgacatttctgacatttctgaccgtcaattcctttacgactcggaccgatg

SEQ ID NO: 17047 - DNA, 203 bp, Artificial sequence
  synthetic
ggcgcgccagtcctagttttgaaatctgacatttctgacatttctgacatttctgacatttctgacatttctgacatttctgacatttctgacatttctgacatttctgacatttctgacatttctgacatttctgacttcttggcaaattctgacatttctgacatttctgacattttcttggcaaacgactcggaccgatg

SEQ ID NO: 17048 - DNA, 203 bp, Artificial sequence
  synthetic
ggcgcgccagtcctctggatcggttctgacatttctgacatttctgacatttctgacatttctgacatttctgacatttctgacatttctgacatttctgacatttctgacatttctgacatttctgacatttctgatactcccgacatttctgacatttctgacatttctgacatttcaccggccgtcgactcggaccgatg

SEQ ID NO: 17049 - DNA, 203 bp, Artificial sequence
  synthetic
ggcgcgccagtccttgcgaccttctctgacatttctgacatttctgacatttctgacatttctgacatttctgacatttctgacatttctgacatttctgacatttctgacatttctgacatttctgacatttcttactcccctgacatttctgacatttctgacatttctgacattttcttggcaaacgactcggaccgatg

SEQ ID NO: 17050 - DNA, 203 bp, Artificial sequence
  synthetic
ggcgcgccagtcctctctagcgactctgacatttctgacatttctgacatttctgacatttctgacatttctgacatttctgacatttctgacatttctgacatttctgacatttctgacatttctgacatttttcttggcaaagacatttctgacatttctgacatttctgacatttcccggcgggtcgactcggaccgatg

SEQ ID NO: 17051 - DNA, 203 bp, Artificial sequence
  synthetic
ggcgcgccagtcctgcgacttggttctgacatttctgacatttctgacatttctgacatttctgacatttctgacatttctgacatttctgacatttctgacatttctgacatttctgacatttctgaccggcgggtcatttctgacatttctgacatttctgacatttctgacatttcaccggccgtcgactcggaccgatg

SEQ ID NO: 17052 - DNA, 203 bp, Artificial sequence
  synthetic
ggcgcgccagtcctagagtcgccttctgacatttctgacatttctgacatttctgacatttctgacatttctgacatttctgacatttctgacatttctgacatttctgacatttctgacatttctgaccggcgggtcatttctgacatttctgacatttctgacatttctgacatttcccggcgggtcgactcggaccgatg

SEQ ID NO: 17053 - DNA, 203 bp, Artificial sequence
  synthetic
ggcgcgccagtcctcgacgtcgcttctgacatttctgacatttctgacatttctgacatttctgacatttctgacatttctgacatttctgacatttctgacatttctgacatttctgacatttctgacgtcaattcctttactgacatttctgacatttctgacatttctgacattttcttggcaaacgactcggaccgatg

SEQ ID NO: 17054 - DNA, 203 bp, Artificial sequence
  synthetic
ggcgcgccagtccttaagtcgctatctgacatttctgacatttctgacatttctgacatttctgacatttctgacatttctgacatttctgacatttctgacatttctgacatttctgacatttctgattcttggcaaatttctgacatttctgacatttctgacatttctgaccgtcaattcctttacgactcggaccgatg

SEQ ID NO: 17055 - DNA, 203 bp, Artificial sequence
  synthetic
ggcgcgccagtcctctgcgacatgtctgacatttctgacatttctgacatttctgacatttctgacatttctgacatttctgacatttctgacatttctgacatttctgacatttctgacatttcttggcaaactgacatttctgacatttctgacatttcttggcaaactgacatttctgacatttccgactcggaccgatg

SEQ ID NO: 17056 - DNA, 203 bp, Artificial sequence
  synthetic
ggcgcgccagtcctcacctgtcgctctgacatttctgacatttctgacatttctgacatttctgacatttctgacatttctgacatttctgacatttctgacatttctgacatttctgattcttggcaaatttctgacatttctgacatttctgacatttctgacatttctgacatttcccggcgggtcgactcggaccgatg

SEQ ID NO: 17057 - DNA, 203 bp, Artificial sequence
  synthetic
ggcgcgccagtcctcgagcgacagtctgacatttctgacatttctgacatttctgacatttctgacatttctgacatttctgacatttctgacatttctgacatttctgacatttctgcacggaatcgagaatctgacatttctgacatttctgacatttctgacatttctgacatttctgacatttccgactcggaccgatg

SEQ ID NO: 17058 - DNA, 203 bp, Artificial sequence
  synthetic
ggcgcgccagtccttgaatgtcgctctgacatttctgacatttctgacatttctgacatttctgacatttctgacatttctgacatttctgacatttctgacatttctgacatttctgcacggaatcgagaatctgacatttctgacatttctgacatttctgacatttctgaccacggaatcgagaacgactcggaccgatg

SEQ ID NO: 17059 - DNA, 203 bp, Artificial sequence
  synthetic
ggcgcgccagtcctgttggtcgcctctgacatttctgacatttctgacatttctgacatttctgacatttctgacatttctgacatttctgacatttctgacatttctgacatttctgcgtcaattcctttatctgacatttctgacatttctgacatttctgacatttctgacatttctgacatttccgactcggaccgatg

SEQ ID NO: 17060 - DNA, 203 bp, Artificial sequence
  synthetic
ggcgcgccagtcctgtcgctctaatctgacatttctgacatttctgacatttctgacatttctgacatttctgacatttctgacatttctgacatttctgacatttctgacatttctgcgtcaattcctttatctgacatttctgacatttctgacatttctgacatttctgaccgtcaattcctttacgactcggaccgatg

SEQ ID NO: 17061 - DNA, 203 bp, Artificial sequence
  synthetic
ggcgcgccagtcctgtcgctgatctctgacatttctgacatttctgacatttctgacatttctgacatttctgacatttctgacatttctgacatttctgacatttctgacatttctgtactccctgacatttctgacatttctgacatttctgacatttctgacatttctgaccgtcaattcctttacgactcggaccgatg

SEQ ID NO: 17062 - DNA, 203 bp, Artificial sequence
  synthetic
ggcgcgccagtcctgtgtcgctcatctgacatttctgacatttctgacatttctgacatttctgacatttctgacatttctgacatttctgacatttctgacatttctgacatttctttcttggcaaacatttctgacatttctgacatttctgacatttctgacatttctgacattttcttggcaaacgactcggaccgatg

SEQ ID NO: 17063 - DNA, 203 bp, Artificial sequence
  synthetic
ggcgcgccagtcctaatgtcgtagtctgacatttctgacatttctgacatttctgacatttctgacatttctgacatttctgacatttctgacatttctgacatttctgaccacggaatcgagaatgacatttctgacatttctgacatttctgacatttctgacatttctgacatttctgacatttccgactcggaccgatg

SEQ ID NO: 17064 - DNA, 203 bp, Artificial sequence
  synthetic
ggcgcgccagtcctcgcctagaattctgacatttctgacatttctgacatttctgacatttctgacatttctgacatttctgacatttctgacatttctgacatttctgaccgtcaattcctttatgacatttctgacatttctgacatttctgacatttctgacatttctgacatttctgtactccccgactcggaccgatg

SEQ ID NO: 17065 - DNA, 203 bp, Artificial sequence
  synthetic
ggcgcgccagtcctcctagacggttctgacatttctgacatttctgacatttctgacatttctgacatttctgacatttctgacatttctgacatttctgacatttctgattcttggcaaatttctgacatttctgacatttctgacatttctgacatttctgacatttctgacattttcttggcaaacgactcggaccgatg

SEQ ID NO: 17066 - DNA, 203 bp, Artificial sequence
  synthetic
ggcgcgccagtccttctttctaggtctgacatttctgacatttctgacatttctgacatttctgacatttctgacatttctgacatttctgacatttctgacatttctgcacggaatcgagaatctgacatttctgacatttctgacatttctgacatttctgacatttctgacatttcccggcgggtcgactcggaccgatg

SEQ ID NO: 17067 - DNA, 203 bp, Artificial sequence
  synthetic
ggcgcgccagtcctcgtctagtgttctgacatttctgacatttctgacatttctgacatttctgacatttctgacatttctgacatttctgacatttctgacatttctgcatactcccccatttctgacatttctgacatttctgacatttctgacatttctgacatttctgacatttctgacatttccgactcggaccgatg

SEQ ID NO: 17068 - DNA, 203 bp, Artificial sequence
  synthetic
ggcgcgccagtcctgcttctagtctctgacatttctgacatttctgacatttctgacatttctgacatttctgacatttctgacatttctgacatttctgacatttctgcgtcaattcctttatctgacatttctgacatttctgacatttctgacatttctgacatttctgacatttcccggcgggtcgactcggaccgatg

SEQ ID NO: 17069 - DNA, 203 bp, Artificial sequence
  synthetic
ggcgcgccagtcctatctagttggtctgacatttctgacatttctgacatttctgacatttctgacatttctgacatttctgacatttctgacatttctgacatttctgtaccggccgtgcgttctgacatttctgacatttctgacatttctgacatttctgacatttctgacatttctgacatttccgactcggaccgatg

SEQ ID NO: 17070 - DNA, 203 bp, Artificial sequence
  synthetic
ggcgcgccagtcctcttctaggcgtctgacatttctgacatttctgacatttctgacatttctgacatttctgacatttctgacatttctgacatttctgacatttctgtaccggccgtgctttctgacatttctgacatttctgacatttctgacatttctgacatttctgacatttctgacatttccgactcggaccgatg

SEQ ID NO: 17071 - DNA, 203 bp, Artificial sequence
  synthetic
ggcgcgccagtcctggtttagcgttctgacatttctgacatttctgacatttctgacatttctgacatttctgacatttctgacatttctgacatttctgacatttctgttcttggcaacatttctgacatttctgacatttctgacatttctgacatttctgacatttctgacatttctgacatttccgactcggaccgatg

SEQ ID NO: 17072 - DNA, 203 bp, Artificial sequence
  synthetic
ggcgcgccagtccttagtcaggtgtctgacatttctgacatttctgacatttctgacatttctgacatttctgacatttctgacatttctgacatttctgacatttcttcttggcaaaacatttctgacatttctgacatttctgacatttctgacatttctgacatttctgacatttctgacatttccgactcggaccgatg

SEQ ID NO: 17073 - DNA, 203 bp, Artificial sequence
  synthetic
ggcgcgccagtcctggtcaggtcctctgacatttctgacatttctgacatttctgacatttctgacatttctgacatttctgacatttctgacatttctgacatttcttggcaaactgacatttctgacatttctgacatttctgacatttctgacatttctgacatttctgacatttctgacatttccgactcggaccgatg

SEQ ID NO: 17074 - DNA, 203 bp, Artificial sequence
  synthetic
ggcgcgccagtcctaaacctgatctctgacatttctgacatttctgacatttctgacatttctgacatttctgacatttctgacatttctgacatttctgacatttcttggcaaactgacatttctgacatttctgacatttcttggcaaactgacatttctgacatttctgacatttctgacatttccgactcggaccgatg

SEQ ID NO: 17075 - DNA, 203 bp, Artificial sequence
  synthetic
ggcgcgccagtcctacctgaagaatctgacatttctgacatttctgacatttctgacatttctgacatttctgacatttctgacatttctgacatttctgacatttcttggcaaactgacatttctgacatttctgacatttcttggcaaactgacatttcttggcaaactgacatttctgacatttccgactcggaccgatg

SEQ ID NO: 17076 - DNA, 203 bp, Artificial sequence
  synthetic
ggcgcgccagtcctctggtgcatttctgacatttctgacatttctgacatttctgacatttctgacatttctgacatttctgacatttctgacatttctgacattttcttggcaaatgacatttctgacatttctgacatttctgacatttctgacatttctgacatttctgacatttcaccggccgtcgactcggaccgatg

SEQ ID NO: 17077 - DNA, 203 bp, Artificial sequence
  synthetic
ggcgcgccagtcctaatgcaccactctgacatttctgacatttctgacatttctgacatttctgacatttctgacatttctgacatttctgacatttctgacattttcttggcaaatgacatttctgacatttctgacatttctgacatttctgacatttctgacatttctgacatttcccggcgggtcgactcggaccgatg

SEQ ID NO: 17078 - DNA, 203 bp, Artificial sequence
  synthetic
ggcgcgccagtcctgactagaacgtctgacatttctgacatttctgacatttctgacatttctgacatttctgacatttctgacatttctgacatttctgacattttgccaagaactgacattttgccaagaactgacattttgccaagaactgacattttgccaagaactgacatttctgacatttccgactcggaccgatg

SEQ ID NO: 17079 - DNA, 203 bp, Artificial sequence
  synthetic
ggcgcgccagtcctggtagaacgttctgacatttctgacatttctgacatttctgacatttctgacatttctgacatttctgacatttctgacatttctgaccacggaatcgagaatgacatttctgacatttctgacatttctgacatttctgacatttctgacatttctgacatttcaccggccgtcgactcggaccgatg

SEQ ID NO: 17080 - DNA, 203 bp, Artificial sequence
  synthetic
ggcgcgccagtcctcgttctagcatctgacatttctgacatttctgacatttctgacatttctgacatttctgacatttctgacatttctgacatttctgaccacggaatcgagaatgacatttctgacatttctgacatttctgacatttctgacatttctgacatttctgacatttcccggcgggtcgactcggaccgatg

SEQ ID NO: 17081 - DNA, 203 bp, Artificial sequence
  synthetic
ggcgcgccagtcctattttcagtttctgacatttctgacatttctgacatttctgacatttctgacatttctgacatttctgacatttctgacatttctgacccggcgggtatttctgacatttctgacatttctgacatttctgacatttctgacatttctgacatttctgaccacggaatcgagaacgactcggaccgatg

SEQ ID NO: 17082 - DNA, 203 bp, Artificial sequence
  synthetic
ggcgcgccagtcctgtatgtcgggtctgacatttctgacatttctgacatttctgacatttctgacatttctgacatttctgacatttctgacatttctgacccttccgtcaattcctttaagtttgacatttctgacatttctgacatttctgacatttctgacatttctgacatttctgacatttccgactcggaccgatg

SEQ ID NO: 17083 - DNA, 203 bp, Artificial sequence
  synthetic
ggcgcgccagtcctaaagaccgggtctgacatttctgacatttctgacatttctgacatttctgacatttctgacatttctgacatttctgacatttctgaccggccgtacatttctgacatttctgacatttctgacatttctgacatttctgacatttctgacatttctgacatttcccggcgggtcgactcggaccgatg

SEQ ID NO: 17084 - DNA, 203 bp, Artificial sequence
  synthetic
ggcgcgccagtccttcgtctcgggtctgacatttctgacatttctgacatttctgacatttctgacatttctgacatttctgacatttctgacatttctgaccgtcaattcctttatgacatttctgacatttctgacatttctgacatttctgacatttctgacatttctgacatttcccggcgggtcgactcggaccgatg

SEQ ID NO: 17085 - DNA, 203 bp, Artificial sequence
  synthetic
ggcgcgccagtccttagtcatttctctgacatttctgacatttctgacatttctgacatttctgacatttctgacatttctgacatttctgacatttctgaggaagctgcccggcgggtcatgggaaacatttctgacatttctgacatttctgacatttctgacatttctgacatttctgacatttccgactcggaccgatg

SEQ ID NO: 17086 - DNA, 203 bp, Artificial sequence
  synthetic
ggcgcgccagtccttacagtgctctctgacatttctgacatttctgacatttctgacatttctgacatttctgacatttctgacatttctgacatttctgatttgcaaccatactccccccggaaccacatttctgacatttctgacatttctgacatttctgacatttctgacatttctgacatttccgactcggaccgatg

SEQ ID NO: 17087 - DNA, 203 bp, Artificial sequence
  synthetic
ggcgcgccagtcctgtgagttaagtctgacatttctgacatttctgacatttctgacatttctgacatttctgacatttctgacatttctgacatttctgcaccacccacggaatcgagaaagagctacatttctgacatttctgacatttctgacatttctgacatttctgacatttctgacatttccgactcggaccgatg

SEQ ID NO: 17088 - DNA, 203 bp, Artificial sequence
  synthetic
ggcgcgccagtccttttggtcacgtctgacatttctgacatttctgacatttctgacatttctgacatttctgacatttctgacatttctgacatttctgccggcgggtacatttctgacatttctgacatttctgacatttctgacatttctgacatttctgacatttctgacatttcaccggccgtcgactcggaccgatg

SEQ ID NO: 17089 - DNA, 203 bp, Artificial sequence
  synthetic
ggcgcgccagtcctgtcactaccctctgacatttctgacatttctgacatttctgacatttctgacatttctgacatttctgacatttctgacatttctgctttgcaaccatactccccccggaaccccatttctgacatttctgacatttctgacatttctgacatttctgacatttctgacatttccgactcggaccgatg

SEQ ID NO: 17090 - DNA, 203 bp, Artificial sequence
  synthetic
ggcgcgccagtcctaacgagaccctctgacatttctgacatttctgacatttctgacatttctgacatttctgacatttctgacatttctgacatttctgtactccctgacatttctgacatttctgacatttctgacatttctgacatttctgacatttctgacatttctgacattttcttggcaaacgactcggaccgatg

SEQ ID NO: 17091 - DNA, 203 bp, Artificial sequence
  synthetic
ggcgcgccagtcctatcatgaccctctgacatttctgacatttctgacatttctgacatttctgacatttctgacatttctgacatttctgacatttctgttcttggcaaaatttctgacatttctgacatttctgacatttctgacatttctgacatttctgacatttctgacatttctgacatttccgactcggaccgatg

SEQ ID NO: 17092 - DNA, 203 bp, Artificial sequence
  synthetic
ggcgcgccagtcctggcaggaccctctgacatttctgacatttctgacatttctgacatttctgacatttctgacatttctgacatttctgacatttcttcttggcaaaacatttctgacatttctgacatttctgacatttctgacatttctgacatttctgacatttctgacatttcaccggccgtcgactcggaccgatg

SEQ ID NO: 17093 - DNA, 203 bp, Artificial sequence
  synthetic
ggcgcgccagtcctcctttgaccctctgacatttctgacatttctgacatttctgacatttctgacatttctgacatttctgacatttctgacatttcttgcccttccgtcaattcctttaagtttcagatttctgacatttctgacatttctgacatttctgacatttctgacatttctgacatttccgactcggaccgatg

SEQ ID NO: 17094 - DNA, 203 bp, Artificial sequence
  synthetic
ggcgcgccagtcctgggttaagtgtctgacatttctgacatttctgacatttctgacatttctgacatttctgacatttctgacatttctgacattttactcccttctgacatttctgacatttctgacatttctgacatttctgacatttctgacatttctgacatttctgacatttctgacatttccgactcggaccgatg

SEQ ID NO: 17095 - DNA, 203 bp, Artificial sequence
  synthetic
ggcgcgccagtcctgggtgacctctctgacatttctgacatttctgacatttctgacatttctgacatttctgacatttctgacatttctgacattttactcccttctgacatttctgacatttctgacatttctgacatttctgacatttctgacatttctgacatttctgacatttctgtactccccgactcggaccgatg

SEQ ID NO: 17096 - DNA, 203 bp, Artificial sequence
  synthetic
ggcgcgccagtcctgggtagcctgtctgacatttctgacatttctgacatttctgacatttctgacatttctgacatttctgacatttctgacattttactcccttctgacatttctgacatttctgacatttctgacatttctgacatttctgacatttctgacatttctgaccacggaatcgagaacgactcggaccgatg

SEQ ID NO: 17097 - DNA, 203 bp, Artificial sequence
  synthetic
ggcgcgccagtcctcctgcacttctctgacatttctgacatttctgacatttctgacatttctgacatttctgacatttctgacatttctgacattttcttggcaaatgacatttctgacatttctgacatttctgacatttctgacatttctgacatttctgacatttctgacattttcttggcaaacgactcggaccgatg

SEQ ID NO: 17098 - DNA, 203 bp, Artificial sequence
  synthetic
ggcgcgccagtccttactagcgtgtctgacatttctgacatttctgacatttctgacatttctgacatttctgacatttctgacatttctgacatttttaatgaaaacattcttggcaaatgctttcgctcttctgacatttctgacatttctgacatttctgacatttctgacatttctgacatttccgactcggaccgatg

SEQ ID NO: 17099 - DNA, 203 bp, Artificial sequence
  synthetic
ggcgcgccagtcctgcagtgactttctgacatttctgacatttctgacatttctgacatttctgacatttctgacatttctgacatttctgaccacggaatcgagaatgacatttctgacatttctgacatttctgacatttctgacatttctgacatttctgacatttctgacattttcttggcaaacgactcggaccgatg

SEQ ID NO: 17100 - DNA, 203 bp, Artificial sequence
  synthetic
ggcgcgccagtcctgggttgactttctgacatttctgacatttctgacatttctgacatttctgacatttctgacatttctgacatttctgaccatgcaccaccacccacggaatcgagaaagagctatcaatctgacatttctgacatttctgacatttctgacatttctgacatttctgacatttccgactcggaccgatg

SEQ ID NO: 17101 - DNA, 203 bp, Artificial sequence
  synthetic
ggcgcgccagtcctggctaagtcatctgacatttctgacatttctgacatttctgacatttctgacatttctgacatttctgacatttctgacggtttcccggaagctgcccggcgggtcatgggaataacgccggacatttctgacatttctgacatttctgacatttctgacatttctgacatttccgactcggaccgatg

SEQ ID NO: 17102 - DNA, 203 bp, Artificial sequence
  synthetic
ggcgcgccagtccttggcaagtcatctgacatttctgacatttctgacatttctgacatttctgacatttctgacatttctgacatttctgactggtggtgcccttccgtcaattcctttaagtttcagctttgcaacatttctgacatttctgacatttctgacatttctgacatttctgacatttccgactcggaccgatg

SEQ ID NO: 17103 - DNA, 203 bp, Artificial sequence
  synthetic
ggcgcgccagtccttgttgacttgtctgacatttctgacatttctgacatttctgacatttctgacatttctgacatttctgacatttctgacttcttggcaaattctgacatttctgacatttctgacatttctgacatttctgacatttctgacatttctgacatttctgacatttctgacatttccgactcggaccgatg

SEQ ID NO: 17104 - DNA, 203 bp, Artificial sequence
  synthetic
ggcgcgccagtcctaagtcaggcctctgacatttctgacatttctgacatttctgacatttctgacatttctgacatttctgacatttctgacttcttggcaaattctgacatttctgacatttctgacatttctgacatttctgacatttctgacatttctgacatttctgaccacggaatcgagaacgactcggaccgatg

SEQ ID NO: 17105 - DNA, 203 bp, Artificial sequence
  synthetic
ggcgcgccagtcctacgatctttatctgacatttctgacatttctgacatttctgacatttctgacatttctgacatttctgacatttctgatggtttcccggaagctgcccggcgggtcatgggaataacgccgcacatttctgacatttctgacatttctgacatttctgacatttctgacatttccgactcggaccgatg

SEQ ID NO: 17106 - DNA, 203 bp, Artificial sequence
  synthetic
ggcgcgccagtccttttgcacacctctgacatttctgacatttctgacatttctgacatttctgacatttctgacatttctgacatttctgccggcgggtacatttctgacatttctgacatttctgacatttctgacatttctgacatttctgacatttctgacatttctgacattttcttggcaaacgactcggaccgatg

SEQ ID NO: 17107 - DNA, 203 bp, Artificial sequence
  synthetic
ggcgcgccagtccttgcacactactctgacatttctgacatttctgacatttctgacatttctgacatttctgacatttctgacatttctgcctggtggtgcccttccgtcaattcctttaagtttcagctttgcaacatttctgacatttctgacatttctgacatttctgacatttctgacatttccgactcggaccgatg

SEQ ID NO: 17108 - DNA, 203 bp, Artificial sequence
  synthetic
ggcgcgccagtcctgtctggtttatctgacatttctgacatttctgacatttctgacatttctgacatttctgacatttctgacatttctgcgcaaactgacatttctgcgcaaactgacatttctgcgcaaactgacatttctgcgcaaactgacatttctgcgcaaactgacatttctgacatttccgactcggaccgatg

SEQ ID NO: 17109 - DNA, 203 bp, Artificial sequence
  synthetic
ggcgcgccagtcctaaagtatgaatctgacatttctgacatttctgacatttctgacatttctgacatttctgacatttctgacatttctgtgcaaactgacatttctgtgcaaactgacatttctgtgcaaactgacatttctgtgcaaactgacatttctgtgcaaactgacatttctgacatttccgactcggaccgatg

SEQ ID NO: 17110 - DNA, 203 bp, Artificial sequence
  synthetic
ggcgcgccagtccttaagtatgggtctgacatttctgacatttctgacatttctgacatttctgacatttctgacatttctgacatttctgttcttggcaaaatttctgacatttctgacatttctgacatttctgacatttctgacatttctgacatttctgacatttctgacatttcaccggccgtcgactcggaccgatg

SEQ ID NO: 17111 - DNA, 203 bp, Artificial sequence
  synthetic
ggcgcgccagtcctacgacagatatctgacatttctgacatttctgacatttctgacatttctgacatttctgacatttctgacatttcttagcaaactgacatttcttagcaaactgacatttcttagcaaactgacatttcttagcaaactgacatttcttagcaaactgacatttctgacatttccgactcggaccgatg

SEQ ID NO: 17112 - DNA, 203 bp, Artificial sequence
  synthetic
ggcgcgccagtcctgtttgtatcctctgacatttctgacatttctgacatttctgacatttctgacatttctgacatttctgacatttcttcctggtggtgcccttccgtcaattcctttaagtttcagctttgcaacatttctgacatttctgacatttctgacatttctgacatttctgacatttccgactcggaccgatg

SEQ ID NO: 17113 - DNA, 203 bp, Artificial sequence
  synthetic
ggcgcgccagtccttttagagacctctgacatttctgacatttctgacatttctgacatttctgacatttctgacatttctgacatttcttcgcaaactgacatttcttcgcaaactgacatttcttcgcaaactgacatttcttcgcaaactgacatttcttcgcaaactgacatttctgacatttccgactcggaccgatg

SEQ ID NO: 17114 - DNA, 203 bp, Artificial sequence
  synthetic
ggcgcgccagtccttgaacatacctctgacatttctgacatttctgacatttctgacatttctgacatttctgacatttctgacatttcttgaaaaactgacatttcttgaaaaactgacatttcttgaaaaactgacatttcttgaaaaactgacatttcttgaaaaactgacatttctgacatttccgactcggaccgatg

SEQ ID NO: 17115 - DNA, 203 bp, Artificial sequence
  synthetic
ggcgcgccagtcctgatacttacctctgacatttctgacatttctgacatttctgacatttctgacatttctgacatttctgacatttcttgagaaactgacatttcttgagaaactgacatttcttgagaaactgacatttcttgagaaactgacatttcttgagaaactgacatttctgacatttccgactcggaccgatg

SEQ ID NO: 17116 - DNA, 203 bp, Artificial sequence
  synthetic
ggcgcgccagtccttactgtaacctctgacatttctgacatttctgacatttctgacatttctgacatttctgacatttctgacatttcttgcaaaactgacatttcttgcaaaactgacatttcttgcaaaactgacatttcttgcaaaactgacatttcttgcaaaactgacatttctgacatttccgactcggaccgatg

SEQ ID NO: 17117 - DNA, 203 bp, Artificial sequence
  synthetic
ggcgcgccagtcctaaacagatcctctgacatttctgacatttctgacatttctgacatttctgacatttctgacatttctgacatttcttggcaaactgacatttctgacatttctgacatttctgacatttctgacatttctgacatttctgacatttctgacatttctgaccacggaatcgagaacgactcggaccgatg

SEQ ID NO: 17118 - DNA, 203 bp, Artificial sequence
  synthetic
ggcgcgccagtcctggtaacgaattctgacatttctgacatttctgacatttctgacatttctgacatttctgacatttctgacatttcttggcaaactgacatttctgacatttctgacatttcttggcaaactgacatttctgacatttctgacatttctgacatttctgacatttctgacatttccgactcggaccgatg

SEQ ID NO: 17119 - DNA, 203 bp, Artificial sequence
  synthetic
ggcgcgccagtcctggtaagaatctctgacatttctgacatttctgacatttctgacatttctgacatttctgacatttctgacatttcttggcaaactgacatttctgacatttctgacatttcttggcaaactgacatttcttggcaaactgacatttcttggcaaactgacatttctgacatttccgactcggaccgatg

SEQ ID NO: 17120 - DNA, 203 bp, Artificial sequence
  synthetic
ggcgcgccagtcctggttcatgtatctgacatttctgacatttctgacatttctgacatttctgacatttctgacatttctgacatttcttggcaaactgacatttcttggcaaactgacatttctgacatttctgacatttctgacatttctgacatttctgacatttctgacatttctgacatttccgactcggaccgatg

SEQ ID NO: 17121 - DNA, 203 bp, Artificial sequence
  synthetic
ggcgcgccagtcctatgtgatctatctgacatttctgacatttctgacatttctgacatttctgacatttctgacatttctgacatttcttggcaaactgacatttcttggcaaactgacatttcttggcaaactgacatttcttggcaaactgacatttcttggcaaactgacatttcttggcaaaccgactcggaccgatg

SEQ ID NO: 17122 - DNA, 203 bp, Artificial sequence
  synthetic
ggcgcgccagtcctggcttcaccctctgacatttctgacatttctgacatttctgacatttctgacatttctgacatttctgacatttcttggcaacctgacatttcttggcaacctgacatttcttggcaacctgacatttcttggcaacctgacatttcttggcaacctgacatttctgacatttccgactcggaccgatg

SEQ ID NO: 17123 - DNA, 203 bp, Artificial sequence
  synthetic
ggcgcgccagtcctgttcacccactctgacatttctgacatttctgacatttctgacatttctgacatttctgacatttctgacatttcttggcaagctgacatttcttggcaagctgacatttcttggcaagctgacatttcttggcaagctgacatttcttggcaagctgacatttctgacatttccgactcggaccgatg

SEQ ID NO: 17124 - DNA, 203 bp, Artificial sequence
  synthetic
ggcgcgccagtcctagagttaacgtctgacatttctgacatttctgacatttctgacatttctgacatttctgacatttctgacatttcttggcaatctgacatttcttggcaatctgacatttcttggcaatctgacatttcttggcaatctgacatttcttggcaatctgacatttctgacatttccgactcggaccgatg

SEQ ID NO: 17125 - DNA, 203 bp, Artificial sequence
  synthetic
ggcgcgccagtcctgaaacctagatctgacatttctgacatttctgacatttctgacatttctgacatttctgacatttctgacatttcttggcacactgacatttcttggcacactgacatttcttggcacactgacatttcttggcacactgacatttcttggcacactgacatttctgacatttccgactcggaccgatg

SEQ ID NO: 17126 - DNA, 203 bp, Artificial sequence
  synthetic
ggcgcgccagtcctaacctagcagtctgacatttctgacatttctgacatttctgacatttctgacatttctgacatttctgacatttcttggcaccctgacatttcttggcaccctgacatttcttggcaccctgacatttcttggcaccctgacatttcttggcaccctgacatttctgacatttccgactcggaccgatg

SEQ ID NO: 17127 - DNA, 203 bp, Artificial sequence
  synthetic
ggcgcgccagtcctagcaacctagtctgacatttctgacatttctgacatttctgacatttctgacatttctgacatttctgacatttcttggcactctgacatttcttggcactctgacatttcttggcactctgacatttcttggcactctgacatttcttggcactctgacatttctgacatttccgactcggaccgatg

SEQ ID NO: 17128 - DNA, 203 bp, Artificial sequence
  synthetic
ggcgcgccagtccttaaccgagcctctgacatttctgacatttctgacatttctgacatttctgacatttctgacatttctgacatttcttggcagactgacatttcttggcagactgacatttcttggcagactgacatttcttggcagactgacatttcttggcagactgacatttctgacatttccgactcggaccgatg

SEQ ID NO: 17129 - DNA, 203 bp, Artificial sequence
  synthetic
ggcgcgccagtcctcgcaagttgctctgacatttctgacatttctgacatttctgacatttctgacatttctgacatttctgacatttcttggcaggctgacatttcttggcaggctgacatttcttggcaggctgacatttcttggcaggctgacatttcttggcaggctgacatttctgacatttccgactcggaccgatg

SEQ ID NO: 17130 - DNA, 203 bp, Artificial sequence
  synthetic
ggcgcgccagtcctgcaacttgcgtctgacatttctgacatttctgacatttctgacatttctgacatttctgacatttctgacatttcttggcagtctgacatttcttggcagtctgacatttcttggcagtctgacatttcttggcagtctgacatttcttggcagtctgacatttctgacatttccgactcggaccgatg

SEQ ID NO: 17131 - DNA, 203 bp, Artificial sequence
  synthetic
ggcgcgccagtcctagcaggacgttctgacatttctgacatttctgacatttctgacatttctgacatttctgacatttctgacatttcttggcatgctgacatttcttggcatgctgacatttcttggcatgctgacatttcttggcatgctgacatttcttggcatgctgacatttctgacatttccgactcggaccgatg

SEQ ID NO: 17132 - DNA, 203 bp, Artificial sequence
  synthetic
ggcgcgccagtcctgacgtccaactctgacatttctgacatttctgacatttctgacatttctgacatttctgacatttctgacatttcttggccaactgacatttcttggccaactgacatttcttggccaactgacatttcttggccaactgacatttcttggccaactgacatttctgacatttccgactcggaccgatg

SEQ ID NO: 17133 - DNA, 203 bp, Artificial sequence
  synthetic
ggcgcgccagtcctcgacgtcctgtctgacatttctgacatttctgacatttctgacatttctgacatttctgacatttctgacatttcttggcccactgacatttcttggcccactgacatttcttggcccactgacatttcttggcccactgacatttcttggcccactgacatttctgacatttccgactcggaccgatg

SEQ ID NO: 17134 - DNA, 203 bp, Artificial sequence
  synthetic
ggcgcgccagtcctaagacgtccttctgacatttctgacatttctgacatttctgacatttctgacatttctgacatttctgacatttcttggccgactgacatttcttggccgactgacatttcttggccgactgacatttcttggccgactgacatttcttggccgactgacatttctgacatttccgactcggaccgatg

SEQ ID NO: 17135 - DNA, 203 bp, Artificial sequence
  synthetic
ggcgcgccagtcctgaggacgtcttctgacatttctgacatttctgacatttctgacatttctgacatttctgacatttctgacatttcttggcgaactgacatttcttggcgaactgacatttcttggcgaactgacatttcttggcgaactgacatttcttggcgaactgacatttctgacatttccgactcggaccgatg

SEQ ID NO: 17136 - DNA, 203 bp, Artificial sequence
  synthetic
ggcgcgccagtcctggacgtttcgtctgacatttctgacatttctgacatttctgacatttctgacatttctgacatttctgacatttcttggcgcactgacatttcttggcgcactgacatttcttggcgcactgacatttcttggcgcactgacatttcttggcgcactgacatttctgacatttccgactcggaccgatg

SEQ ID NO: 17137 - DNA, 203 bp, Artificial sequence
  synthetic
ggcgcgccagtcctggtagtaggctctgacatttctgacatttctgacatttctgacatttctgacatttctgacatttctgacatttcttggctcactgacatttcttggctcactgacatttcttggctcactgacatttcttggctcactgacatttcttggctcactgacatttctgacatttccgactcggaccgatg

SEQ ID NO: 17138 - DNA, 203 bp, Artificial sequence
  synthetic
ggcgcgccagtccttggattcacgtctgacatttctgacatttctgacatttctgacatttctgacatttctgacatttctgacatttcttgggaaactgacatttcttgggaaactgacatttcttgggaaactgacatttcttgggaaactgacatttcttgggaaactgacatttctgacatttccgactcggaccgatg

SEQ ID NO: 17139 - DNA, 203 bp, Artificial sequence
  synthetic
ggcgcgccagtcctcgtgaatacgtctgacatttctgacatttctgacatttctgacatttctgacatttctgacatttctgacatttcttgtgaaactgacatttcttgtgaaactgacatttcttgtgaaactgacatttcttgtgaaactgacatttcttgtgaaactgacatttctgacatttccgactcggaccgatg

SEQ ID NO: 17140 - DNA, 203 bp, Artificial sequence
  synthetic
ggcgcgccagtcctgtgcgaatactctgacatttctgacatttctgacatttctgacatttctgacatttctgacatttctgacatttggcgggtttctgacatttggcgggtttctgacatttggcgggtttctgacatttggcgggtttctgacatttggcgggtttctgacatttctgacatttccgactcggaccgatg

SEQ ID NO: 17141 - DNA, 203 bp, Artificial sequence
  synthetic
ggcgcgccagtcctagcgaatgtctctgacatttctgacatttctgacatttctgacatttctgacatttctgacatttctgacattttactcccttctgacatttctgacatttctgacatttctgacatttctgacatttctgacatttctgacatttctgacatttctgacatttcccggcgggtcgactcggaccgatg

SEQ ID NO: 17142 - DNA, 203 bp, Artificial sequence
  synthetic
ggcgcgccagtcctaggctgcgaatctgacatttctgacatttctgacatttctgacatttctgacatttctgacatttctgacattttatggcaaactgacattttatggcaaactgacattttatggcaaactgacattttatggcaaactgacattttatggcaaactgacatttctgacatttccgactcggaccgatg

SEQ ID NO: 17143 - DNA, 203 bp, Artificial sequence
  synthetic
ggcgcgccagtccttctgcgaagctctgacatttctgacatttctgacatttctgacatttctgacatttctgacatttctgacattttgccaagaactgacattttgccaagaactgacattttgccaagaactgacattttgccaagaactgacattttgccaagaactgacatttctgacatttccgactcggaccgatg

SEQ ID NO: 17144 - DNA, 203 bp, Artificial sequence
  synthetic
ggcgcgccagtccttgcttgcgaatctgacatttctgacatttctgacatttctgacatttctgacatttctgacatttctgacccggcgggtatttctgacatttctgacatttctgacatttctgacatttctgacatttctgacatttctgacatttctgacatttctgacattttcttggcaaacgactcggaccgatg

SEQ ID NO: 17145 - DNA, 203 bp, Artificial sequence
  synthetic
ggcgcgccagtcctactgcgaaaatctgacatttctgacatttctgacatttctgacatttctgacatttctgacatttctgacctccactcctggtggtgcccttccgtcaattcctttaagtttcagctttgcaaccatactgacatttctgacatttctgacatttctgacatttctgacatttccgactcggaccgatg

SEQ ID NO: 17146 - DNA, 203 bp, Artificial sequence
  synthetic
ggcgcgccagtccttggcgaagtctctgacatttctgacatttctgacatttctgacatttctgacatttctgacatttctgacgtcaattcctttactgacatttctgacatttctgacatttctgacatttctgacatttctgacatttctgacatttctgacatttctgacatttctgacatttccgactcggaccgatg

SEQ ID NO: 17147 - DNA, 203 bp, Artificial sequence
  synthetic
ggcgcgccagtcctaagcgaaaattctgacatttctgacatttctgacatttctgacatttctgacatttctgacatttctgacgtcaattcctttactgacatttctgacatttctgacatttctgacatttctgacatttctgacatttctgacatttctgacatttctgaccgtcaattcctttacgactcggaccgatg

SEQ ID NO: 17148 - DNA, 203 bp, Artificial sequence
  synthetic
ggcgcgccagtcctggttcgctcttctgacatttctgacatttctgacatttctgacatttctgacatttctgacatttctgacttcctttaagtttcagctttgcaaccatactccccccggaacccaaagactttggtttccgacatttctgacatttctgacatttctgacatttctgacatttccgactcggaccgatg

SEQ ID NO: 17149 - DNA, 203 bp, Artificial sequence
  synthetic
ggcgcgccagtcctaagttcgcagtctgacatttctgacatttctgacatttctgacatttctgacatttctgacatttctgacttcttggcaaattctgacatttctgacatttctgacatttctgacatttctgacatttctgacatttctgacatttctgacatttctgacatttcaccggccgtcgactcggaccgatg

SEQ ID NO: 17150 - DNA, 203 bp, Artificial sequence
  synthetic
ggcgcgccagtcctacgctttcgctctgacatttctgacatttctgacatttctgacatttctgacatttctgacatttctgatactcccgacatttctgacatttctgacatttctgacatttctgacatttctgacatttctgacatttctgacatttctgacatttctgacatttctgtactccccgactcggaccgatg

SEQ ID NO: 17151 - DNA, 203 bp, Artificial sequence
  synthetic
ggcgcgccagtcctaggattcgcttctgacatttctgacatttctgacatttctgacatttctgacatttctgacatttctggactttcgttcttgattaatgaaaacattcttggcaaatgctttcgctctggtccgtcttgcgccatttctgacatttctgacatttctgacatttctgacatttccgactcggaccgatg

SEQ ID NO: 17152 - DNA, 203 bp, Artificial sequence
  synthetic
ggcgcgccagtcctctgcttcgcctctgacatttctgacatttctgacatttctgacatttctgacatttctgacatttctgggctccactcctggtggtgcccttccgtcaattcctttaagtttcagctttgcaaccatactcccatttctgacatttctgacatttctgacatttctgacatttccgactcggaccgatg

SEQ ID NO: 17153 - DNA, 203 bp, Artificial sequence
  synthetic
ggcgcgccagtcctatttcgctcgtctgacatttctgacatttctgacatttctgacatttctgacatttctgacatttcttactcccctgacatttctgacatttctgacatttctgacatttctgacatttctgacatttctgacatttctgacatttctgacatttctgacatttcaccggccgtcgactcggaccgatg

SEQ ID NO: 17154 - DNA, 203 bp, Artificial sequence
  synthetic
ggcgcgccagtcctctctttcgcatctgacatttctgacatttctgacatttctgacatttctgacatttctgacatttcttggcaaactgacatttctgacatttctgacatttctgacatttctgacatttctgacatttctgacatttctgacatttctgacatttctgacatttcaccggccgtcgactcggaccgatg

SEQ ID NO: 17155 - DNA, 203 bp, Artificial sequence
  synthetic
ggcgcgccagtcctggtcattcgctctgacatttctgacatttctgacatttctgacatttctgacatttctgacatttcttggcaaactgacatttctgacatttctgacatttctgacatttctgacatttctgacatttctgacatttctgacatttctgacatttctgacatttcccggcgggtcgactcggaccgatg

SEQ ID NO: 17156 - DNA, 203 bp, Artificial sequence
  synthetic
ggcgcgccagtcctggatttcgcttctgacatttctgacatttctgacatttctgacatttctgacatttctgacattttactcccttctgacatttctgacatttctgacatttctgacatttctgacatttctgacatttctgacatttctgacatttctgacatttctgacattttcttggcaaacgactcggaccgatg

SEQ ID NO: 17157 - DNA, 203 bp, Artificial sequence
  synthetic
ggcgcgccagtcctcttcgctagttctgacatttctgacatttctgacatttctgacatttctgacatttctgacattttccgactttcgttcttgattaatgaaaacattcttggcaaatgctttcgctctggtccgtcttgcgccggttctgacatttctgacatttctgacatttctgacatttccgactcggaccgatg

SEQ ID NO: 17158 - DNA, 203 bp, Artificial sequence
  synthetic
ggcgcgccagtcctaatgcaagtgtctgacatttctgacatttctgacatttctgacatttctgacatttctgacatttttcttggcaaagacatttctgacatttctgacatttctgacatttctgacatttctgacatttctgacatttctgacatttctgacatttctgacatttctgtactccccgactcggaccgatg

SEQ ID NO: 17159 - DNA, 203 bp, Artificial sequence
  synthetic
ggcgcgccagtcctttgtcatgggtctgacatttctgacatttctgacatttctgacatttctgacatttctgacatttttcttggcaaagacatttctgacatttctgacatttctgacatttctgacatttctgacatttctgacatttctgacatttctgacatttctgaccgtcaattcctttacgactcggaccgatg

SEQ ID NO: 17160 - DNA, 203 bp, Artificial sequence
  synthetic
ggcgcgccagtcctgtgacgttcttctgacatttctgacatttctgacatttctgacatttctgacatttctgacccggaacccaaagactttggtttcccggaagctgcccggcgggtcatgggaataacgccgccgcatcgccggtcggcagacatttctgacatttctgacatttctgacatttccgactcggaccgatg

SEQ ID NO: 17161 - DNA, 203 bp, Artificial sequence
  synthetic
ggcgcgccagtcctgagcgtaagctctgacatttctgacatttctgacatttctgacatttctgacatttctgaccggcgggtcatttctgacatttctgacatttctgacatttctgacatttctgacatttctgacatttctgacatttctgacatttctgacatttctgacatttctgtactccccgactcggaccgatg

SEQ ID NO: 17162 - DNA, 203 bp, Artificial sequence
  synthetic
ggcgcgccagtcctgctttacgcctctgacatttctgacatttctgacatttctgacatttctgacatttctgaccggcgggtcatttctgacatttctgacatttctgacatttctgacatttctgacatttctgacatttctgacatttctgacatttctgacatttctgaccgtcaattcctttacgactcggaccgatg

SEQ ID NO: 17163 - DNA, 203 bp, Artificial sequence
  synthetic
ggcgcgccagtcctcttacgctcttctgacatttctgacatttctgacatttctgacatttctgacatttctgacgtcaattcctttactgacatttctgacatttctgacatttctgacatttctgacatttctgacatttctgacatttctgacatttctgacatttctgacatttcaccggccgtcgactcggaccgatg

SEQ ID NO: 17164 - DNA, 203 bp, Artificial sequence
  synthetic
ggcgcgccagtccttcttacgccatctgacatttctgacatttctgacatttctgacatttctgacatttctgacgtcaattcctttactgacatttctgacatttctgacatttctgacatttctgacatttctgacatttctgacatttctgacatttctgacatttctgacatttcccggcgggtcgactcggaccgatg

SEQ ID NO: 17165 - DNA, 203 bp, Artificial sequence
  synthetic
ggcgcgccagtcctcccgaaatggtctgacatttctgacatttctgacatttctgacatttctgacatttctgacttccgtcaattcctttaagtttcagctttgcaaccatactccccccggaacccaaagactttggtttcccggaagctgcacatttctgacatttctgacatttctgacatttccgactcggaccgatg

SEQ ID NO: 17166 - DNA, 203 bp, Artificial sequence
  synthetic
ggcgcgccagtcctagaattcgggtctgacatttctgacatttctgacatttctgacatttctgacatttctgacttccgtcaattcctttaagtttcagctttgcaaccatactccccccggaacccaaagactttggtttcccggaagctggacatttctgacatttctgacatttctgacatttccgactcggaccgatg

SEQ ID NO: 17167 - DNA, 203 bp, Artificial sequence
  synthetic
ggcgcgccagtcctaatgacatgatctgacatttctgacatttctgacatttctgacatttctgacatttctgatactcccgacatttctgacatttctgacatttctgacatttctgacatttctgacatttctgacatttctgacatttctgacatttctgacatttctgacatttcccggcgggtcgactcggaccgatg

SEQ ID NO: 17168 - DNA, 203 bp, Artificial sequence
  synthetic
ggcgcgccagtccttgctgtgttctctgacatttctgacatttctgacatttctgacatttctgacatttctgatccaccaactaagaacggccatgcaccaccacccacggaatcgagaaagagctatcaatctgtcaatcctgtccgtgtccacatttctgacatttctgacatttctgacatttccgactcggaccgatg

SEQ ID NO: 17169 - DNA, 203 bp, Artificial sequence
  synthetic
ggcgcgccagtcctctcgtgttggtctgacatttctgacatttctgacatttctgacatttctgacatttctgcgaacctccgactttcgttcttgattaatgaaaacattcttggcaaatgctttcgctctggtccgtcttgcgccggtccaagcatttctgacatttctgacatttctgacatttccgactcggaccgatg

SEQ ID NO: 17170 - DNA, 203 bp, Artificial sequence
  synthetic
ggcgcgccagtcctaacacgatcgtctgacatttctgacatttctgacatttctgacatttctgacatttctgctccaccaactaagaacggccatgcaccaccacccacggaatcgagaaagagctatcaatctgtcaatcctgtccgtgtccggatttctgacatttctgacatttctgacatttccgactcggaccgatg

SEQ ID NO: 17171 - DNA, 203 bp, Artificial sequence
  synthetic
ggcgcgccagtcctagacctaaggtctgacatttctgacatttctgacatttctgacatttctgacatttcttcgaacctccgactttcgttcttgattaatgaaaacattcttggcaaatgctttcgctctggtccgtcttgcgccggtccaagaatttctgacatttctgacatttctgacatttccgactcggaccgatg

SEQ ID NO: 17172 - DNA, 203 bp, Artificial sequence
  synthetic
ggcgcgccagtccttggctgattttctgacatttctgacatttctgacatttctgacatttctgacatttcttggcaaactgacatttctgacatttctgacatttctgacatttctgacatttctgacatttctgacatttcttggcaaactgacatttctgacatttctgacatttctgacatttccgactcggaccgatg

SEQ ID NO: 17173 - DNA, 203 bp, Artificial sequence
  synthetic
ggcgcgccagtccttggcagaccatctgacatttctgacatttctgacatttctgacatttctgacatttcttggcaaactgacatttctgacatttctgacatttctgacatttctgacatttcttggcaaactgacatttcttggcaaactgacatttcttggcaaactgacatttctgacatttccgactcggaccgatg

SEQ ID NO: 17174 - DNA, 203 bp, Artificial sequence
  synthetic
ggcgcgccagtcctctttcagccttctgacatttctgacatttctgacatttctgacatttctgacatttcttggcaaactgacatttctgacatttctgacatttcttggcaaactgacatttctgacatttctgacatttctgacatttctgacatttcttggcaaactgacatttctgacatttccgactcggaccgatg

SEQ ID NO: 17175 - DNA, 203 bp, Artificial sequence
  synthetic
ggcgcgccagtcctacctcagccatctgacatttctgacatttctgacatttctgacatttctgacatttcttggcaaactgacatttctgacatttctgacatttcttggcaaactgacatttctgacatttctgacatttcttggcaaactgacatttcttggcaaactgacatttctgacatttccgactcggaccgatg

SEQ ID NO: 17176 - DNA, 203 bp, Artificial sequence
  synthetic
ggcgcgccagtcctgcactgcacctctgacatttctgacatttctgacatttctgacatttctgacatttcttggcaaactgacatttctgacatttctgacatttcttggcaaactgacatttcttggcaaactgacatttctgacatttctgacatttctgacatttctgacatttctgacatttccgactcggaccgatg

SEQ ID NO: 17177 - DNA, 203 bp, Artificial sequence
  synthetic
ggcgcgccagtcctgtaagtcatgtctgacatttctgacatttctgacatttctgacatttctgacatttcttggcaaactgacatttctgacatttctgacatttcttggcaaactgacatttcttggcaaactgacatttctgacatttctgacatttcttggcaaactgacatttctgacatttccgactcggaccgatg

SEQ ID NO: 17178 - DNA, 203 bp, Artificial sequence
  synthetic
ggcgcgccagtcctagaaccttgctctgacatttctgacatttctgacatttctgacatttctgacatttcttggcaaactgacatttctgacatttctgacatttcttggcaaactgacatttcttggcaaactgacatttcttggcaaactgacatttctgacatttctgacatttctgacatttccgactcggaccgatg

SEQ ID NO: 17179 - DNA, 203 bp, Artificial sequence
  synthetic
ggcgcgccagtcctagaacctgtgtctgacatttctgacatttctgacatttctgacatttctgacatttcttggcaaactgacatttcttggcaaactgacatttctgacatttctgacatttctgacatttctgacatttctgacatttctgacatttctgacatttctgacatttctgacatttccgactcggaccgatg

SEQ ID NO: 17180 - DNA, 203 bp, Artificial sequence
  synthetic
ggcgcgccagtcctgaccgaaacatctgacatttctgacatttctgacatttctgacatttctgacatttcttggcaaactgacatttcttggcaaactgacatttctgacatttctgacatttcttggcaaactgacatttcttggcaaactgacatttctgacatttctgacatttctgacatttccgactcggaccgatg

SEQ ID NO: 17181 - DNA, 203 bp, Artificial sequence
  synthetic
ggcgcgccagtcctgttgatcctttctgacatttctgacatttctgacatttctgacatttctgacatttcttggcaaactgacatttcttggcaaactgacatttctgacatttctgacatttcttggcaaactgacatttcttggcaaactgacatttcttggcaaactgacatttctgacatttccgactcggaccgatg

SEQ ID NO: 17182 - DNA, 203 bp, Artificial sequence
  synthetic
ggcgcgccagtcctaaccgtgtattctgacatttctgacatttctgacatttctgacatttctgacatttcttggcaaactgacatttcttggcaaactgacatttcttggcaaactgacatttctgacatttctgacatttcttggcaaactgacatttctgacatttctgacatttctgacatttccgactcggaccgatg

SEQ ID NO: 17183 - DNA, 203 bp, Artificial sequence
  synthetic
ggcgcgccagtcctcgtgtacccatctgacatttctgacatttctgacatttctgacatttctgacatttcttggcaaactgacatttcttggcaaactgacatttcttggcaaactgacatttctgacatttctgacatttcttggcaaactgacatttcttggcaaactgacatttctgacatttccgactcggaccgatg

SEQ ID NO: 17184 - DNA, 203 bp, Artificial sequence
  synthetic
ggcgcgccagtcctcgtgtatctgtctgacatttctgacatttctgacatttctgacatttctgacatttctttaagccgcaggctccactcctggtggtgcccttccgtcaattcctttaagtttcagctttgcaaccatactccccccggaaccatttctgacatttctgacatttctgacatttccgactcggaccgatg

SEQ ID NO: 17185 - DNA, 203 bp, Artificial sequence
  synthetic
ggcgcgccagtcctgtcaacacgttctgacatttctgacatttctgacatttctgacatttctgacatttctttcttggcaaacatttctgacatttctgacatttctgacatttctgacatttctgacatttctgacatttctgacatttctgacatttctgacatttctgacatttctgtactccccgactcggaccgatg

SEQ ID NO: 17186 - DNA, 203 bp, Artificial sequence
  synthetic
ggcgcgccagtcctagtgttgatctctgacatttctgacatttctgacatttctgacatttctgacatttctttcttggcaaacatttctgacatttctgacatttctgacatttctgacatttctgacatttctgacatttctgacatttctgacatttctgacatttctgaccgtcaattcctttacgactcggaccgatg

SEQ ID NO: 17187 - DNA, 203 bp, Artificial sequence
  synthetic
ggcgcgccagtcctatgctgcttttctgacatttctgacatttctgacatttctgacatttctgacgtggtgcccttccgtcaattcctttaagtttcagctttgcaaccatactccccccggaacccaaagactttggtttcccggaagctgcccggcggggacatttctgacatttctgacatttccgactcggaccgatg

SEQ ID NO: 17188 - DNA, 203 bp, Artificial sequence
  synthetic
ggcgcgccagtccttgagtgcatgtctgacatttctgacatttctgacatttctgacatttctgatactcccgacatttctgacatttctgacatttctgacatttctgacatttctgacatttctgacatttctgacatttctgacatttctgacatttctgacatttctgacattttcttggcaaacgactcggaccgatg

SEQ ID NO: 17189 - DNA, 203 bp, Artificial sequence
  synthetic
ggcgcgccagtcctgctggacttttctgacatttctgacatttctgacatttctgacatttctgattcttggcaaatttctgacatttctgacatttctgacatttctgacatttctgacatttctgacatttctgacatttctgacatttctgacatttctgacatttctgaccgtcaattcctttacgactcggaccgatg

SEQ ID NO: 17190 - DNA, 203 bp, Artificial sequence
  synthetic
ggcgcgccagtcctgggtcccaactctgacatttctgacatttctgacatttctgacatttctgcaaaggaaccataactgatttaatgagccattcgcagtttcactgtaccggccgtgcgtactcagacatgcatggcttaatctttgagacaagcatatgccatttctgacatttctgacatttccgactcggaccgatg

SEQ ID NO: 17191 - DNA, 203 bp, Artificial sequence
  synthetic
ggcgcgccagtccttcccaaccgttctgacatttctgacatttctgacatttctgacatttctttcttggcaaacatttctgacatttctgacatttctgacatttctgacatttctgacatttctgacatttctgacatttctgacatttctgacatttctgacatttctgacatttcaccggccgtcgactcggaccgatg

SEQ ID NO: 17192 - DNA, 203 bp, Artificial sequence
  synthetic
ggcgcgccagtccttcccaggacttctgacatttctgacatttctgacatttctgacatttctttcttggcaaacatttctgacatttctgacatttctgacatttctgacatttctgacatttctgacatttctgacatttctgacatttctgacatttctgacatttctgacatttcccggcgggtcgactcggaccgatg

SEQ ID NO: 17193 - DNA, 203 bp, Artificial sequence
  synthetic
ggcgcgccagtcctcgtcccaacttctgacatttctgacatttctgacatttctgacatttgaccaaaggaaccataactgatttaatgagccattcgcagtttcactgtaccggccgtgcgtactcagacatgcatggcttaatctttgagacaagcatatgctacttctgacatttctgacatttccgactcggaccgatg

SEQ ID NO: 17194 - DNA, 203 bp, Artificial sequence
  synthetic
ggcgcgccagtcctatcccaaggatctgacatttctgacatttctgacatttctgacattttcctggtggtgcccttccgtcaattcctttaagtttcagctttgcaaccatactccccccggaacccaaagactttggtttcccggaagctgcccggcgggtcatgttctgacatttctgacatttccgactcggaccgatg

SEQ ID NO: 17195 - DNA, 203 bp, Artificial sequence
  synthetic
ggcgcgccagtcctttgggacctctctgacatttctgacatttctgacatttctgacgagcgaccaaaggaaccataactgatttaatgagccattcgcagtttcactgtaccggccgtgcgtactcagacatgcatggcttaatctttgagacaagcatatgctactggcgacatttctgacatttccgactcggaccgatg

SEQ ID NO: 17196 - DNA, 203 bp, Artificial sequence
  synthetic
ggcgcgccagtcctacctgggatatctgacatttctgacatttctgacatttctgacggtatctgatcgtcttcgaacctccgactttcgttcttgattaatgaaaacattcttggcaaatgctttcgctctggtccgtcttgcgccggtccaagaatttcacctctagcggccatttctgacatttccgactcggaccgatg

SEQ ID NO: 17197 - DNA, 203 bp, Artificial sequence
  synthetic
ggcgcgccagtcctctcatgggattctgacatttctgacatttctgacatttctgatccactcctggtggtgcccttccgtcaattcctttaagtttcagctttgcaaccatactccccccggaacccaaagactttggtttcccggaagctgcccggcgggtcatgggaatacatttctgacatttccgactcggaccgatg

SEQ ID NO: 17198 - DNA, 203 bp, Artificial sequence
  synthetic
ggcgcgccagtcctgcaacgctgatctgacatttctgacatttctgacatttctgcgtcaattcctttatctgacatttctgacatttctgacatttctgacatttctgacatttctgacatttctgacatttctgacatttctgacatttctgacatttctgacatttctgaccacggaatcgagaacgactcggaccgatg

SEQ ID NO: 17199 - DNA, 203 bp, Artificial sequence
  synthetic
ggcgcgccagtccttgtcgtgagctctgacatttctgacatttctgacatttctgctccactcctggtggtgcccttccgtcaattcctttaagtttcagctttgcaaccatactccccccggaacccaaagactttggtttcccggaagctgcccggcgggtcatgggaataaatttctgacatttccgactcggaccgatg

SEQ ID NO: 17200 - DNA, 203 bp, Artificial sequence
  synthetic
ggcgcgccagtcctacacgacgaatctgacatttctgacatttctgacatttctgtactccctgacatttctgacatttctgacatttctgacatttctgacatttctgacatttctgacatttctgacatttctgacatttctgacatttctgacatttctgacatttctgaccacggaatcgagaacgactcggaccgatg

SEQ ID NO: 17201 - DNA, 203 bp, Artificial sequence
  synthetic
ggcgcgccagtccttgcggttgcatctgacatttctgacatttctgacatttcttggcaaactgacatttctgacatttctgacatttctgacatttctgacatttcttggcaaactgacatttctgacatttctgacatttcttggcaaactgacatttcttggcaaactgacatttctgacatttccgactcggaccgatg

SEQ ID NO: 17202 - DNA, 203 bp, Artificial sequence
  synthetic
ggcgcgccagtcctgcggttaggttctgacatttctgacatttctgacatttcttggcaaactgacatttctgacatttctgacatttctgacatttctgacatttcttggcaaactgacatttcttggcaaactgacatttctgacatttctgacatttctgacatttctgacatttctgacatttccgactcggaccgatg

SEQ ID NO: 17203 - DNA, 203 bp, Artificial sequence
  synthetic
ggcgcgccagtcctgcggtttgcctctgacatttctgacatttctgacatttcttggcaaactgacatttctgacatttctgacatttctgacatttctgacatttcttggcaaactgacatttcttggcaaactgacatttcttggcaaactgacatttctgacatttctgacatttctgacatttccgactcggaccgatg

SEQ ID NO: 17204 - DNA, 203 bp, Artificial sequence
  synthetic
ggcgcgccagtcctagttagcggttctgacatttctgacatttctgacatttcttggcaaactgacatttctgacatttctgacatttcttggcaaactgacatttctgacatttctgacatttcttggcaaactgacatttctgacatttctgacatttctgacatttctgacatttctgacatttccgactcggaccgatg

SEQ ID NO: 17205 - DNA, 203 bp, Artificial sequence
  synthetic
ggcgcgccagtccttgagcggtattctgacatttctgacatttctgacatttcttggcaaactgacatttctgacatttctgacatttcttggcaaactgacatttctgacatttctgacatttcttggcaaactgacatttctgacatttctgacatttcttggcaaactgacatttctgacatttccgactcggaccgatg

SEQ ID NO: 17206 - DNA, 203 bp, Artificial sequence
  synthetic
ggcgcgccagtcctctagcggtgctctgacatttctgacatttctgacatttcttggcaaactgacatttctgacatttctgacatttcttggcaaactgacatttctgacatttctgacatttcttggcaaactgacatttcttggcaaactgacatttctgacatttctgacatttctgacatttccgactcggaccgatg

SEQ ID NO: 17207 - DNA, 203 bp, Artificial sequence
  synthetic
ggcgcgccagtcctcagcggtgattctgacatttctgacatttctgacatttcttggcaaactgacatttctgacatttctgacatttcttggcaaactgacatttctgacatttctgacatttcttggcaaactgacatttcttggcaaactgacatttcttggcaaactgacatttctgacatttccgactcggaccgatg

SEQ ID NO: 17208 - DNA, 203 bp, Artificial sequence
  synthetic
ggcgcgccagtcctctgagcggtctctgacatttctgacatttctgacatttcttggcaaactgacatttctgacatttctgacatttcttggcaaactgacatttcttggcaaactgacatttctgacatttctgacatttctgacatttctgacatttcttggcaaactgacatttctgacatttccgactcggaccgatg

SEQ ID NO: 17209 - DNA, 203 bp, Artificial sequence
  synthetic
ggcgcgccagtcctaagcggtacttctgacatttctgacatttctgacatttcttggcaaactgacatttctgacatttctgacatttcttggcaaactgacatttcttggcaaactgacatttctgacatttctgacatttcttggcaaactgacatttctgacatttctgacatttctgacatttccgactcggaccgatg

SEQ ID NO: 17210 - DNA, 203 bp, Artificial sequence
  synthetic
ggcgcgccagtccttagaccgcattctgacatttctgacatttctgacatttcttggcaaactgacatttctgacatttctgacatttcttggcaaactgacatttcttggcaaactgacatttcttggcaaactgacatttcttggcaaactgacatttcttggcaaactgacatttctgacatttccgactcggaccgatg

SEQ ID NO: 17211 - DNA, 203 bp, Artificial sequence
  synthetic
ggcgcgccagtcctggcctaccgctctgacatttctgacatttctgacatttcttggcaaactgacatttcttggcaaactgacatttctgacatttctgacatttctgacatttctgacatttctgacatttctgacatttctgacatttctgacatttctgacatttctgacatttctgacatttccgactcggaccgatg

SEQ ID NO: 17212 - DNA, 203 bp, Artificial sequence
  synthetic
ggcgcgccagtcctaccgcaagattctgacatttctgacatttctgacatttcttggcaaactgacatttcttggcaaactgacatttctgacatttctgacatttctgacatttctgacatttcttggcaaactgacatttctgacatttctgacatttctgacatttctgacatttctgacatttccgactcggaccgatg

SEQ ID NO: 17213 - DNA, 203 bp, Artificial sequence
  synthetic
ggcgcgccagtccttgagaccgcgtctgacatttctgacatttctgacatttcttggcaaactgacatttcttggcaaactgacatttctgacatttctgacatttctgacatttctgacatttcttggcaaactgacatttcttggcaaactgacatttctgacatttctgacatttctgacatttccgactcggaccgatg

SEQ ID NO: 17214 - DNA, 203 bp, Artificial sequence
  synthetic
ggcgcgccagtccttaccgcactgtctgacatttctgacatttctgacatttcttggcaaactgacatttcttggcaaactgacatttctgacatttctgacatttcttggcaaactgacatttctgacatttctgacatttctgacatttctgacatttctgacatttctgacatttctgacatttccgactcggaccgatg

SEQ ID NO: 17215 - DNA, 203 bp, Artificial sequence
  synthetic
ggcgcgccagtcctatcaccgctgtctgacatttctgacatttctgacatttcttggcaaactgacatttcttggcaaactgacatttctgacatttctgacatttcttggcaaactgacatttcttggcaaactgacatttctgacatttctgacatttctgacatttctgacatttctgacatttccgactcggaccgatg

SEQ ID NO: 17216 - DNA, 203 bp, Artificial sequence
  synthetic
ggcgcgccagtcctagtcaccgcgtctgacatttctgacatttctgacatttcttggcaaactgacatttcttggcaaactgacatttctgacatttctgacatttcttggcaaactgacatttcttggcaaactgacatttctgacatttctgacatttcttggcaaactgacatttctgacatttccgactcggaccgatg

SEQ ID NO: 17217 - DNA, 203 bp, Artificial sequence
  synthetic
ggcgcgccagtcctcgaccgcttttctgacatttctgacatttctgacatttcttggcaaactgacatttcttggcaaactgacatttctgacatttctgacatttcttggcaaactgacatttcttggcaaactgacatttcttggcaaactgacatttcttggcaaactgacatttctgacatttccgactcggaccgatg

SEQ ID NO: 17218 - DNA, 203 bp, Artificial sequence
  synthetic
ggcgcgccagtcctgtaccgcacatctgacatttctgacatttctgacatttcttggcaaactgacatttcttggcaaactgacatttcttggcaaactgacatttctgacatttctgacatttcttggcaaactgacatttctgacatttctgacatttcttggcaaactgacatttctgacatttccgactcggaccgatg

SEQ ID NO: 17219 - DNA, 203 bp, Artificial sequence
  synthetic
ggcgcgccagtcctcgaataccgctctgacatttctgacatttctgacatttcttggcaaactgacatttcttggcaaactgacatttcttggcaaactgacatttctgacatttctgacatttcttggcaaactgacatttcttggcaaactgacatttctgacatttctgacatttctgacatttccgactcggaccgatg

SEQ ID NO: 17220 - DNA, 203 bp, Artificial sequence
  synthetic
ggcgcgccagtcctcgcaccttactctgacatttctgacatttctgacatttcttggcaaactgacatttcttggcaaactgacatttcttggcaaactgacatttcttggcaaactgacatttctgacatttctgacatttctgacatttctgacatttcttggcaaactgacatttctgacatttccgactcggaccgatg

SEQ ID NO: 17221 - DNA, 203 bp, Artificial sequence
  synthetic
ggcgcgccagtcctccagaatgactctgacatttctgacatttctgacatttcttggcaaactgacatttcttggcaaactgacatttcttggcaaactgacatttcttggcaaactgacatttcttggcaaactgacatttcttggcaaactgacatttcttggcaaactgacatttctgacatttccgactcggaccgatg

SEQ ID NO: 17222 - DNA, 203 bp, Artificial sequence
  synthetic
ggcgcgccagtccttaaagtctactctgacatttctgacatttctgacattttcttggcaaatgacatttctgacatttctgacatttctgacatttctgacatttctgacatttctgacatttctgacatttctgacatttctgacatttctgacatttctgacatttctgacatttctgacatttccgactcggaccgatg

SEQ ID NO: 17223 - DNA, 203 bp, Artificial sequence
  synthetic
ggcgcgccagtcctgtcaaagtcttctgacatttctgacatttctgacattttcttggcaaatgacatttctgacatttctgacatttctgacatttctgacatttctgacatttctgacatttctgacatttctgacatttctgacatttctgacatttctgacatttctgacatttctgtactccccgactcggaccgatg

SEQ ID NO: 17224 - DNA, 203 bp, Artificial sequence
  synthetic
ggcgcgccagtcctttaagacttctctgacatttctgacatttctgaccacggaatcgagaatgacatttctgacatttctgacatttctgacatttctgacatttctgacatttctgacatttctgacatttctgacatttctgacatttctgacatttctgacatttctgaccgtcaattcctttacgactcggaccgatg

SEQ ID NO: 17225 - DNA, 203 bp, Artificial sequence
  synthetic
ggcgcgccagtccttgtaagtctctctgacatttctgacatttctgaccggccgtacatttctgacatttctgacatttctgacatttctgacatttctgacatttctgacatttctgacatttctgacatttctgacatttctgacatttctgacatttctgacatttctgaccacggaatcgagaacgactcggaccgatg

SEQ ID NO: 17226 - DNA, 203 bp, Artificial sequence
  synthetic
ggcgcgccagtcctaagtctttggtctgacatttctgacatttctgaccggccgtacatttctgacatttctgacatttctgacatttctgacatttctgacatttctgacatttctgacatttctgacatttctgacatttctgacatttctgacatttctgacatttctgaccgtcaattcctttacgactcggaccgatg

SEQ ID NO: 17227 - DNA, 203 bp, Artificial sequence
  synthetic
ggcgcgccagtcctgtagcgtacttctgacatttctgacatttctgactactcccacatttctgacatttctgacatttctgacatttctgacatttctgacatttctgacatttctgacatttctgacatttctgacatttctgacatttctgacatttctgacatttctgacatttctgacatttccgactcggaccgatg

SEQ ID NO: 17228 - DNA, 203 bp, Artificial sequence
  synthetic
ggcgcgccagtcctgttagcaatttctgacatttctgacatttctgaggagaggagcgagcgaccaaaggaaccataactgatttaatgagccattcgcagtttcactgtaccggccgtgcgtactcagacatgcatggcttaatctttgagacaagcatatgctactggcaggatcaaccacatttccgactcggaccgatg

SEQ ID NO: 17229 - DNA, 203 bp, Artificial sequence
  synthetic
ggcgcgccagtccttattgaacagtctgacatttctgacatttctgattcttggcaaatttctgacatttctgacatttctgacatttctgacatttctgacatttctgacatttctgacatttctgacatttctgacatttctgacatttctgacatttctgacatttctgacattttcttggcaaacgactcggaccgatg

SEQ ID NO: 17230 - DNA, 203 bp, Artificial sequence
  synthetic
ggcgcgccagtcctatgcaatgcatctgacatttctgacatttctgcacggaatcgagaatctgacatttctgacatttctgacatttctgacatttctgacatttctgacatttctgacatttctgacatttctgacatttctgacatttctgacatttctgacatttctgacatttcaccggccgtcgactcggaccgatg

SEQ ID NO: 17231 - DNA, 203 bp, Artificial sequence
  synthetic
ggcgcgccagtcctcaatcatttttctgacatttctgacatttctgccggcgggtacatttctgacatttctgacatttctgacatttctgacatttctgacatttctgacatttctgacatttctgacatttctgacatttctgacatttctgacatttctgacatttctgacatttctgtactccccgactcggaccgatg

SEQ ID NO: 17232 - DNA, 203 bp, Artificial sequence
  synthetic
ggcgcgccagtcctgcattgaacttctgacatttctgacatttctgccggcgggtacatttctgacatttctgacatttctgacatttctgacatttctgacatttctgacatttctgacatttctgacatttctgacatttctgacatttctgacatttctgacatttctgaccacggaatcgagaacgactcggaccgatg

SEQ ID NO: 17233 - DNA, 203 bp, Artificial sequence
  synthetic
ggcgcgccagtcctattgaaagaatctgacatttctgacatttctgcgtcaattcctttatctgacatttctgacatttctgacatttctgacatttctgacatttctgacatttctgacatttctgacatttctgacatttctgacatttctgacatttctgacatttctgacatttcaccggccgtcgactcggaccgatg

SEQ ID NO: 17234 - DNA, 203 bp, Artificial sequence
  synthetic
ggcgcgccagtcctattgcggtggtctgacatttctgacatttctgcgttatcggaattaaccagacaaatcgctccaccaactaagaacggccatgcaccaccacccacggaatcgagaaagagctatcaatctgtcaatcctgtccgtgtccgggccgggtgaggtttcccgtgttgagtcatttccgactcggaccgatg

SEQ ID NO: 17235 - DNA, 203 bp, Artificial sequence
  synthetic
ggcgcgccagtcctcattgctgcgtctgacatttctgacatttctgtactccctgacatttctgacatttctgacatttctgacatttctgacatttctgacatttctgacatttctgacatttctgacatttctgacatttctgacatttctgacatttctgacatttctgacatttcaccggccgtcgactcggaccgatg

SEQ ID NO: 17236 - DNA, 203 bp, Artificial sequence
  synthetic
ggcgcgccagtcctgctcattgactctgacatttctgacatttctgtactccctgacatttctgacatttctgacatttctgacatttctgacatttctgacatttctgacatttctgacatttctgacatttctgacatttctgacatttctgacatttctgacatttctgacatttcccggcgggtcgactcggaccgatg

SEQ ID NO: 17237 - DNA, 203 bp, Artificial sequence
  synthetic
ggcgcgccagtccttgcaatgcactctgacatttctgacatttcttaggagaggagcgagcgaccaaaggaaccataactgatttaatgagccattcgcagtttcactgtaccggccgtgcgtactcagacatgcatggcttaatctttgagacaagcatatgctactggcaggatcaaccagatttccgactcggaccgatg

SEQ ID NO: 17238 - DNA, 203 bp, Artificial sequence
  synthetic
ggcgcgccagtcctaaaaccattgtctgacatttctgacatttcttcttggcaaaacatttctgacatttctgacatttctgacatttctgacatttctgacatttctgacatttctgacatttctgacatttctgacatttctgacatttctgacatttctgacatttctgaccacggaatcgagaacgactcggaccgatg

SEQ ID NO: 17239 - DNA, 203 bp, Artificial sequence
  synthetic
ggcgcgccagtcctatcagaattgtctgacatttctgaccacggaatcgagaatgacatttctgacatttctgacatttctgacatttctgacatttctgacatttctgacatttctgacatttctgacatttctgacatttctgacatttctgacatttctgacatttctgacatttcccggcgggtcgactcggaccgatg

SEQ ID NO: 17240 - DNA, 203 bp, Artificial sequence
  synthetic
ggcgcgccagtccttgcatgcaattctgacatttctgacccggcgggtatttctgacatttctgacatttctgacatttctgacatttctgacatttctgacatttctgacatttctgacatttctgacatttctgacatttctgacatttctgacatttctgacatttctgacatttctgtactccccgactcggaccgatg

SEQ ID NO: 17241 - DNA, 203 bp, Artificial sequence
  synthetic
ggcgcgccagtcctggtcaattcgtctgacatttctgaccggccgtacatttctgacatttctgacatttctgacatttctgacatttctgacatttctgacatttctgacatttctgacatttctgacatttctgacatttctgacatttctgacatttctgacatttctgacatttcccggcgggtcgactcggaccgatg

SEQ ID NO: 17242 - DNA, 203 bp, Artificial sequence
  synthetic
ggcgcgccagtcctacaatctaagtctgacatttctgactactcccacatttctgacatttctgacatttctgacatttctgacatttctgacatttctgacatttctgacatttctgacatttctgacatttctgacatttctgacatttctgacatttctgacatttctgacatttcccggcgggtcgactcggaccgatg

SEQ ID NO: 17243 - DNA, 203 bp, Artificial sequence
  synthetic
ggcgcgccagtcctccacattgattctgacatttctgcacggaatcgagaatctgacatttctgacatttctgacatttctgacatttctgacatttctgacatttctgacatttctgacatttctgacatttctgacatttctgacatttctgacatttctgacatttctgacattttcttggcaaacgactcggaccgatg

SEQ ID NO: 17244 - DNA, 203 bp, Artificial sequence
  synthetic
ggcgcgccagtcctcttcaaattgtctgacatttctgccggcgggtacatttctgacatttctgacatttctgacatttctgacatttctgacatttctgacatttctgacatttctgacatttctgacatttctgacatttctgacatttctgacatttctgacatttctgacatttcccggcgggtcgactcggaccgatg

SEQ ID NO: 17245 - DNA, 203 bp, Artificial sequence
  synthetic
ggcgcgccagtcctgtcaattcagtctgacatttctgtactccctgacatttctgacatttctgacatttctgacatttctgacatttctgacatttctgacatttctgacatttctgacatttctgacatttctgacatttctgacatttctgacatttctgacatttctgacattttcttggcaaacgactcggaccgatg

SEQ ID NO: 17246 - DNA, 203 bp, Artificial sequence
  synthetic
ggcgcgccagtcctgagcaatcattctgacatttcttcttggcaaaacatttctgacatttctgacatttctgacatttctgacatttctgacatttctgacatttctgacatttctgacatttctgacatttctgacatttctgacatttctgacatttctgacatttctgacatttcaccggccgtcgactcggaccgatg

SEQ ID NO: 17247 - DNA, 203 bp, Artificial sequence
  synthetic
ggcgcgccagtcctggctgcaatatctgacatttcttggcaaactgacatttctgacatttctgacatttctgacatttctgacatttctgacatttctgacatttctgacatttctgacatttctgacatttctgacatttctgacatttctgacatttctgacatttctgacatttctgacatttccgactcggaccgatg

SEQ ID NO: 17248 - DNA, 203 bp, Artificial sequence
  synthetic
ggcgcgccagtccttcaatggtattctgacatttcttggcaaactgacatttctgacatttctgacatttctgacatttctgacatttctgacatttctgacatttctgacatttctgacatttcttggcaaactgacatttctgacatttctgacatttctgacatttctgacatttctgacatttccgactcggaccgatg

SEQ ID NO: 17249 - DNA, 203 bp, Artificial sequence
  synthetic
ggcgcgccagtcctcaatactacctctgacatttcttggcaaactgacatttctgacatttctgacatttctgacatttctgacatttctgacatttctgacatttctgacatttctgacatttcttggcaaactgacatttcttggcaaactgacatttctgacatttctgacatttctgacatttccgactcggaccgatg

SEQ ID NO: 17250 - DNA, 203 bp, Artificial sequence
  synthetic
ggcgcgccagtccttcgctcaatgtctgacatttcttggcaaactgacatttctgacatttctgacatttctgacatttctgacatttctgacatttctgacatttcttggcaaactgacatttcttggcaaactgacatttcttggcaaactgacatttcttggcaaactgacatttctgacatttccgactcggaccgatg

SEQ ID NO: 17251 - DNA, 203 bp, Artificial sequence
  synthetic
ggcgcgccagtcctttcattgatttctgacatttcttggcaaactgacatttctgacatttctgacatttctgacatttctgacatttcttggcaaactgacatttctgacatttctgacatttctgacatttctgacatttctgacatttctgacatttctgacatttctgacatttctgacatttccgactcggaccgatg

SEQ ID NO: 17252 - DNA, 203 bp, Artificial sequence
  synthetic
ggcgcgccagtcctactgtattgctctgacatttcttggcaaactgacatttctgacatttctgacatttctgacatttctgacatttcttggcaaactgacatttctgacatttctgacatttctgacatttctgacatttcttggcaaactgacatttctgacatttctgacatttctgacatttccgactcggaccgatg

SEQ ID NO: 17253 - DNA, 203 bp, Artificial sequence
  synthetic
ggcgcgccagtcctaaattgagtatctgacatttcttggcaaactgacatttctgacatttctgacatttctgacatttctgacatttcttggcaaactgacatttctgacatttctgacatttcttggcaaactgacatttctgacatttctgacatttcttggcaaactgacatttctgacatttccgactcggaccgatg

SEQ ID NO: 17254 - DNA, 203 bp, Artificial sequence
  synthetic
ggcgcgccagtcctattgcacttgtctgacatttcttggcaaactgacatttctgacatttctgacatttctgacatttctgacatttcttggcaaactgacatttcttggcaaactgacatttctgacatttctgacatttctgacatttctgacatttcttggcaaactgacatttctgacatttccgactcggaccgatg

SEQ ID NO: 17255 - DNA, 203 bp, Artificial sequence
  synthetic
ggcgcgccagtcctcaatcttgattctgacatttcttggcaaactgacatttctgacatttctgacatttctgacatttctgacatttcttggcaaactgacatttcttggcaaactgacatttcttggcaaactgacatttctgacatttctgacatttcttggcaaactgacatttctgacatttccgactcggaccgatg

SEQ ID NO: 17256 - DNA, 203 bp, Artificial sequence
  synthetic
ggcgcgccagtcctcgcaatactctctgacatttcttggcaaactgacatttctgacatttctgacatttctgacatttctgacatttcttggcaaactgacatttcttggcaaactgacatttcttggcaaactgacatttcttggcaaactgacatttctgacatttctgacatttctgacatttccgactcggaccgatg

SEQ ID NO: 17257 - DNA, 203 bp, Artificial sequence
  synthetic
ggcgcgccagtccttcgtgattgctctgacatttcttggcaaactgacatttctgacatttctgacatttcttggcaaactgacatttctgacatttctgacatttctgacatttctgacatttctgacatttctgacatttctgacatttctgacatttcttggcaaactgacatttctgacatttccgactcggaccgatg

SEQ ID NO: 17258 - DNA, 203 bp, Artificial sequence
  synthetic
ggcgcgccagtcctaaacttcaattctgacatttcttggcaaactgacatttctgacatttctgacatttcttggcaaactgacatttctgacatttctgacatttctgacatttctgacatttctgacatttctgacatttcttggcaaactgacatttcttggcaaactgacatttctgacatttccgactcggaccgatg

SEQ ID NO: 17259 - DNA, 203 bp, Artificial sequence
  synthetic
ggcgcgccagtcctcaatggatcctctgacatttcttggcaaactgacatttctgacatttctgacatttcttggcaaactgacatttctgacatttctgacatttctgacatttctgacatttcttggcaaactgacatttctgacatttctgacatttctgacatttctgacatttctgacatttccgactcggaccgatg

SEQ ID NO: 17260 - DNA, 203 bp, Artificial sequence
  synthetic
ggcgcgccagtcctgatcgattgttctgacatttcttggcaaactgacatttctgacatttctgacatttcttggcaaactgacatttctgacatttctgacatttcttggcaaactgacatttctgacatttctgacatttctgacatttctgacatttctgacatttctgacatttctgacatttccgactcggaccgatg

SEQ ID NO: 17261 - DNA, 203 bp, Artificial sequence
  synthetic
ggcgcgccagtcctcgattgcaagtctgacatttcttggcaaactgacatttctgacatttctgacatttcttggcaaactgacatttctgacatttctgacatttcttggcaaactgacatttctgacatttctgacatttctgacatttctgacatttcttggcaaactgacatttctgacatttccgactcggaccgatg

SEQ ID NO: 17262 - DNA, 203 bp, Artificial sequence
  synthetic
ggcgcgccagtcctacattgaggttctgacatttcttggcaaactgacatttctgacatttctgacatttcttggcaaactgacatttctgacatttctgacatttcttggcaaactgacatttctgacatttctgacatttcttggcaaactgacatttctgacatttctgacatttctgacatttccgactcggaccgatg

SEQ ID NO: 17263 - DNA, 203 bp, Artificial sequence
  synthetic
ggcgcgccagtcctttacattgcttctgacatttcttggcaaactgacatttctgacatttctgacatttcttggcaaactgacatttctgacatttctgacatttcttggcaaactgacatttctgacatttctgacatttcttggcaaactgacatttcttggcaaactgacatttctgacatttccgactcggaccgatg

SEQ ID NO: 17264 - DNA, 203 bp, Artificial sequence
  synthetic
ggcgcgccagtcctaattgagatatctgacatttcttggcaaactgacatttctgacatttctgacatttcttggcaaactgacatttcttggcaaactgacatttctgacatttctgacatttctgacatttctgacatttctgacatttctgacatttctgacatttctgacatttctgacatttccgactcggaccgatg

SEQ ID NO: 17265 - DNA, 203 bp, Artificial sequence
  synthetic
ggcgcgccagtcctcttgcaatcatctgacatttcttggcaaactgacatttctgacatttctgacatttcttggcaaactgacatttcttggcaaactgacatttctgacatttctgacatttctgacatttctgacatttctgacatttctgacatttcttggcaaactgacatttctgacatttccgactcggaccgatg

SEQ ID NO: 17266 - DNA, 203 bp, Artificial sequence
  synthetic
ggcgcgccagtcctattgacggtatctgacatttcttggcaaactgacatttctgacatttctgacatttcttggcaaactgacatttcttggcaaactgacatttcttggcaaactgacatttctgacatttctgacatttctgacatttctgacatttctgacatttctgacatttctgacatttccgactcggaccgatg

SEQ ID NO: 17267 - DNA, 203 bp, Artificial sequence
  synthetic
ggcgcgccagtcctgtcaatcgactctgacatttcttggcaaactgacatttctgacatttctgacatttcttggcaaactgacatttcttggcaaactgacatttcttggcaaactgacatttcttggcaaactgacatttctgacatttctgacatttcttggcaaactgacatttctgacatttccgactcggaccgatg

SEQ ID NO: 17268 - DNA, 203 bp, Artificial sequence
  synthetic
ggcgcgccagtcctggtattgccatctgacatttcttggcaaactgacatttctgacatttctgacatttcttggcaaactgacatttcttggcaaactgacatttcttggcaaactgacatttcttggcaaactgacatttcttggcaaactgacatttctgacatttctgacatttctgacatttccgactcggaccgatg

SEQ ID NO: 17269 - DNA, 203 bp, Artificial sequence
  synthetic
ggcgcgccagtcctttacacattgtctgacatttcttggcaaactgacatttctgacatttctgacatttcttggcaaactgacatttcttggcaaactgacatttcttggcaaactgacatttcttggcaaactgacatttcttggcaaactgacatttcttggcaaactgacatttctgacatttccgactcggaccgatg

SEQ ID NO: 17270 - DNA, 203 bp, Artificial sequence
  synthetic
ggcgcgccagtcctcaatacacgatctgacatttcttggcaaactgacatttcttggcaaactgacatttctgacatttctgacatttctgacatttctgacatttctgacatttctgacatttctgacatttctgacatttcttggcaaactgacatttctgacatttctgacatttctgacatttccgactcggaccgatg

SEQ ID NO: 17271 - DNA, 203 bp, Artificial sequence
  synthetic
ggcgcgccagtcctgggtcaattctctgacatttcttggcaaactgacatttcttggcaaactgacatttctgacatttctgacatttctgacatttctgacatttctgacatttctgacatttcttggcaaactgacatttctgacatttctgacatttctgacatttctgacatttctgacatttccgactcggaccgatg

SEQ ID NO: 17272 - DNA, 203 bp, Artificial sequence
  synthetic
ggcgcgccagtcctaacagcaatatctgacatttcttggcaaactgacatttcttggcaaactgacatttctgacatttctgacatttctgacatttctgacatttcttggcaaactgacatttcttggcaaactgacatttctgacatttctgacatttcttggcaaactgacatttctgacatttccgactcggaccgatg

SEQ ID NO: 17273 - DNA, 203 bp, Artificial sequence
  synthetic
ggcgcgccagtcctgctcaattgctctgacatttcttggcaaactgacatttcttggcaaactgacatttctgacatttctgacatttctgacatttctgacatttcttggcaaactgacatttcttggcaaactgacatttcttggcaaactgacatttcttggcaaactgacatttctgacatttccgactcggaccgatg

SEQ ID NO: 17274 - DNA, 203 bp, Artificial sequence
  synthetic
ggcgcgccagtcctgcaatctctttctgacatttcttggcaaactgacatttcttggcaaactgacatttctgacatttctgacatttcttggcaaactgacatttctgacatttctgacatttctgacatttctgacatttctgacatttctgacatttctgacatttctgacatttctgacatttccgactcggaccgatg

SEQ ID NO: 17275 - DNA, 203 bp, Artificial sequence
  synthetic
ggcgcgccagtcctattgaccagttctgacatttcttggcaaactgacatttcttggcaaactgacatttctgacatttctgacatttcttggcaaactgacatttctgacatttctgacatttctgacatttctgacatttctgacatttctgacatttcttggcaaactgacatttctgacatttccgactcggaccgatg

SEQ ID NO: 17276 - DNA, 203 bp, Artificial sequence
  synthetic
ggcgcgccagtcctcaatcgttgctctgacatttcttggcaaactgacatttcttggcaaactgacatttctgacatttctgacatttcttggcaaactgacatttctgacatttctgacatttctgacatttctgacatttcttggcaaactgacatttcttggcaaactgacatttctgacatttccgactcggaccgatg

SEQ ID NO: 17277 - DNA, 203 bp, Artificial sequence
  synthetic
ggcgcgccagtcctctcattgaactctgacatttcttggcaaactgacatttcttggcaaactgacatttctgacatttctgacatttcttggcaaactgacatttctgacatttctgacatttcttggcaaactgacatttctgacatttctgacatttctgacatttctgacatttctgacatttccgactcggaccgatg

SEQ ID NO: 17278 - DNA, 203 bp, Artificial sequence
  synthetic
ggcgcgccagtcctacaagattgatctgacatttcttggcaaactgacatttcttggcaaactgacatttctgacatttctgacatttcttggcaaactgacatttcttggcaaactgacatttcttggcaaactgacatttctgacatttctgacatttctgacatttctgacatttctgacatttccgactcggaccgatg

SEQ ID NO: 17279 - DNA, 203 bp, Artificial sequence
  synthetic
ggcgcgccagtcctaacaatctgatctgacatttcttggcaaactgacatttcttggcaaactgacatttctgacatttctgacatttcttggcaaactgacatttcttggcaaactgacatttcttggcaaactgacatttcttggcaaactgacatttctgacatttctgacatttctgacatttccgactcggaccgatg

SEQ ID NO: 17280 - DNA, 203 bp, Artificial sequence
  synthetic
ggcgcgccagtccttatgtcattgtctgacatttcttggcaaactgacatttcttggcaaactgacatttctgacatttctgacatttcttggcaaactgacatttcttggcaaactgacatttcttggcaaactgacatttcttggcaaactgacatttcttggcaaactgacatttctgacatttccgactcggaccgatg

SEQ ID NO: 17281 - DNA, 203 bp, Artificial sequence
  synthetic
ggcgcgccagtcctttcgtaaccctctgacatttcttggcaaactgacatttcttggcaaactgacatttcttggcaaactgacatttctgacatttctgacatttcttggcaaactgacatttctgacatttctgacatttctgacatttctgacatttcttggcaaactgacatttctgacatttccgactcggaccgatg

SEQ ID NO: 17282 - DNA, 203 bp, Artificial sequence
  synthetic
ggcgcgccagtcctgggtcgtaaatctgacatttcttggcaaactgacatttcttggcaaactgacatttcttggcaaactgacatttctgacatttctgacatttcttggcaaactgacatttcttggcaaactgacatttctgacatttctgacatttctgacatttctgacatttctgacatttccgactcggaccgatg

SEQ ID NO: 17283 - DNA, 203 bp, Artificial sequence
  synthetic
ggcgcgccagtccttcttacgaagtctgacatttcttggcaaactgacatttcttggcaaactgacatttcttggcaaactgacatttctgacatttctgacatttcttggcaaactgacatttcttggcaaactgacatttctgacatttctgacatttcttggcaaactgacatttctgacatttccgactcggaccgatg

SEQ ID NO: 17284 - DNA, 203 bp, Artificial sequence
  synthetic
ggcgcgccagtcctgttacgagcatctgacatttcttggcaaactgacatttcttggcaaactgacatttcttggcaaactgacatttctgacatttctgacatttcttggcaaactgacatttcttggcaaactgacatttcttggcaaactgacatttctgacatttctgacatttctgacatttccgactcggaccgatg

SEQ ID NO: 17285 - DNA, 203 bp, Artificial sequence
  synthetic
ggcgcgccagtcctcactttacgatctgacatttcttggcaaactgacatttcttggcaaactgacatttcttggcaaactgacatttcttggcaaactgacatttctgacatttctgacatttcttggcaaactgacatttcttggcaaactgacatttctgacatttctgacatttctgacatttccgactcggaccgatg

SEQ ID NO: 17286 - DNA, 203 bp, Artificial sequence
  synthetic
ggcgcgccagtcctcccatgcagatctgacatttcttggcaaactgacatttcttggcaaactgacatttcttggcaaactgacatttcttggcaaactgacatttcttggcaaactgacatttctgacatttctgacatttctgacatttctgacatttctgacatttctgacatttctgacatttccgactcggaccgatg

SEQ ID NO: 17287 - DNA, 203 bp, Artificial sequence
  synthetic
ggcgcgccagtcctaagatcaaggtctgacatttcttggcaaactgacatttcttggcaaactgacatttcttggcaaactgacatttcttggcaaactgacatttcttggcaaactgacatttctgacatttctgacatttctgacatttctgacatttcttggcaaactgacatttctgacatttccgactcggaccgatg

SEQ ID NO: 17288 - DNA, 203 bp, Artificial sequence
  synthetic
ggcgcgccagtcctaaatcgacgttctgacatttcttggcaaactgacatttcttggcaaactgacatttcttggcaaactgacatttcttggcaaactgacatttcttggcaaactgacatttctgacatttctgacatttcttggcaaactgacatttctgacatttctgacatttctgacatttccgactcggaccgatg

SEQ ID NO: 17289 - DNA, 203 bp, Artificial sequence
  synthetic
ggcgcgccagtcctacgtcgactctctgacatttcttggcaaactgacatttcttggcaaactgacatttcttggcaaactgacatttcttggcaaactgacatttcttggcaaactgacatttcttggcaaactgacatttcttggcaaactgacatttctgacatttctgacatttctgacatttccgactcggaccgatg

SEQ ID NO: 17290 - DNA, 203 bp, Artificial sequence
  synthetic
ggcgcgccagtccttcgtcgattttctgacatttcttggcaaactgacatttcttggcaaactgacatttcttggcaaactgacatttcttggcaaactgacatttcttggcaaactgacatttcttggcaaactgacatttcttggcaaactgacatttcttggcaaactgacatttcttggcaaaccgactcggaccgatg

SEQ ID NO: 17291 - DNA, 203 bp, Artificial sequence
  synthetic
ggcgcgccagtcctactaccgccttctgacattttactcccttctgacatttctgacatttctgacatttctgacatttctgacatttctgacatttctgacatttctgacatttctgacatttctgacatttctgacatttctgacatttctgacatttctgacatttctgacatttctgacatttccgactcggaccgatg

SEQ ID NO: 17292 - DNA, 203 bp, Artificial sequence
  synthetic
ggcgcgccagtcctttgctttgattctgaccgtcaattcctttatgacatttctgacatttctgacatttctgacatttctgacatttctgacatttctgacatttctgacatttctgacatttctgacatttctgacatttctgacatttctgacatttctgacatttctgacattttcttggcaaacgactcggaccgatg

SEQ ID NO: 17293 - DNA, 203 bp, Artificial sequence
  synthetic
ggcgcgccagtccttcatgtcgagtctgttcttggcaaaatttctgacatttctgacatttctgacatttctgacatttctgacatttctgacatttctgacatttctgacatttctgacatttctgacatttctgacatttctgacatttctgacatttctgacatttctgacatttcccggcgggtcgactcggaccgatg

SEQ ID NO: 17294 - DNA, 203 bp, Artificial sequence
  synthetic
ggcgcgccagtcctctgtcgaccctcttactcccctgacatttctgacatttctgacatttctgacatttctgacatttctgacatttctgacatttctgacatttctgacatttctgacatttctgacatttctgacatttctgacatttctgacatttctgacatttctgaccacggaatcgagaacgactcggaccgatg

SEQ ID NO: 17295 - DNA, 203 bp, Artificial sequence
  synthetic
ggcgcgccagtcctagtatgtcgatgtgtaaacacggaatcgagaattcacacggaatcgagaaggaacacggaatcgagaactgccacggaatcgagaagcagcacggaatcgagaaggttcacggaatcgagaaaggccacggaatcgagaatagtcacggaatcgagaatctcttttttggcatccgactcggaccgatg

SEQ ID NO: 17296 - DNA, 203 bp, Artificial sequence
  synthetic
ggcgcgccagtccttactcagccctgtgtaaagatgcagtgtaaggttcaagtgccaaatccctggaacacggaatcgagaactgccacggaatcgagaagcagcacggaatcgagaaggttcacggaatcgagaaaggccacggaatcgagaatagtcacggaatcgagaatctcttttttggcatccgactcggaccgatg

SEQ ID NO: 17297 - DNA, 203 bp, Artificial sequence
  synthetic
ggcgcgccagtcctacagcagccctgtgtaaagatgcagtgtaaggttcaagtgccaaatccctggaaccggcgggtctctactgcccggcgggtgctgtgcagccggcgggtacttcggttccggcgggtagcacaggcccggcgggtacgggtagtccggcgggtcatcctctcccggcgggtatccgactcggaccgatg

SEQ ID NO: 17298 - DNA, 203 bp, Artificial sequence
  synthetic
ggcgcgccagtcctgtcgcagccctgtgtaaagatgcagtgtaaggttcaagtgccaaatccctggaaggagtgaccctctactgcaccggccgtgctgtgcagaccggccgtacttcggttaccggccgtagcacaggcaccggccgtacgggtagtaccggccgtcatcctctcaccggccgtatccgactcggaccgatg

SEQ ID NO: 17299 - DNA, 203 bp, Artificial sequence
  synthetic
ggcgcgccagtcctgacaaggccctgtgtaaagatgcagtgtaaggttcaagtgccaaatccctggaaggagtgaccctctactgccacggaatcgagaagcagcacggaatcgagaaggttcacggaatcgagaaaggccacggaatcgagaatagtcacggaatcgagaatctcttttttggcatccgactcggaccgatg

SEQ ID NO: 17300 - DNA, 203 bp, Artificial sequence
  synthetic
ggcgcgccagtcctggttacgccctgtgtaaagatgcagtgtaaggttcaagtgccaaatccctggaaggagtgaccctctactgccctaggaatgctgtgcagaccggccgtacttcggttaccggccgtagcacaggcaccggccgtacgggtagtaccggccgtcatcctctcaccggccgtatccgactcggaccgatg

SEQ ID NO: 17301 - DNA, 203 bp, Artificial sequence
  synthetic
ggcgcgccagtcctgggcctggtctgtgtaaagatgcagtgtaaggttcaagtgccaaatccctggaaggagtgaccctctactgccctaggaatgctgtgcaggtacccccaacttcggttcacggaatcgagaaaggccacggaatcgagaatagtcacggaatcgagaatctcttttttggcatccgactcggaccgatg

SEQ ID NO: 17302 - DNA, 203 bp, Artificial sequence
  synthetic
ggcgcgccagtcctgggctcagcatgtgtaaagatgcagtgtaaggttcaagtgccaaatccctggaaggagtgaccctctactgccctaggaatgctgtgcaggtacccccaacttcggttccggcgggtagcacaggcccggcgggtacgggtagtccggcgggtcatcctctcccggcgggtatccgactcggaccgatg

SEQ ID NO: 17303 - DNA, 203 bp, Artificial sequence
  synthetic
ggcgcgccagtcctgggctacgtctgtgtaaagatgcagtgtaaggttcaagtgccaaatccctggaaggagtgaccctctactgccctaggaatgctgtgcaggtacccccaacttcggttggggatctgagcacaggccacggaatcgagaatagtcacggaatcgagaatctcttttttggcatccgactcggaccgatg

SEQ ID NO: 17304 - DNA, 203 bp, Artificial sequence
  synthetic
ggcgcgccagtcctgggctaggcttgtgtaaagatgcagtgtaaggttcaagtgccaaatccctggaaggagtgaccctctactgccctaggaatgctgtgcaggtacccccaacttcggttggggatctgagcacaggccgtcaattcctttatagtcgtcaattcctttatctcttttttggcatccgactcggaccgatg

SEQ ID NO: 17305 - DNA, 203 bp, Artificial sequence
  synthetic
ggcgcgccagtcctccacgttaagtgtgtaaagatgcagtgtaaggttcaagtgccaaatccctggaaggagtgaccctctactgccctaggaatgctgtgcaggtacccccaacttcggttggggatctgagcacaggctaattgtctacgggtagtcacggaatcgagaatctcttttttggcatccgactcggaccgatg

SEQ ID NO: 17306 - DNA, 203 bp, Artificial sequence
  synthetic
ggcgcgccagtcctaccacgttgttgtgtaaagatgcagtgtaaggttcaagtgccaaatccctggaaggagtgaccctctactgccctaggaatgctgtgcaggtacccccaacttcggttggggatctgagcacaggctaattgtctacgggtagtccggcgggtcatcctctcccggcgggtatccgactcggaccgatg

SEQ ID NO: 17307 - DNA, 203 bp, Artificial sequence
  synthetic
ggcgcgccagtccttccagtttcatgtgtaaagatgcagtgtaaggttcaagtgccaaatccctggaaggagtgaccctctactgccctaggaatgctgtgcaggtacccccaacttcggttggggatctgagcacaggctaattgtctacgggtagtcgtcaattcctttatctcttttttggcatccgactcggaccgatg

SEQ ID NO: 17308 - DNA, 203 bp, Artificial sequence
  synthetic
ggcgcgccagtccttgaaactttgtgtgtaaagatgcagtgtaaggttcaagtgccaaatccctggaaggagtgaccctctactgccctaggaatgctgtgcaggtacccccaacttcggttggggatctgagcacaggctaattgtctacgggtagttactccccccatcctctctactcccgcatccgactcggaccgatg

SEQ ID NO: 17309 - DNA, 203 bp, Artificial sequence
  synthetic
ggcgcgccagtcctcattgaaacttgtgtaaagatgcagtgtaaggttcaagtgccaaatccctggaaggagtgaccctctactgccctaggaatgctgtgcaggtacccccaacttcggttggggatctgagcacaggctaattgtctacgggtagtttcatttcccatcctctcaccggccgtatccgactcggaccgatg

SEQ ID NO: 17310 - DNA, 203 bp, Artificial sequence
  synthetic
ggcgcgccagtcctctgaaactcttgtgtaaagatgcagtgtaaggttcaagtgccaaatccctggaaggagtgaccctctactgccctaggaatgctgtgcaggtacccccaacttcggttggggatctgagcacaggctaattgtctacgggtagtttcatttcccatcctctcccggcgggtatccgactcggaccgatg

SEQ ID NO: 17311 - DNA, 203 bp, Artificial sequence
  synthetic
ggcgcgccagtccttgaaatgacatgtgtaaagatgcagtgtaaggttcaagtgccaaatccctggaaggagtgaccctctactgccctaggaatgctgtgcaggtacccccaacttcggttggggatctgagcacaggctaattgtctacgggtagtttcatttcccatcctctctactcccgcatccgactcggaccgatg

SEQ ID NO: 17312 - DNA, 203 bp, Artificial sequence
  synthetic
ggcgcgccagtcctagcctgcacgtgtgtaaagatgcagtgtaaggttcaagtgccaaatccctggaaggagtgaccctctactgccctaggaatgctgtgcaggtacccccaacttcggttggggatctgagcacaggctaattgtctacgggtagtttcatttcccatcctctcttcttggcaaaccgactcggaccgatg

SEQ ID NO: 17313 - DNA, 203 bp, Artificial sequence
  synthetic
ggcgcgccagtcctatccacgaagtgtgtaaagatgcagtgtaaggttcaagtgccaaatccctggaaggagtgaccctctactgccctaggaatgctgtgcaggtacccccaacttcggttggggatctgagcacaggctaattgtctacgggtagtttcatttcccatcctctcttttttggcatccgactcggaccgatg

SEQ ID NO: 17314 - DNA, 203 bp, Artificial sequence
  synthetic
ggcgcgccagtcctagttcacgaatgtgtaaagatgcagtgtaaggttcaagtgccaaatccctggaaggagtgaccctctactgccctaggaatgctgtgcaggtacccccaacttcggttggggatctgagcacaggctaattgtctacgggtagtttcttggcaaatcctctcttcttggcaaaccgactcggaccgatg

SEQ ID NO: 17315 - DNA, 203 bp, Artificial sequence
  synthetic
ggcgcgccagtccttagttcgtgatgtgtaaagatgcagtgtaaggttcaagtgccaaatccctggaaggagtgaccctctactgccctaggaatgctgtgcaggtacccccaacttcggttggggatctgagcacaggctactcccctacgggtagttactccccccatcctctctactcccgcatccgactcggaccgatg

SEQ ID NO: 17316 - DNA, 203 bp, Artificial sequence
  synthetic
ggcgcgccagtccttattcgtggatgtgtaaagatgcagtgtaaggttcaagtgccaaatccctggaaggagtgaccctctactgccctaggaatgctgtgcaggtacccccaacttcggttggggatctgagcacaggcttcttggcaaagggtagtttcttggcaaatcctctcttcttggcaaaccgactcggaccgatg

SEQ ID NO: 17317 - DNA, 203 bp, Artificial sequence
  synthetic
ggcgcgccagtccttccacgaagatgtgtaaagatgcagtgtaaggttcaagtgccaaatccctggaaggagtgaccctctactgccctaggaatgctgtgcaggtacccccaacttcggtttactccctgagcacaggctactcccctacgggtagttactccccccatcctctctactcccgcatccgactcggaccgatg

SEQ ID NO: 17318 - DNA, 203 bp, Artificial sequence
  synthetic
ggcgcgccagtcctcattcgtgcttgtgtaaagatgcagtgtaaggttcaagtgccaaatccctggaaggagtgaccctctactgccgtcaattcctttagcagcgtcaattcctttaggttcgtcaattcctttaaggccgtcaattcctttatagtcgtcaattcctttatctcttttttggcatccgactcggaccgatg

SEQ ID NO: 17319 - DNA, 203 bp, Artificial sequence
  synthetic
ggcgcgccagtccttggcactaactgtgtaaagatgcagtgtaaggttcacacggaatcgagaaggaacacggaatcgagaactgccacggaatcgagaagcagcacggaatcgagaaggttcacggaatcgagaaaggccacggaatcgagaatagtcacggaatcgagaatctcttttttggcatccgactcggaccgatg

SEQ ID NO: 17320 - DNA, 203 bp, Artificial sequence
  synthetic
ggcgcgccagtcctacgcaccagatgtgtaaagatgcagtgtaaggttcatactcccaatccctggaatactcccccctctactgctactcccatgctgtgcagtactccccaacttcggtttactccctgagcacaggctactcccctacgggtagttactccccccatcctctctactcccgcatccgactcggaccgatg

SEQ ID NO: 17321 - DNA, 203 bp, Artificial sequence
  synthetic
ggcgcgccagtcctacgcactgcgtgtgtaaagatgcagtgtaaggttcattcttggcaaacctggaattcttggcaaactactgcttcttggcaaatgtgcagttcttggcaaattcggttttcttggcaaacacaggcttcttggcaaagggtagtttcttggcaaatcctctcttcttggcaaaccgactcggaccgatg

SEQ ID NO: 17322 - DNA, 203 bp, Artificial sequence
  synthetic
ggcgcgccagtcctaacgcactagtgtgtaaatactccctgtaaggttcatactcccaatccctggaatactcccccctctactgctactcccatgctgtgcagtactccccaacttcggtttactccctgagcacaggctactcccctacgggtagttactccccccatcctctctactcccgcatccgactcggaccgatg

SEQ ID NO: 17323 - DNA, 203 bp, Artificial sequence
  synthetic
ggcgcgccagtcctcttgttacacttacttcaaccggccgtcaggtcaaaaccggccgtggcgcacctaccggccgtctgacacataccggccgtgcaccagcaaccggccgtacgctgacaaccggccgtagcgacttgaccggccgtaatttggctaccggccgtgagagccccaccggccgtagacgactcggaccgatg

SEQ ID NO: 17324 - DNA, 203 bp, Artificial sequence
  synthetic
ggcgcgccagtcctttcatacgctttacttcacactcagtccaggtcaaacgtcaattcctttaacctcgtcaattcctttaacatcgtcaattcctttaagcacgtcaattcctttagacacgtcaattcctttacttgcgtcaattcctttaggctcgtcaattcctttaccccgacaactgaagacgactcggaccgatg

SEQ ID NO: 17325 - DNA, 203 bp, Artificial sequence
  synthetic
ggcgcgccagtccttacgtcaggtttacttcacactcagtccaggtcaaaggtaaatcaggcgcacctcgtcaattcctttaacatcgtcaattcctttaagcacgtcaattcctttagacacgtcaattcctttacttgcgtcaattcctttaggctcgtcaattcctttaccccgacaactgaagacgactcggaccgatg

SEQ ID NO: 17326 - DNA, 203 bp, Artificial sequence
  synthetic
ggcgcgccagtcctacagtacgggttacttcacactcagtccaggtcaaaggtaaatcaggcgcaccttactcccacctgacacattactccccagcaccagcatactcccgaacgctgacatactcccgaagcgacttgtactcccccaatttggcttactcccctgagagcccctactcccgaagacgactcggaccgatg

SEQ ID NO: 17327 - DNA, 203 bp, Artificial sequence
  synthetic
ggcgcgccagtccttgttaacgggttacttcacactcagtccaggtcaaaggtaaatcaggcgcaccttggcaccacctgacacatccggcgggtgcaccagcaccggcgggtacgctgacaccggcgggtagcgacttgccggcgggtaatttggctccggcgggtgagagccccccggcgggtagacgactcggaccgatg

SEQ ID NO: 17328 - DNA, 203 bp, Artificial sequence
  synthetic
ggcgcgccagtcctagtcgacgggttacttcacactcagtccaggtcaaaggtaaatcaggcgcaccttggcaccacctgacacattgtacaccagcaccagcacacggaatcgagaagacacacggaatcgagaacttgcacggaatcgagaaggctcacggaatcgagaaccccgacaactgaagacgactcggaccgatg

SEQ ID NO: 17329 - DNA, 203 bp, Artificial sequence
  synthetic
ggcgcgccagtcctcccgtagctgttacttcacactcagtccaggtcaaaggtaaatcaggcgcaccttggcaccacctgacacattgtacaccagcaccagcaccggcgggtacgctgacaccggcgggtagcgacttgccggcgggtaatttggctccggcgggtgagagccccccggcgggtagacgactcggaccgatg

SEQ ID NO: 17330 - DNA, 203 bp, Artificial sequence
  synthetic
ggcgcgccagtcctcgtgcacgggttacttcacactcagtccaggtcaaaggtaaatcaggcgcaccttggcaccacctgacacattgtacaccagcaccagcacctgacagaacgctgacaaccggccgtagcgacttgaccggccgtaatttggctaccggccgtgagagccccaccggccgtagacgactcggaccgatg

SEQ ID NO: 17331 - DNA, 203 bp, Artificial sequence
  synthetic
ggcgcgccagtcctgcctttagaattacttcacactcagtccaggtcaaaggtaaatcaggcgcaccttggcaccacctgacacattgtacaccagcaccagcacctgacagaacgctgacagaagtcagaagcgacttgatcgcctccaatttggctaccggccgtgagagccccaccggccgtagacgactcggaccgatg

SEQ ID NO: 17332 - DNA, 203 bp, Artificial sequence
  synthetic
ggcgcgccagtcctcttctaactcttacttcacactcagtccaggtcaaaggtaaatcaggcgcaccttggcaccacctgacacattgtacaccagcaccagcacctgacagaacgctgacagaagtcagaagcgacttgatcgcctccaatttggctccggcgggtgagagccccccggcgggtagacgactcggaccgatg

SEQ ID NO: 17333 - DNA, 203 bp, Artificial sequence
  synthetic
ggcgcgccagtcctatacttctaattacttcacactcagtccaggtcaaaggtaaatcaggcgcaccttggcaccacctgacacattgtacaccagcaccagcacctgacagaacgctgacagaagtcagaagcgacttgatcgcctccaatttggcttactcccctgagagcccctactcccgaagacgactcggaccgatg

SEQ ID NO: 17334 - DNA, 203 bp, Artificial sequence
  synthetic
ggcgcgccagtcctttagaaggccttacttcacactcagtccaggtcaaaggtaaatcaggcgcaccttggcaccacctgacacattgtacaccagcaccagcacctgacagaacgctgacagaagtcagaagcgacttgatcgcctccaatttggctttcttggcaaagagccccttcttggcaaaacgactcggaccgatg

SEQ ID NO: 17335 - DNA, 203 bp, Artificial sequence
  synthetic
ggcgcgccagtcctctggtgtgtattacttcacactcagtccaggtcaaaggtaaatcaggcgcaccttggcaccacctgacacattgtacaccagcaccagcacctgacagaacgctgacattcttggcaaacgacttgttcttggcaaatttggctttcttggcaaagagccccttcttggcaaaacgactcggaccgatg

SEQ ID NO: 17336 - DNA, 203 bp, Artificial sequence
  synthetic
ggcgcgccagtcctagtgtgtacgttacttcacactcagtccaggtcaaaggtaaatcaggcgcaccttggcaccacctgacacattgtacaccagcaccagcacgtcaattcctttagacacgtcaattcctttacttgcgtcaattcctttaggctcgtcaattcctttaccccgacaactgaagacgactcggaccgatg

SEQ ID NO: 17337 - DNA, 203 bp, Artificial sequence
  synthetic
ggcgcgccagtcctccacgacgtgttacttcacactcagtccaggtcaaatactccccaggcgcaccttactcccacctgacacattactccccagcaccagcatactcccgaacgctgacatactcccgaagcgacttgtactcccccaatttggcttactcccctgagagcccctactcccgaagacgactcggaccgatg

SEQ ID NO: 17338 - DNA, 203 bp, Artificial sequence
  synthetic
ggcgcgccagtcctaaacaaggccttacttcacgtcaattcctttacaaacgtcaattcctttaacctcgtcaattcctttaacatcgtcaattcctttaagcacgtcaattcctttagacacgtcaattcctttacttgcgtcaattcctttaggctcgtcaattcctttaccccgacaactgaagacgactcggaccgatg

SEQ ID NO: 17339 - DNA, 20 bp, Artificial sequence
  synthetic
cgggtggagcccattgacgt

SEQ ID NO: 17340 - DNA, 20 bp, Artificial sequence
  synthetic
cttcactctcctgtaaaacg

SEQ ID NO: 17341 - DNA, 20 bp, Artificial sequence
  synthetic
gacaccaccatgaccggctc

SEQ ID NO: 17342 - DNA, 20 bp, Artificial sequence
  synthetic
gagagcgactttcaaactcg

SEQ ID NO: 17343 - DNA, 20 bp, Artificial sequence
  synthetic
cccgcgtgtgtgcgcctaat

SEQ ID NO: 17344 - DNA, 20 bp, Artificial sequence
  synthetic
ggctgaaggccgactgtgat

SEQ ID NO: 17345 - DNA, 20 bp, Artificial sequence
  synthetic
attggttggcggacggtgcg

SEQ ID NO: 17346 - DNA, 20 bp, Artificial sequence
  synthetic
cctccttcgccccggggccc

SEQ ID NO: 17347 - DNA, 20 bp, Artificial sequence
  synthetic
taagtgtttccggtggattc

SEQ ID NO: 17348 - DNA, 20 bp, Artificial sequence
  synthetic
aaccttgccgtgctggaatt

SEQ ID NO: 17349 - DNA, 20 bp, Artificial sequence
  synthetic
ctggcgtcacccctctgctc

SEQ ID NO: 17350 - DNA, 20 bp, Artificial sequence
  synthetic
cggctgaaggaggccccagg

SEQ ID NO: 17351 - DNA, 20 bp, Artificial sequence
  synthetic
catgttgagggggggaccgc

SEQ ID NO: 17352 - DNA, 20 bp, Artificial sequence
  synthetic
cttgaaactgcggctcggga

SEQ ID NO: 17353 - DNA, 20 bp, Artificial sequence
  synthetic
gcgcgctcgcatccccaaga

SEQ ID NO: 17354 - DNA, 20 bp, Artificial sequence
  synthetic
cctacggaggtggcagccat

SEQ ID NO: 17355 - DNA, 20 bp, Artificial sequence
  synthetic
ctggatggagcctttctctg

SEQ ID NO: 17356 - DNA, 20 bp, Artificial sequence
  synthetic
agattgtgggcggctgtgtc

SEQ ID NO: 17357 - DNA, 20 bp, Artificial sequence
  synthetic
tctgactccacatccagtcc

SEQ ID NO: 17358 - DNA, 20 bp, Artificial sequence
  synthetic
gtctcctgcgctcctgctgg

SEQ ID NO: 17359 - DNA, 20 bp, Artificial sequence
  synthetic
ctcatccgggttcccgggac

SEQ ID NO: 17360 - DNA, 20 bp, Artificial sequence
  synthetic
cctcacactcggtgcccgga

SEQ ID NO: 17361 - DNA, 20 bp, Artificial sequence
  synthetic
gcccgctgccctttgcctcc

SEQ ID NO: 17362 - DNA, 20 bp, Artificial sequence
  synthetic
aggggctgtgggcgcgcagc

SEQ ID NO: 17363 - DNA, 20 bp, Artificial sequence
  synthetic
acgctcccgggtcacgtgac

SEQ ID NO: 17364 - DNA, 20 bp, Artificial sequence
  synthetic
catgtacagtcctccccagt

SEQ ID NO: 17365 - DNA, 20 bp, Artificial sequence
  synthetic
aggcggcggcgcgaggcagt

SEQ ID NO: 17366 - DNA, 20 bp, Artificial sequence
  synthetic
aagcgatcccctcgccccag

SEQ ID NO: 17367 - DNA, 20 bp, Artificial sequence
  synthetic
ggacttggaacacctgtaac

SEQ ID NO: 17368 - DNA, 20 bp, Artificial sequence
  synthetic
cagaaggcgcagccatgaat

SEQ ID NO: 17369 - DNA, 20 bp, Artificial sequence
  synthetic
cagggcaggggtcctccgcc

SEQ ID NO: 17370 - DNA, 20 bp, Artificial sequence
  synthetic
cgagtgtggccaagggtgcc

SEQ ID NO: 17371 - DNA, 20 bp, Artificial sequence
  synthetic
tctggacccatccagctgag

SEQ ID NO: 17372 - DNA, 20 bp, Artificial sequence
  synthetic
ggcggcgccaccctccgggg

SEQ ID NO: 17373 - DNA, 20 bp, Artificial sequence
  synthetic
cggaggccaggagctcaacc

SEQ ID NO: 17374 - DNA, 20 bp, Artificial sequence
  synthetic
cggtcacctgtctccggtgg

SEQ ID NO: 17375 - DNA, 20 bp, Artificial sequence
  synthetic
gcttcgagcagggcatcgga

SEQ ID NO: 17376 - DNA, 20 bp, Artificial sequence
  synthetic
aagttgcacggtgaattggc

SEQ ID NO: 17377 - DNA, 20 bp, Artificial sequence
  synthetic
gtgcaggagtcctggggcat

SEQ ID NO: 17378 - DNA, 20 bp, Artificial sequence
  synthetic
cagttatcattagtctgcaa

SEQ ID NO: 17379 - DNA, 20 bp, Artificial sequence
  synthetic
agcgaaaagtattaaacaaa

SEQ ID NO: 17380 - DNA, 20 bp, Artificial sequence
  synthetic
ctgcctgctcccccgcccca

SEQ ID NO: 17381 - DNA, 20 bp, Artificial sequence
  synthetic
cagcgctgcgtcggcagtac

SEQ ID NO: 17382 - DNA, 20 bp, Artificial sequence
  synthetic
ccagctccttgcccagacca

SEQ ID NO: 17383 - DNA, 20 bp, Artificial sequence
  synthetic
gcatcttcttgcagattcca

SEQ ID NO: 17384 - DNA, 20 bp, Artificial sequence
  synthetic
gccagcccttttcccgaccc

SEQ ID NO: 17385 - DNA, 20 bp, Artificial sequence
  synthetic
ccaaccatggtgaacttggg

SEQ ID NO: 17386 - DNA, 20 bp, Artificial sequence
  synthetic
cccggacggcctcaccatga

SEQ ID NO: 17387 - DNA, 20 bp, Artificial sequence
  synthetic
aggctagaggctgcgcaagc

SEQ ID NO: 17388 - DNA, 20 bp, Artificial sequence
  synthetic
ccttgcgcaccaggaagtga

SEQ ID NO: 17389 - DNA, 20 bp, Artificial sequence
  synthetic
tcaccgtgttagccaagatg

SEQ ID NO: 17390 - DNA, 20 bp, Artificial sequence
  synthetic
tgtctggccttttgtccttg

SEQ ID NO: 17391 - DNA, 20 bp, Artificial sequence
  synthetic
cacacaccaccttacccctc

SEQ ID NO: 17392 - DNA, 20 bp, Artificial sequence
  synthetic
ccgcgttggctgggtggcct

SEQ ID NO: 17393 - DNA, 20 bp, Artificial sequence
  synthetic
aggtaacttccagggtgcgc

SEQ ID NO: 17394 - DNA, 20 bp, Artificial sequence
  synthetic
tctaagccgggcgcctcacc

SEQ ID NO: 17395 - DNA, 20 bp, Artificial sequence
  synthetic
tcggttggcgcgcaacgggt

SEQ ID NO: 17396 - DNA, 20 bp, Artificial sequence
  synthetic
tggcccgagagggatcccgg

SEQ ID NO: 17397 - DNA, 20 bp, Artificial sequence
  synthetic
cagccagggcagcgccagca

SEQ ID NO: 17398 - DNA, 20 bp, Artificial sequence
  synthetic
gctgctgcggttacctggat

SEQ ID NO: 17399 - DNA, 20 bp, Artificial sequence
  synthetic
ggcaagcggcgggaggggaa

SEQ ID NO: 17400 - DNA, 20 bp, Artificial sequence
  synthetic
aaggagaactacattcctca

SEQ ID NO: 17401 - DNA, 20 bp, Artificial sequence
  synthetic
ctggtgccacagcagctgag

SEQ ID NO: 17402 - DNA, 20 bp, Artificial sequence
  synthetic
ctggcagcggcgaggacccg

SEQ ID NO: 17403 - DNA, 20 bp, Artificial sequence
  synthetic
accgggtacccgggctatgg

SEQ ID NO: 17404 - DNA, 20 bp, Artificial sequence
  synthetic
aacagactccggcccactcc

SEQ ID NO: 17405 - DNA, 20 bp, Artificial sequence
  synthetic
agttcggggaagctgtacgc

SEQ ID NO: 17406 - DNA, 20 bp, Artificial sequence
  synthetic
cctttgctttcagccggact

SEQ ID NO: 17407 - DNA, 20 bp, Artificial sequence
  synthetic
caagatggcggcgcccgagg

SEQ ID NO: 17408 - DNA, 20 bp, Artificial sequence
  synthetic
gaggctctgtacctgcagtg

SEQ ID NO: 17409 - DNA, 20 bp, Artificial sequence
  synthetic
taaacaaggggcatccaaat

SEQ ID NO: 17410 - DNA, 20 bp, Artificial sequence
  synthetic
catcagtcttaccgaagcca

SEQ ID NO: 17411 - DNA, 20 bp, Artificial sequence
  synthetic
ggaagatggaactcattgtc

SEQ ID NO: 17412 - DNA, 20 bp, Artificial sequence
  synthetic
atccattttaatctgcgggg

SEQ ID NO: 17413 - DNA, 20 bp, Artificial sequence
  synthetic
catggcctagtaactgtccg

SEQ ID NO: 17414 - DNA, 20 bp, Artificial sequence
  synthetic
ccggttcgcgtctctctgct

SEQ ID NO: 17415 - DNA, 20 bp, Artificial sequence
  synthetic
gctcggctccgctccaatcc

SEQ ID NO: 17416 - DNA, 20 bp, Artificial sequence
  synthetic
ctgagagccatgtcggccag

SEQ ID NO: 17417 - DNA, 20 bp, Artificial sequence
  synthetic
agagaagtccggatcgtggt

SEQ ID NO: 17418 - DNA, 20 bp, Artificial sequence
  synthetic
gtgtggacgctgtgtatgaa

SEQ ID NO: 17419 - DNA, 20 bp, Artificial sequence
  synthetic
cccaaagccctgagattaca

SEQ ID NO: 17420 - DNA, 20 bp, Artificial sequence
  synthetic
ctgtgacactgctgctccct

SEQ ID NO: 17421 - DNA, 20 bp, Artificial sequence
  synthetic
gcttggcgatgcccagcaga

SEQ ID NO: 17422 - DNA, 20 bp, Artificial sequence
  synthetic
tcactccctgaggcagtggc

SEQ ID NO: 17423 - DNA, 20 bp, Artificial sequence
  synthetic
ctgcgccccggctgcgctcc

SEQ ID NO: 17424 - DNA, 20 bp, Artificial sequence
  synthetic
cagcctgggcggggccgcag

SEQ ID NO: 17425 - DNA, 20 bp, Artificial sequence
  synthetic
gcagagcgtcctagcagtgt

SEQ ID NO: 17426 - DNA, 20 bp, Artificial sequence
  synthetic
ctctgtgggcggccgccggg

SEQ ID NO: 17427 - DNA, 20 bp, Artificial sequence
  synthetic
cagcagagccgagccggccg

SEQ ID NO: 17428 - DNA, 20 bp, Artificial sequence
  synthetic
ggcatccggggcagtaaaac

SEQ ID NO: 17429 - DNA, 20 bp, Artificial sequence
  synthetic
ctgcgtccgacccccggccg

SEQ ID NO: 17430 - DNA, 20 bp, Artificial sequence
  synthetic
gcacctgatctttctcatcc

SEQ ID NO: 17431 - DNA, 20 bp, Artificial sequence
  synthetic
gcggctccaggcacccaaca

SEQ ID NO: 17432 - DNA, 20 bp, Artificial sequence
  synthetic
ccgggcggcaacctttgcag

SEQ ID NO: 17433 - DNA, 20 bp, Artificial sequence
  synthetic
ggccgcaggtgtatttacgg

SEQ ID NO: 17434 - DNA, 20 bp, Artificial sequence
  synthetic
aatggaatcggaaggaagaa

SEQ ID NO: 17435 - DNA, 20 bp, Artificial sequence
  synthetic
ggaagccagaccagagagcg

SEQ ID NO: 17436 - DNA, 20 bp, Artificial sequence
  synthetic
tgaggccctcaggtctctgc

SEQ ID NO: 17437 - DNA, 20 bp, Artificial sequence
  synthetic
gcgcaaccggaactagcctt

SEQ ID NO: 17438 - DNA, 20 bp, Artificial sequence
  synthetic
agaccatggcgaaagccggg

SEQ ID NO: 17439 - DNA, 20 bp, Artificial sequence
  synthetic
gcccctctcctgtctggagg

SEQ ID NO: 17440 - DNA, 20 bp, Artificial sequence
  synthetic
tgcacccacatccttctttc

SEQ ID NO: 17441 - DNA, 20 bp, Artificial sequence
  synthetic
tggttctaaagagtggtgag

SEQ ID NO: 17442 - DNA, 20 bp, Artificial sequence
  synthetic
gtctggagaaaaatgacctt

SEQ ID NO: 17443 - DNA, 20 bp, Artificial sequence
  synthetic
ttgtacggcggcttctcgcg

SEQ ID NO: 17444 - DNA, 20 bp, Artificial sequence
  synthetic
agctcccgccccggaagcgg

SEQ ID NO: 17445 - DNA, 20 bp, Artificial sequence
  synthetic
tgcgcgggtatctctgaagt

SEQ ID NO: 17446 - DNA, 20 bp, Artificial sequence
  synthetic
ttgtttgagtttcttcacac

SEQ ID NO: 17447 - DNA, 20 bp, Artificial sequence
  synthetic
caggaagatggcggcctctg

SEQ ID NO: 17448 - DNA, 20 bp, Artificial sequence
  synthetic
tgccaacccagcagccggct

SEQ ID NO: 17449 - DNA, 20 bp, Artificial sequence
  synthetic
tggtatattcaaggttggat

SEQ ID NO: 17450 - DNA, 20 bp, Artificial sequence
  synthetic
cccagcaacagttactcaaa

SEQ ID NO: 17451 - DNA, 20 bp, Artificial sequence
  synthetic
ggtggggtgtgtgtgtcaaa

SEQ ID NO: 17452 - DNA, 20 bp, Artificial sequence
  synthetic
gagcccatacttgctctttt

SEQ ID NO: 17453 - DNA, 20 bp, Artificial sequence
  synthetic
ggtgagagagtgagggggaa

SEQ ID NO: 17454 - DNA, 20 bp, Artificial sequence
  synthetic
tgccagctgagtcgtgggca

SEQ ID NO: 17455 - DNA, 20 bp, Artificial sequence
  synthetic
gagttacgattcaaactgaa

SEQ ID NO: 17456 - DNA, 20 bp, Artificial sequence
  synthetic
cagccccgactgctcctcct

SEQ ID NO: 17457 - DNA, 20 bp, Artificial sequence
  synthetic
tcttgggggctggaggacgt

SEQ ID NO: 17458 - DNA, 20 bp, Artificial sequence
  synthetic
gagcggagcccggtgacagg

SEQ ID NO: 17459 - DNA, 20 bp, Artificial sequence
  synthetic
ctacagcagcttcggcggcg

SEQ ID NO: 17460 - DNA, 20 bp, Artificial sequence
  synthetic
gccggactctatggggcggg

SEQ ID NO: 17461 - DNA, 20 bp, Artificial sequence
  synthetic
gaaagaggggaagagtatta

SEQ ID NO: 17462 - DNA, 20 bp, Artificial sequence
  synthetic
gtgaagcgatagcgttttgc

SEQ ID NO: 17463 - DNA, 20 bp, Artificial sequence
  synthetic
ccccggaagaggtagctcac

SEQ ID NO: 17464 - DNA, 20 bp, Artificial sequence
  synthetic
cagagccggtgtctccgcct

SEQ ID NO: 17465 - DNA, 20 bp, Artificial sequence
  synthetic
agctgtagtgcttctgggca

SEQ ID NO: 17466 - DNA, 20 bp, Artificial sequence
  synthetic
cggtcccggggccccctggg

SEQ ID NO: 17467 - DNA, 20 bp, Artificial sequence
  synthetic
cagtgaagccgccggcacct

SEQ ID NO: 17468 - DNA, 20 bp, Artificial sequence
  synthetic
cttcccgccaggcaagtgcc

SEQ ID NO: 17469 - DNA, 20 bp, Artificial sequence
  synthetic
cgagggaggtcttgctggag

SEQ ID NO: 17470 - DNA, 20 bp, Artificial sequence
  synthetic
cagccttcagctgcctgtgt

SEQ ID NO: 17471 - DNA, 20 bp, Artificial sequence
  synthetic
gctgaccgttttttgtggtg

SEQ ID NO: 17472 - DNA, 20 bp, Artificial sequence
  synthetic
ttgtcctgctggtccacgcc

SEQ ID NO: 17473 - DNA, 20 bp, Artificial sequence
  synthetic
agggagaatggcggcgcccg

SEQ ID NO: 17474 - DNA, 20 bp, Artificial sequence
  synthetic
gggggactctccaggaagaa

SEQ ID NO: 17475 - DNA, 20 bp, Artificial sequence
  synthetic
tgcgggggaggctgcccgga

SEQ ID NO: 17476 - DNA, 20 bp, Artificial sequence
  synthetic
gccacctttagccgccagga

SEQ ID NO: 17477 - DNA, 20 bp, Artificial sequence
  synthetic
gatgagaccggtgcgactca

SEQ ID NO: 17478 - DNA, 20 bp, Artificial sequence
  synthetic
gtgggcgcggccgggaagct

SEQ ID NO: 17479 - DNA, 20 bp, Artificial sequence
  synthetic
ccttcccgcggaatcggcgc

SEQ ID NO: 17480 - DNA, 20 bp, Artificial sequence
  synthetic
cccgcgctcccctcctcccc

SEQ ID NO: 17481 - DNA, 20 bp, Artificial sequence
  synthetic
gagggaatctgataaagaca

SEQ ID NO: 17482 - DNA, 20 bp, Artificial sequence
  synthetic
ccggtgcgttaccggcagct

SEQ ID NO: 17483 - DNA, 20 bp, Artificial sequence
  synthetic
aaagtttgaatcagcttctc

SEQ ID NO: 17484 - DNA, 20 bp, Artificial sequence
  synthetic
gtccttcctaggactgactt

SEQ ID NO: 17485 - DNA, 20 bp, Artificial sequence
  synthetic
ctccacaccccttgcgcccg

SEQ ID NO: 17486 - DNA, 20 bp, Artificial sequence
  synthetic
agtgccctctgcagctgaat

SEQ ID NO: 17487 - DNA, 20 bp, Artificial sequence
  synthetic
tgttgcagggagtgagggca

SEQ ID NO: 17488 - DNA, 20 bp, Artificial sequence
  synthetic
cgctgttcagtgccggtgtt

SEQ ID NO: 17489 - DNA, 20 bp, Artificial sequence
  synthetic
ccgggccctcccctcaggaa

SEQ ID NO: 17490 - DNA, 20 bp, Artificial sequence
  synthetic
ctccccaccaccaccatctc

SEQ ID NO: 17491 - DNA, 20 bp, Artificial sequence
  synthetic
atttcattttcctcaagttt

SEQ ID NO: 17492 - DNA, 20 bp, Artificial sequence
  synthetic
aaccgtcatgtttctgggga

SEQ ID NO: 17493 - DNA, 20 bp, Artificial sequence
  synthetic
cagcagaggagactgcagac

SEQ ID NO: 17494 - DNA, 20 bp, Artificial sequence
  synthetic
gacccaaccgcagtgaaggg

SEQ ID NO: 17495 - DNA, 20 bp, Artificial sequence
  synthetic
tcacctcaagctgtcccctc

SEQ ID NO: 17496 - DNA, 20 bp, Artificial sequence
  synthetic
cgaaggccccgcccctcaca

SEQ ID NO: 17497 - DNA, 20 bp, Artificial sequence
  synthetic
atttgttgtctgcccacttt

SEQ ID NO: 17498 - DNA, 20 bp, Artificial sequence
  synthetic
taccaagcgcctgtgtctgg

SEQ ID NO: 17499 - DNA, 20 bp, Artificial sequence
  synthetic
cttggtgaggtgactcgcgg

SEQ ID NO: 17500 - DNA, 20 bp, Artificial sequence
  synthetic
ttgaacccaaagtggatgat

SEQ ID NO: 17501 - DNA, 20 bp, Artificial sequence
  synthetic
ggcagccagggtggggccca

SEQ ID NO: 17502 - DNA, 20 bp, Artificial sequence
  synthetic
tgggccagcgggggcgccgc

SEQ ID NO: 17503 - DNA, 20 bp, Artificial sequence
  synthetic
tgcggcgccgcgcggtgagg

SEQ ID NO: 17504 - DNA, 20 bp, Artificial sequence
  synthetic
gaggcagtggaggctgaggc

SEQ ID NO: 17505 - DNA, 20 bp, Artificial sequence
  synthetic
aaatcaatataacctcttct

SEQ ID NO: 17506 - DNA, 20 bp, Artificial sequence
  synthetic
cctataccagcttccttaca

SEQ ID NO: 17507 - DNA, 20 bp, Artificial sequence
  synthetic
cagctacggcgaggaggggc

SEQ ID NO: 17508 - DNA, 20 bp, Artificial sequence
  synthetic
gccaccgagacgcgcagagg

SEQ ID NO: 17509 - DNA, 20 bp, Artificial sequence
  synthetic
ggaggacaacaaagggccgc

SEQ ID NO: 17510 - DNA, 20 bp, Artificial sequence
  synthetic
tcactctggaggatggggtg

SEQ ID NO: 17511 - DNA, 20 bp, Artificial sequence
  synthetic
gcgtatcatctgcgtttcta

SEQ ID NO: 17512 - DNA, 20 bp, Artificial sequence
  synthetic
ccctgtccggccagcccctc

SEQ ID NO: 17513 - DNA, 20 bp, Artificial sequence
  synthetic
ccagagatggcagtgagcga

SEQ ID NO: 17514 - DNA, 20 bp, Artificial sequence
  synthetic
ctaggaaaggctgcttcgcc

SEQ ID NO: 17515 - DNA, 20 bp, Artificial sequence
  synthetic
ttttctttgatacgggagtt

SEQ ID NO: 17516 - DNA, 20 bp, Artificial sequence
  synthetic
gccccgccagctgggccaaa

SEQ ID NO: 17517 - DNA, 20 bp, Artificial sequence
  synthetic
ctgtgaacactatagcgctg

SEQ ID NO: 17518 - DNA, 20 bp, Artificial sequence
  synthetic
tccttagccctgcccctctc

SEQ ID NO: 17519 - DNA, 20 bp, Artificial sequence
  synthetic
tcggcgctcaggaagcatgg

SEQ ID NO: 17520 - DNA, 20 bp, Artificial sequence
  synthetic
ctgatggcttcctccaaccc

SEQ ID NO: 17521 - DNA, 20 bp, Artificial sequence
  synthetic
ttcggtggtgaacgagtctc

SEQ ID NO: 17522 - DNA, 20 bp, Artificial sequence
  synthetic
gcctgcaccggtcaggcagt

SEQ ID NO: 17523 - DNA, 20 bp, Artificial sequence
  synthetic
cttgctgcccctttccagcc

SEQ ID NO: 17524 - DNA, 20 bp, Artificial sequence
  synthetic
gccaggaggaagggcagctt

SEQ ID NO: 17525 - DNA, 20 bp, Artificial sequence
  synthetic
ttgcggggcgcgcgccagcc

SEQ ID NO: 17526 - DNA, 20 bp, Artificial sequence
  synthetic
tgtgcagcaatggccaagat

SEQ ID NO: 17527 - DNA, 20 bp, Artificial sequence
  synthetic
gcagtcaccgcggagcagac

SEQ ID NO: 17528 - DNA, 20 bp, Artificial sequence
  synthetic
ccctgtcaactgagaattaa

SEQ ID NO: 17529 - DNA, 20 bp, Artificial sequence
  synthetic
agcgctgcaaggacaaccgg

SEQ ID NO: 17530 - DNA, 20 bp, Artificial sequence
  synthetic
gagagagaatgtcttttcga

SEQ ID NO: 17531 - DNA, 20 bp, Artificial sequence
  synthetic
cgcttctgtcagctctccct

SEQ ID NO: 17532 - DNA, 20 bp, Artificial sequence
  synthetic
tgctgaaaatccgaagtgcc

SEQ ID NO: 17533 - DNA, 20 bp, Artificial sequence
  synthetic
cccatgtgctgaaaatccga

SEQ ID NO: 17534 - DNA, 20 bp, Artificial sequence
  synthetic
tccaagtctccttggcaaga

SEQ ID NO: 17535 - DNA, 20 bp, Artificial sequence
  synthetic
ggtggtagtggcagtgttcg

SEQ ID NO: 17536 - DNA, 20 bp, Artificial sequence
  synthetic
taggaggggccgtcaggcgg

SEQ ID NO: 17537 - DNA, 20 bp, Artificial sequence
  synthetic
aaaaactttataaacccccc

SEQ ID NO: 17538 - DNA, 20 bp, Artificial sequence
  synthetic
tcactgccatccccgctgtc

SEQ ID NO: 17539 - DNA, 20 bp, Artificial sequence
  synthetic
gcgctagcgtccgggaccgg

SEQ ID NO: 17540 - DNA, 20 bp, Artificial sequence
  synthetic
agtcggcgcctcgggttcct

SEQ ID NO: 17541 - DNA, 20 bp, Artificial sequence
  synthetic
gtcctctcccgccctacagg

SEQ ID NO: 17542 - DNA, 20 bp, Artificial sequence
  synthetic
gaagagggcaccctccgcca

SEQ ID NO: 17543 - DNA, 20 bp, Artificial sequence
  synthetic
accatccccttgccccgccc

SEQ ID NO: 17544 - DNA, 20 bp, Artificial sequence
  synthetic
tacctcctgggcagtgagct

SEQ ID NO: 17545 - DNA, 20 bp, Artificial sequence
  synthetic
cgccttccgctcgtgggagt

SEQ ID NO: 17546 - DNA, 20 bp, Artificial sequence
  synthetic
cgggaagggatggatcgctg

SEQ ID NO: 17547 - DNA, 20 bp, Artificial sequence
  synthetic
catgctggtcctttatggac

SEQ ID NO: 17548 - DNA, 20 bp, Artificial sequence
  synthetic
aggaccgttacgtttcccgg

SEQ ID NO: 17549 - DNA, 20 bp, Artificial sequence
  synthetic
ccacggcggaggcgctgggt

SEQ ID NO: 17550 - DNA, 20 bp, Artificial sequence
  synthetic
ccaagggttggctgactgca

SEQ ID NO: 17551 - DNA, 20 bp, Artificial sequence
  synthetic
ccaagcttctgggtatttct

SEQ ID NO: 17552 - DNA, 20 bp, Artificial sequence
  synthetic
tcccggcgctccctccccga

SEQ ID NO: 17553 - DNA, 20 bp, Artificial sequence
  synthetic
atgcctagcccacaccagtt

SEQ ID NO: 17554 - DNA, 20 bp, Artificial sequence
  synthetic
cttcactggggcagtctctg

SEQ ID NO: 17555 - DNA, 20 bp, Artificial sequence
  synthetic
gcgggggtagttacggtgtt

SEQ ID NO: 17556 - DNA, 20 bp, Artificial sequence
  synthetic
aggacccggaggacgtccgg

SEQ ID NO: 17557 - DNA, 20 bp, Artificial sequence
  synthetic
cacagccacagcccctgact

SEQ ID NO: 17558 - DNA, 20 bp, Artificial sequence
  synthetic
gttaagtgactcacccaagg

SEQ ID NO: 17559 - DNA, 20 bp, Artificial sequence
  synthetic
acgggagcatcctgcaccgt

SEQ ID NO: 17560 - DNA, 20 bp, Artificial sequence
  synthetic
ctgggtggggtccgcgcagc

SEQ ID NO: 17561 - DNA, 20 bp, Artificial sequence
  synthetic
caggaggccatgtcgggtga

SEQ ID NO: 17562 - DNA, 20 bp, Artificial sequence
  synthetic
gcggcagcgccactcgggcg

SEQ ID NO: 17563 - DNA, 20 bp, Artificial sequence
  synthetic
gggtgggtggggccaggagg

SEQ ID NO: 17564 - DNA, 20 bp, Artificial sequence
  synthetic
aatgacagaggctcacagga

SEQ ID NO: 17565 - DNA, 20 bp, Artificial sequence
  synthetic
tcaccacattttagtgagaa

SEQ ID NO: 17566 - DNA, 20 bp, Artificial sequence
  synthetic
cacttcaccctctcgcctcg

SEQ ID NO: 17567 - DNA, 20 bp, Artificial sequence
  synthetic
cttctccctcccctccagaa

SEQ ID NO: 17568 - DNA, 20 bp, Artificial sequence
  synthetic
tgaagagaatttggattcat

SEQ ID NO: 17569 - DNA, 20 bp, Artificial sequence
  synthetic
gcgcagaccgagcatccgcg

SEQ ID NO: 17570 - DNA, 20 bp, Artificial sequence
  synthetic
taaactctcagagtaactgt

SEQ ID NO: 17571 - DNA, 20 bp, Artificial sequence
  synthetic
tgcaaaaagaaaaagagacg

SEQ ID NO: 17572 - DNA, 20 bp, Artificial sequence
  synthetic
gctaccgagcggtgccaggc

SEQ ID NO: 17573 - DNA, 20 bp, Artificial sequence
  synthetic
ggcaccttccactagcaaca

SEQ ID NO: 17574 - DNA, 20 bp, Artificial sequence
  synthetic
ctcgcagcgttgctcacaga

SEQ ID NO: 17575 - DNA, 20 bp, Artificial sequence
  synthetic
ccgcgcggagcccaccattg

SEQ ID NO: 17576 - DNA, 20 bp, Artificial sequence
  synthetic
cttgcggcgctggaggagct

SEQ ID NO: 17577 - DNA, 20 bp, Artificial sequence
  synthetic
ggtccaccacgccttccacc

SEQ ID NO: 17578 - DNA, 20 bp, Artificial sequence
  synthetic
cccacccctttctttttgag

SEQ ID NO: 17579 - DNA, 20 bp, Artificial sequence
  synthetic
tacaaataggaatagggtac

SEQ ID NO: 17580 - DNA, 20 bp, Artificial sequence
  synthetic
tgggcctcccaaaagacagt

SEQ ID NO: 17581 - DNA, 20 bp, Artificial sequence
  synthetic
ctctttccctgctgattcca

SEQ ID NO: 17582 - DNA, 20 bp, Artificial sequence
  synthetic
agcccggggcggcccagtcg

SEQ ID NO: 17583 - DNA, 20 bp, Artificial sequence
  synthetic
agcggggagtcgaggcggcg

SEQ ID NO: 17584 - DNA, 20 bp, Artificial sequence
  synthetic
tttgtctgtaggagcagcgg

SEQ ID NO: 17585 - DNA, 20 bp, Artificial sequence
  synthetic
caacaccaaaacgcatccac

SEQ ID NO: 17586 - DNA, 20 bp, Artificial sequence
  synthetic
gcacagctgggacctcctct

SEQ ID NO: 17587 - DNA, 20 bp, Artificial sequence
  synthetic
tgctccccgccgcttccgtt

SEQ ID NO: 17588 - DNA, 20 bp, Artificial sequence
  synthetic
gagcgcccgccgctgcattt

SEQ ID NO: 17589 - DNA, 20 bp, Artificial sequence
  synthetic
aggtcgagagagggatgcga

SEQ ID NO: 17590 - DNA, 20 bp, Artificial sequence
  synthetic
ctttccggacgccacgtgca

SEQ ID NO: 17591 - DNA, 20 bp, Artificial sequence
  synthetic
ccggcgttgctgtagcgcgt

SEQ ID NO: 17592 - DNA, 20 bp, Artificial sequence
  synthetic
gctaccgcgtctgctggacg

SEQ ID NO: 17593 - DNA, 20 bp, Artificial sequence
  synthetic
caggggcctctcacgtgacc

SEQ ID NO: 17594 - DNA, 20 bp, Artificial sequence
  synthetic
actccagtgcgcccccaacc

SEQ ID NO: 17595 - DNA, 20 bp, Artificial sequence
  synthetic
ttcactcctccattgtctgc

SEQ ID NO: 17596 - DNA, 20 bp, Artificial sequence
  synthetic
gtccttcactcctccattgt

SEQ ID NO: 17597 - DNA, 20 bp, Artificial sequence
  synthetic
gggcgtgtggccgcgggttt

SEQ ID NO: 17598 - DNA, 20 bp, Artificial sequence
  synthetic
cctgaccccctccccccgct

SEQ ID NO: 17599 - DNA, 20 bp, Artificial sequence
  synthetic
cacctgctgtggttatgatg

SEQ ID NO: 17600 - DNA, 20 bp, Artificial sequence
  synthetic
agaggccgagtctccgaggg

SEQ ID NO: 17601 - DNA, 20 bp, Artificial sequence
  synthetic
cggtagttccgccgggtctg

SEQ ID NO: 17602 - DNA, 20 bp, Artificial sequence
  synthetic
cgccaatgatgagctggatt

SEQ ID NO: 17603 - DNA, 20 bp, Artificial sequence
  synthetic
aagaatccaggttttgaggt

SEQ ID NO: 17604 - DNA, 20 bp, Artificial sequence
  synthetic
ctgccacctttgcctcctgg

SEQ ID NO: 17605 - DNA, 20 bp, Artificial sequence
  synthetic
ggggctgcccacgccccctt

SEQ ID NO: 17606 - DNA, 20 bp, Artificial sequence
  synthetic
agggtgtcgccgctgtgccg

SEQ ID NO: 17607 - DNA, 20 bp, Artificial sequence
  synthetic
gggacacggagccgcgagga

SEQ ID NO: 17608 - DNA, 20 bp, Artificial sequence
  synthetic
aatcttgggttgtatctccc

SEQ ID NO: 17609 - DNA, 20 bp, Artificial sequence
  synthetic
ctgggccaatatggcagcgc

SEQ ID NO: 17610 - DNA, 20 bp, Artificial sequence
  synthetic
taggggaggccacgggcttg

SEQ ID NO: 17611 - DNA, 20 bp, Artificial sequence
  synthetic
atggtgaattcgggcctctc

SEQ ID NO: 17612 - DNA, 20 bp, Artificial sequence
  synthetic
agccccagacacggaccccg

SEQ ID NO: 17613 - DNA, 20 bp, Artificial sequence
  synthetic
gagcagaccttccctggagc

SEQ ID NO: 17614 - DNA, 20 bp, Artificial sequence
  synthetic
gggccaaggccagggcctga

SEQ ID NO: 17615 - DNA, 20 bp, Artificial sequence
  synthetic
tctttccgccagtttttgta

SEQ ID NO: 17616 - DNA, 20 bp, Artificial sequence
  synthetic
ggctgaaccgcccggctgag

SEQ ID NO: 17617 - DNA, 20 bp, Artificial sequence
  synthetic
ccgtggcggggatgctgcga

SEQ ID NO: 17618 - DNA, 20 bp, Artificial sequence
  synthetic
ccctcggctgctgcagggat

SEQ ID NO: 17619 - DNA, 20 bp, Artificial sequence
  synthetic
gagctactgagggtctaagt

SEQ ID NO: 17620 - DNA, 20 bp, Artificial sequence
  synthetic
cggcggagagtgcggcatgc

SEQ ID NO: 17621 - DNA, 20 bp, Artificial sequence
  synthetic
tgaagctccctgtggcctgg

SEQ ID NO: 17622 - DNA, 20 bp, Artificial sequence
  synthetic
cgcagggagctggatggaga

SEQ ID NO: 17623 - DNA, 20 bp, Artificial sequence
  synthetic
gcgacccggcctcctagggg

SEQ ID NO: 17624 - DNA, 20 bp, Artificial sequence
  synthetic
gtcgtggtccagacagttta

SEQ ID NO: 17625 - DNA, 20 bp, Artificial sequence
  synthetic
gacaggaagcactttggtcc

SEQ ID NO: 17626 - DNA, 20 bp, Artificial sequence
  synthetic
agctgactcctgctgggccc

SEQ ID NO: 17627 - DNA, 20 bp, Artificial sequence
  synthetic
tagccgctgcctcctcctac

SEQ ID NO: 17628 - DNA, 20 bp, Artificial sequence
  synthetic
ctttttctcccgaaggaaga

SEQ ID NO: 17629 - DNA, 20 bp, Artificial sequence
  synthetic
gcgactctgtactccctgct

SEQ ID NO: 17630 - DNA, 20 bp, Artificial sequence
  synthetic
aactgtcatcgataggaata

SEQ ID NO: 17631 - DNA, 20 bp, Artificial sequence
  synthetic
caggctgagtgctgcggcgc

SEQ ID NO: 17632 - DNA, 20 bp, Artificial sequence
  synthetic
cggggagagcaggggttctg

SEQ ID NO: 17633 - DNA, 20 bp, Artificial sequence
  synthetic
ctcgccgtcggctctacctg

SEQ ID NO: 17634 - DNA, 20 bp, Artificial sequence
  synthetic
aggggaggagccgggtccac

SEQ ID NO: 17635 - DNA, 20 bp, Artificial sequence
  synthetic
gaggtgcaggtcgaagaggc

SEQ ID NO: 17636 - DNA, 20 bp, Artificial sequence
  synthetic
tccgaagcatggcgccggcg

SEQ ID NO: 17637 - DNA, 20 bp, Artificial sequence
  synthetic
gccactgtccggccacagcc

SEQ ID NO: 17638 - DNA, 20 bp, Artificial sequence
  synthetic
cttgggggatcgccgcggct

SEQ ID NO: 17639 - DNA, 20 bp, Artificial sequence
  synthetic
ttaaagtgcttccgcatggt

SEQ ID NO: 17640 - DNA, 20 bp, Artificial sequence
  synthetic
cagctctgctgagagagtgc

SEQ ID NO: 17641 - DNA, 20 bp, Artificial sequence
  synthetic
tccagctccagggacctgtc

SEQ ID NO: 17642 - DNA, 20 bp, Artificial sequence
  synthetic
tccctgcaacccggccggcg

SEQ ID NO: 17643 - DNA, 20 bp, Artificial sequence
  synthetic
caagactcccgtagtcccca

SEQ ID NO: 17644 - DNA, 20 bp, Artificial sequence
  synthetic
gtacaattggctgaggcgct

SEQ ID NO: 17645 - DNA, 20 bp, Artificial sequence
  synthetic
accagggcgcatgcgtaaca

SEQ ID NO: 17646 - DNA, 20 bp, Artificial sequence
  synthetic
ccggtgtacttcagtttccg

SEQ ID NO: 17647 - DNA, 20 bp, Artificial sequence
  synthetic
cgcgtcgactgcccagagtc

SEQ ID NO: 17648 - DNA, 20 bp, Artificial sequence
  synthetic
tttggggttgtccctggact

SEQ ID NO: 17649 - DNA, 20 bp, Artificial sequence
  synthetic
tgcagcccgttcgctcacac

SEQ ID NO: 17650 - DNA, 20 bp, Artificial sequence
  synthetic
gtcccggcatcggccaagat

SEQ ID NO: 17651 - DNA, 20 bp, Artificial sequence
  synthetic
acgctctgtccctgcgtgac

SEQ ID NO: 17652 - DNA, 20 bp, Artificial sequence
  synthetic
cgggcggcggtgaccccggc

SEQ ID NO: 17653 - DNA, 20 bp, Artificial sequence
  synthetic
ccgcacgggggccgcggcca

SEQ ID NO: 17654 - DNA, 20 bp, Artificial sequence
  synthetic
ggcctttcctaggaggtaac

SEQ ID NO: 17655 - DNA, 20 bp, Artificial sequence
  synthetic
ggacgccatggtaagcgcgg

SEQ ID NO: 17656 - DNA, 20 bp, Artificial sequence
  synthetic
ttaccggcggattaagctcg

SEQ ID NO: 17657 - DNA, 20 bp, Artificial sequence
  synthetic
tgtcgaaggaccaaaggcga

SEQ ID NO: 17658 - DNA, 20 bp, Artificial sequence
  synthetic
tggagcgcggcggaggtgag

SEQ ID NO: 17659 - DNA, 20 bp, Artificial sequence
  synthetic
tcaaccctcccggaagtgag

SEQ ID NO: 17660 - DNA, 20 bp, Artificial sequence
  synthetic
agaaatgaatgaaatgaaat

SEQ ID NO: 17661 - DNA, 20 bp, Artificial sequence
  synthetic
aagaagctgctgacatcctg

SEQ ID NO: 17662 - DNA, 20 bp, Artificial sequence
  synthetic
gccgcagtgacccagtaatg

SEQ ID NO: 17663 - DNA, 20 bp, Artificial sequence
  synthetic
tccggcgccagctacgccgc

SEQ ID NO: 17664 - DNA, 20 bp, Artificial sequence
  synthetic
gcgcttccctggtcaggcac

SEQ ID NO: 17665 - DNA, 20 bp, Artificial sequence
  synthetic
tagtttgcggcatcctgtgg

SEQ ID NO: 17666 - DNA, 20 bp, Artificial sequence
  synthetic
ggcagagaaacagctggaaa

SEQ ID NO: 17667 - DNA, 20 bp, Artificial sequence
  synthetic
aggcggtcagcctgcagcat

SEQ ID NO: 17668 - DNA, 20 bp, Artificial sequence
  synthetic
atcttcgggctgtcagagtt

SEQ ID NO: 17669 - DNA, 20 bp, Artificial sequence
  synthetic
ccgcggaagatgagcagcag

SEQ ID NO: 17670 - DNA, 20 bp, Artificial sequence
  synthetic
agcggcctggcgtcggcgct

SEQ ID NO: 17671 - DNA, 20 bp, Artificial sequence
  synthetic
cggcggtggtggctgagtcc

SEQ ID NO: 17672 - DNA, 20 bp, Artificial sequence
  synthetic
tgccacctccctctttcttc

SEQ ID NO: 17673 - DNA, 20 bp, Artificial sequence
  synthetic
gtgccctaggctcggccggc

SEQ ID NO: 17674 - DNA, 20 bp, Artificial sequence
  synthetic
ggcctctctgagcccggctt

SEQ ID NO: 17675 - DNA, 20 bp, Artificial sequence
  synthetic
ccgagctgcatcttagggag

SEQ ID NO: 17676 - DNA, 20 bp, Artificial sequence
  synthetic
aaaacgagtttttcacgact

SEQ ID NO: 17677 - DNA, 20 bp, Artificial sequence
  synthetic
ctggcggccgggtaagggtc

SEQ ID NO: 17678 - DNA, 20 bp, Artificial sequence
  synthetic
gccggccctgcgcctcccgc

SEQ ID NO: 17679 - DNA, 20 bp, Artificial sequence
  synthetic
cggtgcgggagaggggttgg

SEQ ID NO: 17680 - DNA, 20 bp, Artificial sequence
  synthetic
tggcctggagggagacctcg

SEQ ID NO: 17681 - DNA, 20 bp, Artificial sequence
  synthetic
cactcaccgccgctggggga

SEQ ID NO: 17682 - DNA, 20 bp, Artificial sequence
  synthetic
aagccccgggaccgccccgc

SEQ ID NO: 17683 - DNA, 20 bp, Artificial sequence
  synthetic
gaggctccatctccattctg

SEQ ID NO: 17684 - DNA, 20 bp, Artificial sequence
  synthetic
gtcccccagagtctccaact

SEQ ID NO: 17685 - DNA, 20 bp, Artificial sequence
  synthetic
gcaggggtggttggtgtcaa

SEQ ID NO: 17686 - DNA, 20 bp, Artificial sequence
  synthetic
gaggtgctgtgcaggaggcg

SEQ ID NO: 17687 - DNA, 20 bp, Artificial sequence
  synthetic
aaggggtcctccctgcgcca

SEQ ID NO: 17688 - DNA, 20 bp, Artificial sequence
  synthetic
ttgctgaggaggcggattag

SEQ ID NO: 17689 - DNA, 20 bp, Artificial sequence
  synthetic
tccccctcatttgcagatgc

SEQ ID NO: 17690 - DNA, 20 bp, Artificial sequence
  synthetic
tggcggcagtggcgtcactt

SEQ ID NO: 17691 - DNA, 20 bp, Artificial sequence
  synthetic
gtttcctgccagtcgggagg

SEQ ID NO: 17692 - DNA, 20 bp, Artificial sequence
  synthetic
cgtattgagaggagatacac

SEQ ID NO: 17693 - DNA, 20 bp, Artificial sequence
  synthetic
actccggccttccctgccct

SEQ ID NO: 17694 - DNA, 20 bp, Artificial sequence
  synthetic
agttcgacggtaaacgaccc

SEQ ID NO: 17695 - DNA, 20 bp, Artificial sequence
  synthetic
cccccgggggaggccatgaa

SEQ ID NO: 17696 - DNA, 20 bp, Artificial sequence
  synthetic
attcgaagctacttcacagt

SEQ ID NO: 17697 - DNA, 20 bp, Artificial sequence
  synthetic
gtgcacatggggtgttggag

SEQ ID NO: 17698 - DNA, 20 bp, Artificial sequence
  synthetic
agagctggggtcgtggcggc

SEQ ID NO: 17699 - DNA, 20 bp, Artificial sequence
  synthetic
gggtgaggagctggtggcgt

SEQ ID NO: 17700 - DNA, 20 bp, Artificial sequence
  synthetic
accctagtgacaggagccga

SEQ ID NO: 17701 - DNA, 20 bp, Artificial sequence
  synthetic
gaggcagcggagacagaggc

SEQ ID NO: 17702 - DNA, 20 bp, Artificial sequence
  synthetic
gcacgcagtccgacttggcc

SEQ ID NO: 17703 - DNA, 20 bp, Artificial sequence
  synthetic
gcgacccccgggcggggcca

SEQ ID NO: 17704 - DNA, 20 bp, Artificial sequence
  synthetic
agagccggagccgtggcctg

SEQ ID NO: 17705 - DNA, 20 bp, Artificial sequence
  synthetic
caagcgccggcgttctctgc

SEQ ID NO: 17706 - DNA, 20 bp, Artificial sequence
  synthetic
tgggcagagggattggcaag

SEQ ID NO: 17707 - DNA, 20 bp, Artificial sequence
  synthetic
ggcgcagtaaacagtctcct

SEQ ID NO: 17708 - DNA, 20 bp, Artificial sequence
  synthetic
tttgggattctggaattcga

SEQ ID NO: 17709 - DNA, 20 bp, Artificial sequence
  synthetic
ttgagtcgggcaaggaagag

SEQ ID NO: 17710 - DNA, 20 bp, Artificial sequence
  synthetic
cctttgtcaagtcatcccct

SEQ ID NO: 17711 - DNA, 20 bp, Artificial sequence
  synthetic
gatcctgaggaggcagctgc

SEQ ID NO: 17712 - DNA, 20 bp, Artificial sequence
  synthetic
ccgggagcggcggcggccat

SEQ ID NO: 17713 - DNA, 20 bp, Artificial sequence
  synthetic
aggagcatcagaccacagat

SEQ ID NO: 17714 - DNA, 20 bp, Artificial sequence
  synthetic
cgtccctcgcacacgcagag

SEQ ID NO: 17715 - DNA, 20 bp, Artificial sequence
  synthetic
gcgagctagccagcaggcat

SEQ ID NO: 17716 - DNA, 20 bp, Artificial sequence
  synthetic
ggggcgggccacagtctcca

SEQ ID NO: 17717 - DNA, 20 bp, Artificial sequence
  synthetic
tcggaagcctaggaggctgg

SEQ ID NO: 17718 - DNA, 20 bp, Artificial sequence
  synthetic
ggagcctctagaactatgag

SEQ ID NO: 17719 - DNA, 20 bp, Artificial sequence
  synthetic
attgcctattggcctgtgct

SEQ ID NO: 17720 - DNA, 20 bp, Artificial sequence
  synthetic
ctgaaataacagaagctgtg

SEQ ID NO: 17721 - DNA, 20 bp, Artificial sequence
  synthetic
gtcactgcgccggggtagtg

SEQ ID NO: 17722 - DNA, 20 bp, Artificial sequence
  synthetic
cgtaagtccctctcgtgcgc

SEQ ID NO: 17723 - DNA, 20 bp, Artificial sequence
  synthetic
gcgtccctctctccacgagg

SEQ ID NO: 17724 - DNA, 20 bp, Artificial sequence
  synthetic
ctggagccagactgtggtct

SEQ ID NO: 17725 - DNA, 20 bp, Artificial sequence
  synthetic
gcctcagtctccccagctct

SEQ ID NO: 17726 - DNA, 20 bp, Artificial sequence
  synthetic
cctttgccccctcacacctc

SEQ ID NO: 17727 - DNA, 20 bp, Artificial sequence
  synthetic
agcctggacccttagcggtg

SEQ ID NO: 17728 - DNA, 20 bp, Artificial sequence
  synthetic
aaccaattagtgacaacact

SEQ ID NO: 17729 - DNA, 20 bp, Artificial sequence
  synthetic
caggactttagccggttgag

SEQ ID NO: 17730 - DNA, 20 bp, Artificial sequence
  synthetic
tggacttgcagaccggaatg

SEQ ID NO: 17731 - DNA, 20 bp, Artificial sequence
  synthetic
caacccactttccgcgggga

SEQ ID NO: 17732 - DNA, 20 bp, Artificial sequence
  synthetic
tgctccccgcgccaccctcc

SEQ ID NO: 17733 - DNA, 20 bp, Artificial sequence
  synthetic
actgcagcccagtgctgaat

SEQ ID NO: 17734 - DNA, 20 bp, Artificial sequence
  synthetic
taaaggcttgtctttcccct

SEQ ID NO: 17735 - DNA, 20 bp, Artificial sequence
  synthetic
ctgagtgactgccaaggaag

SEQ ID NO: 17736 - DNA, 20 bp, Artificial sequence
  synthetic
ctctcggcgctcactgctct

SEQ ID NO: 17737 - DNA, 20 bp, Artificial sequence
  synthetic
ccggcgggcccagtgttgga

SEQ ID NO: 17738 - DNA, 20 bp, Artificial sequence
  synthetic
cagcccaaaagggcccggtc

SEQ ID NO: 17739 - DNA, 20 bp, Artificial sequence
  synthetic
caggtctctgacttcgggct

SEQ ID NO: 17740 - DNA, 20 bp, Artificial sequence
  synthetic
tttgccgggtgcttcagatc

SEQ ID NO: 17741 - DNA, 20 bp, Artificial sequence
  synthetic
cctcgccagccaggtgctcg

SEQ ID NO: 17742 - DNA, 20 bp, Artificial sequence
  synthetic
actgtgaaccaggagtgagt

SEQ ID NO: 17743 - DNA, 20 bp, Artificial sequence
  synthetic
tagtcgaccgtgtccgcgcg

SEQ ID NO: 17744 - DNA, 20 bp, Artificial sequence
  synthetic
cttctttgcggctcggccat

SEQ ID NO: 17745 - DNA, 20 bp, Artificial sequence
  synthetic
tctccagtcctgacgacacc

SEQ ID NO: 17746 - DNA, 20 bp, Artificial sequence
  synthetic
tcgcaagctgaaaatcttgc

SEQ ID NO: 17747 - DNA, 20 bp, Artificial sequence
  synthetic
ttccctcttgtcgcccaggc

SEQ ID NO: 17748 - DNA, 20 bp, Artificial sequence
  synthetic
cccgcggtggcgggggttgg

SEQ ID NO: 17749 - DNA, 20 bp, Artificial sequence
  synthetic
aattttatttcagggtaaac

SEQ ID NO: 17750 - DNA, 20 bp, Artificial sequence
  synthetic
agaagcttataaaatagctt

SEQ ID NO: 17751 - DNA, 20 bp, Artificial sequence
  synthetic
cgggcggcggctgtgttgcg

SEQ ID NO: 17752 - DNA, 20 bp, Artificial sequence
  synthetic
ggagccagcgcggagcacct

SEQ ID NO: 17753 - DNA, 20 bp, Artificial sequence
  synthetic
gggagggagagagagcgcgc

SEQ ID NO: 17754 - DNA, 20 bp, Artificial sequence
  synthetic
cccttgcttaaaaaatttta

SEQ ID NO: 17755 - DNA, 20 bp, Artificial sequence
  synthetic
agatggcagccccgggggac

SEQ ID NO: 17756 - DNA, 20 bp, Artificial sequence
  synthetic
tcccgcaacccgataccatc

SEQ ID NO: 17757 - DNA, 20 bp, Artificial sequence
  synthetic
cctccaccgggccttgcagg

SEQ ID NO: 17758 - DNA, 20 bp, Artificial sequence
  synthetic
tgacccccgagaaggaggct

SEQ ID NO: 17759 - DNA, 20 bp, Artificial sequence
  synthetic
accccttcctcgggtttagg

SEQ ID NO: 17760 - DNA, 20 bp, Artificial sequence
  synthetic
ggcctgaggctgctcccgga

SEQ ID NO: 17761 - DNA, 20 bp, Artificial sequence
  synthetic
cccgaccgcattttacgtgg

SEQ ID NO: 17762 - DNA, 20 bp, Artificial sequence
  synthetic
ctcctctcagatttgtgtgc

SEQ ID NO: 17763 - DNA, 20 bp, Artificial sequence
  synthetic
ctgctttcatgccctttctt

SEQ ID NO: 17764 - DNA, 20 bp, Artificial sequence
  synthetic
gcgctggccagagatgcctg

SEQ ID NO: 17765 - DNA, 20 bp, Artificial sequence
  synthetic
tactgggattctctgaccga

SEQ ID NO: 17766 - DNA, 20 bp, Artificial sequence
  synthetic
ccctgctttctgcattcttc

SEQ ID NO: 17767 - DNA, 20 bp, Artificial sequence
  synthetic
gttagcccgtcagtccctgc

SEQ ID NO: 17768 - DNA, 20 bp, Artificial sequence
  synthetic
gcgacactatccgtgcggcc

SEQ ID NO: 17769 - DNA, 20 bp, Artificial sequence
  synthetic
ggcggcgacctggtcgcaag

SEQ ID NO: 17770 - DNA, 20 bp, Artificial sequence
  synthetic
ctgctgtttctcagacagca

SEQ ID NO: 17771 - DNA, 20 bp, Artificial sequence
  synthetic
caggcggttgcgttccccgt

SEQ ID NO: 17772 - DNA, 20 bp, Artificial sequence
  synthetic
gcgtcgcgccctggggccgg

SEQ ID NO: 17773 - DNA, 20 bp, Artificial sequence
  synthetic
gagtggaatggccgcgggcg

SEQ ID NO: 17774 - DNA, 20 bp, Artificial sequence
  synthetic
gctgtctccctcggcctgtg

SEQ ID NO: 17775 - DNA, 20 bp, Artificial sequence
  synthetic
cgcttccgcccgctgtcctg

SEQ ID NO: 17776 - DNA, 20 bp, Artificial sequence
  synthetic
ggaggatatacctttttttc

SEQ ID NO: 17777 - DNA, 20 bp, Artificial sequence
  synthetic
cgagtccgaccccgcccttc

SEQ ID NO: 17778 - DNA, 20 bp, Artificial sequence
  synthetic
ggtgcttgcgtgtggtggtg

SEQ ID NO: 17779 - DNA, 20 bp, Artificial sequence
  synthetic
gaagacttacaggcagagag

SEQ ID NO: 17780 - DNA, 20 bp, Artificial sequence
  synthetic
actaatggaagaaatctgct

SEQ ID NO: 17781 - DNA, 20 bp, Artificial sequence
  synthetic
ccccgagaagccgtccagga

SEQ ID NO: 17782 - DNA, 20 bp, Artificial sequence
  synthetic
ctgagaagtaaatggtattt

SEQ ID NO: 17783 - DNA, 20 bp, Artificial sequence
  synthetic
aagcgagccgggctacgggg

SEQ ID NO: 17784 - DNA, 20 bp, Artificial sequence
  synthetic
tctcgggagatgcaggatgt

SEQ ID NO: 17785 - DNA, 20 bp, Artificial sequence
  synthetic
ttggcatcgccactctgggc

SEQ ID NO: 17786 - DNA, 20 bp, Artificial sequence
  synthetic
gtaacggcttggtaattatg

SEQ ID NO: 17787 - DNA, 20 bp, Artificial sequence
  synthetic
cccaaggggttttaggaaag

SEQ ID NO: 17788 - DNA, 20 bp, Artificial sequence
  synthetic
gggccggccttcaagcaaga

SEQ ID NO: 17789 - DNA, 20 bp, Artificial sequence
  synthetic
tcctaagcttctggcaagta

SEQ ID NO: 17790 - DNA, 20 bp, Artificial sequence
  synthetic
gaagcctgcgagttccggaa

SEQ ID NO: 17791 - DNA, 20 bp, Artificial sequence
  synthetic
ctcggcgctcgggttacccc

SEQ ID NO: 17792 - DNA, 20 bp, Artificial sequence
  synthetic
gcccttctccgagctgtgcg

SEQ ID NO: 17793 - DNA, 20 bp, Artificial sequence
  synthetic
tgtgacggcgcgtttctatt

SEQ ID NO: 17794 - DNA, 20 bp, Artificial sequence
  synthetic
gatggcggcctcatgcttgg

SEQ ID NO: 17795 - DNA, 20 bp, Artificial sequence
  synthetic
cgcgcccctagaacgctttg

SEQ ID NO: 17796 - DNA, 20 bp, Artificial sequence
  synthetic
aaacagaaattccaccagcc

SEQ ID NO: 17797 - DNA, 20 bp, Artificial sequence
  synthetic
gggtccctgagcctcagctg

SEQ ID NO: 17798 - DNA, 20 bp, Artificial sequence
  synthetic
catgaggggtgacagaggcc

SEQ ID NO: 17799 - DNA, 20 bp, Artificial sequence
  synthetic
cggtggaaccgaggagaacg

SEQ ID NO: 17800 - DNA, 20 bp, Artificial sequence
  synthetic
ccctcccgggctgcggctgc

SEQ ID NO: 17801 - DNA, 20 bp, Artificial sequence
  synthetic
ccagcagcggcagcgggagc

SEQ ID NO: 17802 - DNA, 20 bp, Artificial sequence
  synthetic
cccttagtgagctgtatttt

SEQ ID NO: 17803 - DNA, 20 bp, Artificial sequence
  synthetic
gcgattctctgctgccagag

SEQ ID NO: 17804 - DNA, 20 bp, Artificial sequence
  synthetic
ggttttgctcagattggtgt

SEQ ID NO: 17805 - DNA, 20 bp, Artificial sequence
  synthetic
cagggaactaccttgagtat

SEQ ID NO: 17806 - DNA, 20 bp, Artificial sequence
  synthetic
ctccctttctcctcctcctc

SEQ ID NO: 17807 - DNA, 20 bp, Artificial sequence
  synthetic
gtgacttcccccaaccgcag

SEQ ID NO: 17808 - DNA, 20 bp, Artificial sequence
  synthetic
tcacagctgctgttgtctgc

SEQ ID NO: 17809 - DNA, 20 bp, Artificial sequence
  synthetic
ctgggacgggggaaaggaga

SEQ ID NO: 17810 - DNA, 20 bp, Artificial sequence
  synthetic
gggagtgtctgggcgctcag

SEQ ID NO: 17811 - DNA, 20 bp, Artificial sequence
  synthetic
gggactgccagtgtgtggag

SEQ ID NO: 17812 - DNA, 20 bp, Artificial sequence
  synthetic
ccttccgggtcactgccatg

SEQ ID NO: 17813 - DNA, 20 bp, Artificial sequence
  synthetic
tcctgcctggattccacagc

SEQ ID NO: 17814 - DNA, 20 bp, Artificial sequence
  synthetic
tggtgatcactaggtgccaa

SEQ ID NO: 17815 - DNA, 20 bp, Artificial sequence
  synthetic
cagatctcgcgaggttcagg

SEQ ID NO: 17816 - DNA, 20 bp, Artificial sequence
  synthetic
gcggtagtgacggtggcgtt

SEQ ID NO: 17817 - DNA, 20 bp, Artificial sequence
  synthetic
tctcggaacgcgccgcagaa

SEQ ID NO: 17818 - DNA, 20 bp, Artificial sequence
  synthetic
caagtttagggaagtgaaag

SEQ ID NO: 17819 - DNA, 20 bp, Artificial sequence
  synthetic
caatcttcgctcctccaatc

SEQ ID NO: 17820 - DNA, 20 bp, Artificial sequence
  synthetic
ccatcatggcggatcaaggt

SEQ ID NO: 17821 - DNA, 20 bp, Artificial sequence
  synthetic
cgcgccggagcgggaccgac

SEQ ID NO: 17822 - DNA, 20 bp, Artificial sequence
  synthetic
acccacataaaatctacgag

SEQ ID NO: 17823 - DNA, 20 bp, Artificial sequence
  synthetic
tctccaggagcaacctctac

SEQ ID NO: 17824 - DNA, 20 bp, Artificial sequence
  synthetic
acagaatggctgcacattaa

SEQ ID NO: 17825 - DNA, 20 bp, Artificial sequence
  synthetic
cccgggtctcggacaggcgg

SEQ ID NO: 17826 - DNA, 20 bp, Artificial sequence
  synthetic
cctcgggagtaaatatcttc

SEQ ID NO: 17827 - DNA, 20 bp, Artificial sequence
  synthetic
tgcaagcctagttccaaccc

SEQ ID NO: 17828 - DNA, 20 bp, Artificial sequence
  synthetic
gccttgtctacctcttgccc

SEQ ID NO: 17829 - DNA, 20 bp, Artificial sequence
  synthetic
ttcccttccgcccccttctc

SEQ ID NO: 17830 - DNA, 20 bp, Artificial sequence
  synthetic
cggagtgttggtgagtgacg

SEQ ID NO: 17831 - DNA, 20 bp, Artificial sequence
  synthetic
gactctatatatacagaggg

SEQ ID NO: 17832 - DNA, 20 bp, Artificial sequence
  synthetic
gagggagcttcctagctggg

SEQ ID NO: 17833 - DNA, 20 bp, Artificial sequence
  synthetic
cccgggaggagagggcggag

SEQ ID NO: 17834 - DNA, 20 bp, Artificial sequence
  synthetic
ggacgggagccggaccctgg

SEQ ID NO: 17835 - DNA, 20 bp, Artificial sequence
  synthetic
acctcccccagaggctgcag

SEQ ID NO: 17836 - DNA, 20 bp, Artificial sequence
  synthetic
cccggacatgatggcacatg

SEQ ID NO: 17837 - DNA, 20 bp, Artificial sequence
  synthetic
gggcacgacgagaaagtccg

SEQ ID NO: 17838 - DNA, 20 bp, Artificial sequence
  synthetic
gcacacagagcaccagctcc

SEQ ID NO: 17839 - DNA, 20 bp, Artificial sequence
  synthetic
ctcccagggcgatgcaaagc

SEQ ID NO: 17840 - DNA, 20 bp, Artificial sequence
  synthetic
agcggagagcaaagtgggct

SEQ ID NO: 17841 - DNA, 20 bp, Artificial sequence
  synthetic
accctgtgcagccaggagcc

SEQ ID NO: 17842 - DNA, 20 bp, Artificial sequence
  synthetic
tcatgctcgcttcacggagg

SEQ ID NO: 17843 - DNA, 20 bp, Artificial sequence
  synthetic
ggacagggaagggttaaagg

SEQ ID NO: 17844 - DNA, 20 bp, Artificial sequence
  synthetic
ttctcggagagcacggaact

SEQ ID NO: 17845 - DNA, 20 bp, Artificial sequence
  synthetic
cacgcctgccaggagcaagc

SEQ ID NO: 17846 - DNA, 20 bp, Artificial sequence
  synthetic
ggcaatggggaactctgagg

SEQ ID NO: 17847 - DNA, 20 bp, Artificial sequence
  synthetic
cacagacatctcctttcccg

SEQ ID NO: 17848 - DNA, 20 bp, Artificial sequence
  synthetic
ctgtaggacgacctcgggtc

SEQ ID NO: 17849 - DNA, 20 bp, Artificial sequence
  synthetic
taacggcaatgcggctgcaa

SEQ ID NO: 17850 - DNA, 20 bp, Artificial sequence
  synthetic
ccagcatcttggcctctgtg

SEQ ID NO: 17851 - DNA, 20 bp, Artificial sequence
  synthetic
gatagctgcttggtctgaag

SEQ ID NO: 17852 - DNA, 20 bp, Artificial sequence
  synthetic
aggaggagatcatcgagctc

SEQ ID NO: 17853 - DNA, 20 bp, Artificial sequence
  synthetic
gtcagcagaagagataaaag

SEQ ID NO: 17854 - DNA, 20 bp, Artificial sequence
  synthetic
tcaggctccgtgctgttgga

SEQ ID NO: 17855 - DNA, 20 bp, Artificial sequence
  synthetic
gaagaaggcaggggccctta

SEQ ID NO: 17856 - DNA, 20 bp, Artificial sequence
  synthetic
acggccctgaccgcccgcgg

SEQ ID NO: 17857 - DNA, 20 bp, Artificial sequence
  synthetic
ggcgccgacatcgcgacagc

SEQ ID NO: 17858 - DNA, 20 bp, Artificial sequence
  synthetic
cccgggtgctactttatggg

SEQ ID NO: 17859 - DNA, 20 bp, Artificial sequence
  synthetic
ataagtaatgactttcagtg

SEQ ID NO: 17860 - DNA, 20 bp, Artificial sequence
  synthetic
cctcgcagctcgcattcgga

SEQ ID NO: 17861 - DNA, 20 bp, Artificial sequence
  synthetic
acccctcggtggagataaag

SEQ ID NO: 17862 - DNA, 20 bp, Artificial sequence
  synthetic
tgtcgctgaagcagatgagt

SEQ ID NO: 17863 - DNA, 20 bp, Artificial sequence
  synthetic
gcgtagcgccagggcctgag

SEQ ID NO: 17864 - DNA, 20 bp, Artificial sequence
  synthetic
gctgggcggatggagcagga

SEQ ID NO: 17865 - DNA, 20 bp, Artificial sequence
  synthetic
ccgggaagatggcggccgtg

SEQ ID NO: 17866 - DNA, 20 bp, Artificial sequence
  synthetic
gtggggtacgagcttcctgc

SEQ ID NO: 17867 - DNA, 20 bp, Artificial sequence
  synthetic
gtccagagtccagggactcg

SEQ ID NO: 17868 - DNA, 20 bp, Artificial sequence
  synthetic
ggagagactaccgtcctgga

SEQ ID NO: 17869 - DNA, 20 bp, Artificial sequence
  synthetic
cccagcaaagagcaacacag

SEQ ID NO: 17870 - DNA, 20 bp, Artificial sequence
  synthetic
ctgatttttagaactccaca

SEQ ID NO: 17871 - DNA, 20 bp, Artificial sequence
  synthetic
aaaaatcaactgccctgctg

SEQ ID NO: 17872 - DNA, 20 bp, Artificial sequence
  synthetic
ctatcgcctccctctagtct

SEQ ID NO: 17873 - DNA, 20 bp, Artificial sequence
  synthetic
taaatgaacttgtctggttt

SEQ ID NO: 17874 - DNA, 20 bp, Artificial sequence
  synthetic
gggtgaccttggttaatatt

SEQ ID NO: 17875 - DNA, 20 bp, Artificial sequence
  synthetic
gcgggccgcgcggcgcattt

SEQ ID NO: 17876 - DNA, 20 bp, Artificial sequence
  synthetic
gaggggcggcaacctcctgc

SEQ ID NO: 17877 - DNA, 20 bp, Artificial sequence
  synthetic
ctgctgctgctcactcagtt

SEQ ID NO: 17878 - DNA, 20 bp, Artificial sequence
  synthetic
ttctgagccaggtacaatga

SEQ ID NO: 17879 - DNA, 20 bp, Artificial sequence
  synthetic
ttgaggagagcttgaggaga

SEQ ID NO: 17880 - DNA, 20 bp, Artificial sequence
  synthetic
gcacattcggcccccgcgac

SEQ ID NO: 17881 - DNA, 20 bp, Artificial sequence
  synthetic
tggctttgtgagtgcgggca

SEQ ID NO: 17882 - DNA, 20 bp, Artificial sequence
  synthetic
gcattccccacacaacaccc

SEQ ID NO: 17883 - DNA, 20 bp, Artificial sequence
  synthetic
cccccgagcacgaagttggc

SEQ ID NO: 17884 - DNA, 20 bp, Artificial sequence
  synthetic
aaactgggctcccactcagc

SEQ ID NO: 17885 - DNA, 20 bp, Artificial sequence
  synthetic
ctgcacctcaaccgtgcgga

SEQ ID NO: 17886 - DNA, 20 bp, Artificial sequence
  synthetic
cagacccgccgccatgacgc

SEQ ID NO: 17887 - DNA, 20 bp, Artificial sequence
  synthetic
agggcgaggggcggggagcg

SEQ ID NO: 17888 - DNA, 20 bp, Artificial sequence
  synthetic
acacctgaaagcagcaccaa

SEQ ID NO: 17889 - DNA, 20 bp, Artificial sequence
  synthetic
cagcgacagagccaaaatca

SEQ ID NO: 17890 - DNA, 20 bp, Artificial sequence
  synthetic
cttggtgcccacctgtgcgc

SEQ ID NO: 17891 - DNA, 20 bp, Artificial sequence
  synthetic
cccaggccgcggcccagctg

SEQ ID NO: 17892 - DNA, 20 bp, Artificial sequence
  synthetic
gacgtcgccgagcgcgaggg

SEQ ID NO: 17893 - DNA, 20 bp, Artificial sequence
  synthetic
cgtcacgggcctcagctggg

SEQ ID NO: 17894 - DNA, 20 bp, Artificial sequence
  synthetic
cccgagggacgagtgacagc

SEQ ID NO: 17895 - DNA, 20 bp, Artificial sequence
  synthetic
accgccgctccggcctcccg

SEQ ID NO: 17896 - DNA, 20 bp, Artificial sequence
  synthetic
gggtctgactgacttgcagc

SEQ ID NO: 17897 - DNA, 20 bp, Artificial sequence
  synthetic
ggaaaatcctgttgtgaata

SEQ ID NO: 17898 - DNA, 20 bp, Artificial sequence
  synthetic
tcatttatctttattcttaa

SEQ ID NO: 17899 - DNA, 20 bp, Artificial sequence
  synthetic
cactgtgagcgattcggaaa

SEQ ID NO: 17900 - DNA, 20 bp, Artificial sequence
  synthetic
cgggtgtcgagggcgggttg

SEQ ID NO: 17901 - DNA, 20 bp, Artificial sequence
  synthetic
aggctgagaagatcgtgagg

SEQ ID NO: 17902 - DNA, 20 bp, Artificial sequence
  synthetic
gaggagctaagcgtcatcgc

SEQ ID NO: 17903 - DNA, 20 bp, Artificial sequence
  synthetic
acgcagcgagcgatcggccg

SEQ ID NO: 17904 - DNA, 20 bp, Artificial sequence
  synthetic
tgcgctcggctccgcctggt

SEQ ID NO: 17905 - DNA, 20 bp, Artificial sequence
  synthetic
ctggtgactcggctgcagaa

SEQ ID NO: 17906 - DNA, 20 bp, Artificial sequence
  synthetic
ggctgtgggtgccgctgagc

SEQ ID NO: 17907 - DNA, 20 bp, Artificial sequence
  synthetic
agatgaagctgaacatctcc

SEQ ID NO: 17908 - DNA, 20 bp, Artificial sequence
  synthetic
gccccccgtcccggcccccc

SEQ ID NO: 17909 - DNA, 20 bp, Artificial sequence
  synthetic
ttttcgctcgtcgactgcgg

SEQ ID NO: 17910 - DNA, 20 bp, Artificial sequence
  synthetic
actgcttacccacaatctgc

SEQ ID NO: 17911 - DNA, 20 bp, Artificial sequence
  synthetic
cccggaagtggcctgaaggc

SEQ ID NO: 17912 - DNA, 20 bp, Artificial sequence
  synthetic
gcctctctcttgctgcctag

SEQ ID NO: 17913 - DNA, 20 bp, Artificial sequence
  synthetic
ccgccatgagggagatcgtg

SEQ ID NO: 17914 - DNA, 20 bp, Artificial sequence
  synthetic
gtctgtggtggcgcgggcga

SEQ ID NO: 17915 - DNA, 20 bp, Artificial sequence
  synthetic
tcctctcaccggcccctgga

SEQ ID NO: 17916 - DNA, 20 bp, Artificial sequence
  synthetic
gactcaagttcttcagttca

SEQ ID NO: 17917 - DNA, 20 bp, Artificial sequence
  synthetic
tctgcttagcgacttggggt

SEQ ID NO: 17918 - DNA, 20 bp, Artificial sequence
  synthetic
cccacgacatcttcgcaggg

SEQ ID NO: 17919 - DNA, 20 bp, Artificial sequence
  synthetic
ccggcgccggaagtgagctg

SEQ ID NO: 17920 - DNA, 20 bp, Artificial sequence
  synthetic
ttgcgacataggccgagcag

SEQ ID NO: 17921 - DNA, 20 bp, Artificial sequence
  synthetic
gttcgcggagttcgcccgct

SEQ ID NO: 17922 - DNA, 20 bp, Artificial sequence
  synthetic
agggagctgagtgtttacag

SEQ ID NO: 17923 - DNA, 20 bp, Artificial sequence
  synthetic
gggccaaacgccggcctaga

SEQ ID NO: 17924 - DNA, 20 bp, Artificial sequence
  synthetic
gtctttctcaacggcaaatt

SEQ ID NO: 17925 - DNA, 20 bp, Artificial sequence
  synthetic
cgcgctgagaccgggaccgg

SEQ ID NO: 17926 - DNA, 20 bp, Artificial sequence
  synthetic
gaagctaaggctgcgttggg

SEQ ID NO: 17927 - DNA, 20 bp, Artificial sequence
  synthetic
agctcagcccagcccagccc

SEQ ID NO: 17928 - DNA, 20 bp, Artificial sequence
  synthetic
gagcggctgcttcctccggg

SEQ ID NO: 17929 - DNA, 20 bp, Artificial sequence
  synthetic
cctatgcagcctggtttcta

SEQ ID NO: 17930 - DNA, 20 bp, Artificial sequence
  synthetic
ggcccacagtcaccgccgct

SEQ ID NO: 17931 - DNA, 20 bp, Artificial sequence
  synthetic
agctggaacccatctcccgt

SEQ ID NO: 17932 - DNA, 20 bp, Artificial sequence
  synthetic
cgccgctgtccccgctgcgc

SEQ ID NO: 17933 - DNA, 20 bp, Artificial sequence
  synthetic
actctctttgtgggcaacct

SEQ ID NO: 17934 - DNA, 20 bp, Artificial sequence
  synthetic
gggcctgggaggcggcccgg

SEQ ID NO: 17935 - DNA, 20 bp, Artificial sequence
  synthetic
ctccccgcctcgcagagttg

SEQ ID NO: 17936 - DNA, 20 bp, Artificial sequence
  synthetic
ctccagacccgcacgccgcg

SEQ ID NO: 17937 - DNA, 20 bp, Artificial sequence
  synthetic
ctcccaaccccaagagccca

SEQ ID NO: 17938 - DNA, 20 bp, Artificial sequence
  synthetic
acccgctttcctcaactctc

SEQ ID NO: 17939 - DNA, 20 bp, Artificial sequence
  synthetic
gtggtggcggctgaggcggc

SEQ ID NO: 17940 - DNA, 20 bp, Artificial sequence
  synthetic
gcagcggctagggcggcggt

SEQ ID NO: 17941 - DNA, 20 bp, Artificial sequence
  synthetic
agcagccaacacaccagccc

SEQ ID NO: 17942 - DNA, 20 bp, Artificial sequence
  synthetic
ttaaagttcctcgtaatttt

SEQ ID NO: 17943 - DNA, 20 bp, Artificial sequence
  synthetic
gcagcacacatcggtccacc

SEQ ID NO: 17944 - DNA, 20 bp, Artificial sequence
  synthetic
gaacttttgctgaagcgaag

SEQ ID NO: 17945 - DNA, 20 bp, Artificial sequence
  synthetic
acacgggctcattgcggtgt

SEQ ID NO: 17946 - DNA, 20 bp, Artificial sequence
  synthetic
ggttccaagaaggctgtgac

SEQ ID NO: 17947 - DNA, 20 bp, Artificial sequence
  synthetic
aaatggcgcctccggccccc

SEQ ID NO: 17948 - DNA, 20 bp, Artificial sequence
  synthetic
tgcctggagggcgggaggga

SEQ ID NO: 17949 - DNA, 20 bp, Artificial sequence
  synthetic
gagccagagtctgtcaggcg

SEQ ID NO: 17950 - DNA, 20 bp, Artificial sequence
  synthetic
ccttcgcggtgcccactcca

SEQ ID NO: 17951 - DNA, 20 bp, Artificial sequence
  synthetic
ccagctcccaggaaagctgg

SEQ ID NO: 17952 - DNA, 20 bp, Artificial sequence
  synthetic
caactggcacaagcgccgca

SEQ ID NO: 17953 - DNA, 20 bp, Artificial sequence
  synthetic
gtcggaagggcgtcgcgcgg

SEQ ID NO: 17954 - DNA, 20 bp, Artificial sequence
  synthetic
gatggacgtactggtgtctg

SEQ ID NO: 17955 - DNA, 20 bp, Artificial sequence
  synthetic
ggatgtgggcggtcgcagct

SEQ ID NO: 17956 - DNA, 20 bp, Artificial sequence
  synthetic
cagctggttgtgggagagtt

SEQ ID NO: 17957 - DNA, 20 bp, Artificial sequence
  synthetic
ggtcccgggcgcgtttcggg

SEQ ID NO: 17958 - DNA, 20 bp, Artificial sequence
  synthetic
caccacagtaggtccctcgg

SEQ ID NO: 17959 - DNA, 20 bp, Artificial sequence
  synthetic
catgcatgctcccgggaagg

SEQ ID NO: 17960 - DNA, 20 bp, Artificial sequence
  synthetic
ctttcctcgcacagccaggc

SEQ ID NO: 17961 - DNA, 20 bp, Artificial sequence
  synthetic
aaaacgcgcggggggcgtcc

SEQ ID NO: 17962 - DNA, 20 bp, Artificial sequence
  synthetic
ccgagctgtcgccgccgccg

SEQ ID NO: 17963 - DNA, 20 bp, Artificial sequence
  synthetic
acgaccacgcctgtgccgct

SEQ ID NO: 17964 - DNA, 20 bp, Artificial sequence
  synthetic
gctccgaccgcgagcgtctc

SEQ ID NO: 17965 - DNA, 20 bp, Artificial sequence
  synthetic
tccagaggccatggacaggc

SEQ ID NO: 17966 - DNA, 20 bp, Artificial sequence
  synthetic
gcggacgccatggcgaccaa

SEQ ID NO: 17967 - DNA, 20 bp, Artificial sequence
  synthetic
cgacttccctaagggcattt

SEQ ID NO: 17968 - DNA, 20 bp, Artificial sequence
  synthetic
ccatgaagttcaatcccttc

SEQ ID NO: 17969 - DNA, 20 bp, Artificial sequence
  synthetic
cagccatgtctctagtgatc

SEQ ID NO: 17970 - DNA, 20 bp, Artificial sequence
  synthetic
ggatccctagatcccgtggg

SEQ ID NO: 17971 - DNA, 20 bp, Artificial sequence
  synthetic
tgggtttggctggcctcgat

SEQ ID NO: 17972 - DNA, 20 bp, Artificial sequence
  synthetic
ggaaacggggaagtcaggtg

SEQ ID NO: 17973 - DNA, 20 bp, Artificial sequence
  synthetic
aggccaagtcgcgctcgtcc

SEQ ID NO: 17974 - DNA, 20 bp, Artificial sequence
  synthetic
actctcttccagcctccgac

SEQ ID NO: 17975 - DNA, 20 bp, Artificial sequence
  synthetic
tggaaggaggggccgtgagg

SEQ ID NO: 17976 - DNA, 20 bp, Artificial sequence
  synthetic
cggttgctgcttgctgtgag

SEQ ID NO: 17977 - DNA, 20 bp, Artificial sequence
  synthetic
tctcgcggggcggctgcggt

SEQ ID NO: 17978 - DNA, 20 bp, Artificial sequence
  synthetic
gggcggagaggcggcggtgg

SEQ ID NO: 17979 - DNA, 20 bp, Artificial sequence
  synthetic
gttcatttgagtagatcgga

SEQ ID NO: 17980 - DNA, 20 bp, Artificial sequence
  synthetic
cccaatccttcgccatccga

SEQ ID NO: 17981 - DNA, 20 bp, Artificial sequence
  synthetic
agggttggtgggagttgcga

SEQ ID NO: 17982 - DNA, 20 bp, Artificial sequence
  synthetic
agtcagagttgagagacaga

SEQ ID NO: 17983 - DNA, 20 bp, Artificial sequence
  synthetic
tccgacccccatttcggctg

SEQ ID NO: 17984 - DNA, 20 bp, Artificial sequence
  synthetic
ccctgtcgccaccgaggtcg

SEQ ID NO: 17985 - DNA, 20 bp, Artificial sequence
  synthetic
cggacgccgggaggaggaga

SEQ ID NO: 17986 - DNA, 20 bp, Artificial sequence
  synthetic
gctattccgctgtaacagct

SEQ ID NO: 17987 - DNA, 20 bp, Artificial sequence
  synthetic
tagcgagcgagctcccaggc

SEQ ID NO: 17988 - DNA, 20 bp, Artificial sequence
  synthetic
cgacctcgcgagccttccgc

SEQ ID NO: 17989 - DNA, 20 bp, Artificial sequence
  synthetic
gcttgtggcgtctccgccgc

SEQ ID NO: 17990 - DNA, 20 bp, Artificial sequence
  synthetic
tcccgacccctgggagcgcc

SEQ ID NO: 17991 - DNA, 20 bp, Artificial sequence
  synthetic
tgatcagatccgccccggct

SEQ ID NO: 17992 - DNA, 20 bp, Artificial sequence
  synthetic
tctcaaactgtgagtaacta

SEQ ID NO: 17993 - DNA, 20 bp, Artificial sequence
  synthetic
ccgttagcggcgttggggtt

SEQ ID NO: 17994 - DNA, 20 bp, Artificial sequence
  synthetic
caaggttgaggccgagttcc

SEQ ID NO: 17995 - DNA, 20 bp, Artificial sequence
  synthetic
tcctcgcttcctccgcggtc

SEQ ID NO: 17996 - DNA, 20 bp, Artificial sequence
  synthetic
tgatgcttccctgctccctc

SEQ ID NO: 17997 - DNA, 20 bp, Artificial sequence
  synthetic
gcaccctcgcgggcggaccc

SEQ ID NO: 17998 - DNA, 20 bp, Artificial sequence
  synthetic
gaagcggcgtcggcggctgg

SEQ ID NO: 17999 - DNA, 20 bp, Artificial sequence
  synthetic
aaatggcggcctacctgcag

SEQ ID NO: 18000 - DNA, 20 bp, Artificial sequence
  synthetic
ctgcagcgcggagcagaaag

SEQ ID NO: 18001 - DNA, 20 bp, Artificial sequence
  synthetic
cggtgtgggcgcaggctgca

SEQ ID NO: 18002 - DNA, 20 bp, Artificial sequence
  synthetic
tcccttcttcctctcccttt

SEQ ID NO: 18003 - DNA, 20 bp, Artificial sequence
  synthetic
cccgactctgtcctggacag

SEQ ID NO: 18004 - DNA, 20 bp, Artificial sequence
  synthetic
ggttctggaaacgccgggag

SEQ ID NO: 18005 - DNA, 20 bp, Artificial sequence
  synthetic
cgccggtgtccgcccgtgtc

SEQ ID NO: 18006 - DNA, 20 bp, Artificial sequence
  synthetic
ttcaggaaagcaagcagccc

SEQ ID NO: 18007 - DNA, 20 bp, Artificial sequence
  synthetic
gcgattgagtggccgaggaa

SEQ ID NO: 18008 - DNA, 20 bp, Artificial sequence
  synthetic
aaaatgacgaacacaaaggg

SEQ ID NO: 18009 - DNA, 20 bp, Artificial sequence
  synthetic
gattgtggtgttcagcatta

SEQ ID NO: 18010 - DNA, 20 bp, Artificial sequence
  synthetic
ctgtggagagccgggtgcga

SEQ ID NO: 18011 - DNA, 20 bp, Artificial sequence
  synthetic
ggaggacttgcaacactccg

SEQ ID NO: 18012 - DNA, 20 bp, Artificial sequence
  synthetic
tccatccatcttaaaggaag

SEQ ID NO: 18013 - DNA, 20 bp, Artificial sequence
  synthetic
ggcggcggcggcggtggctg

SEQ ID NO: 18014 - DNA, 20 bp, Artificial sequence
  synthetic
cccggatgtcagccccccgc

SEQ ID NO: 18015 - DNA, 20 bp, Artificial sequence
  synthetic
agtgttagcggggaacgctg

SEQ ID NO: 18016 - DNA, 20 bp, Artificial sequence
  synthetic
gcctccgccgcggctcgtgg

SEQ ID NO: 18017 - DNA, 20 bp, Artificial sequence
  synthetic
tctagacttcagtttcagtt

SEQ ID NO: 18018 - DNA, 20 bp, Artificial sequence
  synthetic
gaactgagaattacaccatc

SEQ ID NO: 18019 - DNA, 20 bp, Artificial sequence
  synthetic
ctggaacttccgcctggcag

SEQ ID NO: 18020 - DNA, 20 bp, Artificial sequence
  synthetic
cgcctcttgtgaggcgcgcg

SEQ ID NO: 18021 - DNA, 20 bp, Artificial sequence
  synthetic
aggcccgggtgcgaggaggg

SEQ ID NO: 18022 - DNA, 20 bp, Artificial sequence
  synthetic
tgctcaaaccgagttctgga

SEQ ID NO: 18023 - DNA, 20 bp, Artificial sequence
  synthetic
gtcgcaaatcctcctaagcc

SEQ ID NO: 18024 - DNA, 20 bp, Artificial sequence
  synthetic
tctagaaccgtagccagaca

SEQ ID NO: 18025 - DNA, 20 bp, Artificial sequence
  synthetic
ggctccttcctgcggtgctt

SEQ ID NO: 18026 - DNA, 20 bp, Artificial sequence
  synthetic
tcgcaccaaaaccgtgaaga

SEQ ID NO: 18027 - DNA, 20 bp, Artificial sequence
  synthetic
caaccagctagcgtgcaagg

SEQ ID NO: 18028 - DNA, 20 bp, Artificial sequence
  synthetic
tctccgcgcctgacccctcc

SEQ ID NO: 18029 - DNA, 20 bp, Artificial sequence
  synthetic
cgtgctctcgcgagatttgg

SEQ ID NO: 18030 - DNA, 20 bp, Artificial sequence
  synthetic
tccctcgggtccagttcagc

SEQ ID NO: 18031 - DNA, 20 bp, Artificial sequence
  synthetic
agtagctcctgggacatcgc

SEQ ID NO: 18032 - DNA, 20 bp, Artificial sequence
  synthetic
atttcaagagtggccaggtg

SEQ ID NO: 18033 - DNA, 20 bp, Artificial sequence
  synthetic
gagctccgcgtgtagctacg

SEQ ID NO: 18034 - DNA, 20 bp, Artificial sequence
  synthetic
agaaacataagtcccgcgcg

SEQ ID NO: 18035 - DNA, 20 bp, Artificial sequence
  synthetic
atgctttgttaacagtgaag

SEQ ID NO: 18036 - DNA, 20 bp, Artificial sequence
  synthetic
atggcgacggagcatcccga

SEQ ID NO: 18037 - DNA, 20 bp, Artificial sequence
  synthetic
ccgcgctcggcacgacatga

SEQ ID NO: 18038 - DNA, 20 bp, Artificial sequence
  synthetic
gtgagggacaagcgtttgcc

SEQ ID NO: 18039 - DNA, 20 bp, Artificial sequence
  synthetic
gctggcgaggcgcgtgggac

SEQ ID NO: 18040 - DNA, 20 bp, Artificial sequence
  synthetic
ggaactgggactccctgtgg

SEQ ID NO: 18041 - DNA, 20 bp, Artificial sequence
  synthetic
tctctcgccaggcgtcctcg

SEQ ID NO: 18042 - DNA, 20 bp, Artificial sequence
  synthetic
gcggcggcggcggctgcagc

SEQ ID NO: 18043 - DNA, 20 bp, Artificial sequence
  synthetic
ttgtgtagcctgaggcggcg

SEQ ID NO: 18044 - DNA, 20 bp, Artificial sequence
  synthetic
gaacctcaagagagggaggt

SEQ ID NO: 18045 - DNA, 20 bp, Artificial sequence
  synthetic
cccaggggccggcgcacgaa

SEQ ID NO: 18046 - DNA, 20 bp, Artificial sequence
  synthetic
agagaaggtctcattcggtg

SEQ ID NO: 18047 - DNA, 20 bp, Artificial sequence
  synthetic
caccatcgagccgggaagat

SEQ ID NO: 18048 - DNA, 20 bp, Artificial sequence
  synthetic
ggccgcaccgtgtgggctgt

SEQ ID NO: 18049 - DNA, 20 bp, Artificial sequence
  synthetic
ggcgcctggctgccaggcta

SEQ ID NO: 18050 - DNA, 20 bp, Artificial sequence
  synthetic
ccgagcgaacttggcccagg

SEQ ID NO: 18051 - DNA, 20 bp, Artificial sequence
  synthetic
gagccggggtcccggtagct

SEQ ID NO: 18052 - DNA, 20 bp, Artificial sequence
  synthetic
tggcacgggttcgcacaccc

SEQ ID NO: 18053 - DNA, 20 bp, Artificial sequence
  synthetic
aacattgaccaccacacact

SEQ ID NO: 18054 - DNA, 20 bp, Artificial sequence
  synthetic
gcgagccggaggaggccgcg

SEQ ID NO: 18055 - DNA, 20 bp, Artificial sequence
  synthetic
cccctcgcccttggcagcct

SEQ ID NO: 18056 - DNA, 20 bp, Artificial sequence
  synthetic
ccccgggagccgcactccag

SEQ ID NO: 18057 - DNA, 20 bp, Artificial sequence
  synthetic
ctgacggattcgtactacaa

SEQ ID NO: 18058 - DNA, 20 bp, Artificial sequence
  synthetic
cagagaggcgctgctgacac

SEQ ID NO: 18059 - DNA, 20 bp, Artificial sequence
  synthetic
agggccggggtcttgggagt

SEQ ID NO: 18060 - DNA, 20 bp, Artificial sequence
  synthetic
ctgaactggctcctggggcc

SEQ ID NO: 18061 - DNA, 20 bp, Artificial sequence
  synthetic
ctccctagccgatgggaaat

SEQ ID NO: 18062 - DNA, 20 bp, Artificial sequence
  synthetic
tacactggctttttgattct

SEQ ID NO: 18063 - DNA, 20 bp, Artificial sequence
  synthetic
gaggaagggagggggagaga

SEQ ID NO: 18064 - DNA, 20 bp, Artificial sequence
  synthetic
ccttgcttgctcgcgctttc

SEQ ID NO: 18065 - DNA, 20 bp, Artificial sequence
  synthetic
agtggactccggggctccta

SEQ ID NO: 18066 - DNA, 20 bp, Artificial sequence
  synthetic
ggagacccccacattcaaga

SEQ ID NO: 18067 - DNA, 20 bp, Artificial sequence
  synthetic
ctgtgaggtgttcagcatta

SEQ ID NO: 18068 - DNA, 20 bp, Artificial sequence
  synthetic
ctctcctccttccccgctgc

SEQ ID NO: 18069 - DNA, 20 bp, Artificial sequence
  synthetic
gtccggactctttttcctct

SEQ ID NO: 18070 - DNA, 20 bp, Artificial sequence
  synthetic
ggaggctgcccttcggggtc

SEQ ID NO: 18071 - DNA, 20 bp, Artificial sequence
  synthetic
atatttgagtaaagtgagtt

SEQ ID NO: 18072 - DNA, 20 bp, Artificial sequence
  synthetic
gcgtgggccaaacctgcgcc

SEQ ID NO: 18073 - DNA, 20 bp, Artificial sequence
  synthetic
cccagataatcttccaatgg

SEQ ID NO: 18074 - DNA, 20 bp, Artificial sequence
  synthetic
accgggagacaggagcgggg

SEQ ID NO: 18075 - DNA, 20 bp, Artificial sequence
  synthetic
accttccaggactgggccca

SEQ ID NO: 18076 - DNA, 20 bp, Artificial sequence
  synthetic
gcgggtgacgcgacgacggc

SEQ ID NO: 18077 - DNA, 20 bp, Artificial sequence
  synthetic
catcgcgggaggcgcatggc

SEQ ID NO: 18078 - DNA, 20 bp, Artificial sequence
  synthetic
agctcagctgatcggttgcc

SEQ ID NO: 18079 - DNA, 20 bp, Artificial sequence
  synthetic
actgccgtgatgctgaagtt

SEQ ID NO: 18080 - DNA, 20 bp, Artificial sequence
  synthetic
ggcgacggcgaggagatagt

SEQ ID NO: 18081 - DNA, 20 bp, Artificial sequence
  synthetic
cgcctcctgacaagcgggag

SEQ ID NO: 18082 - DNA, 20 bp, Artificial sequence
  synthetic
tgcgaccgtatccgctagcg

SEQ ID NO: 18083 - DNA, 20 bp, Artificial sequence
  synthetic
aatcaggtaggtaactctct

SEQ ID NO: 18084 - DNA, 20 bp, Artificial sequence
  synthetic
gtgggagtggagtggagcgg

SEQ ID NO: 18085 - DNA, 20 bp, Artificial sequence
  synthetic
aacaactgctcagagtgcga

SEQ ID NO: 18086 - DNA, 20 bp, Artificial sequence
  synthetic
ggtgtgtttatatgcctgac

SEQ ID NO: 18087 - DNA, 20 bp, Artificial sequence
  synthetic
cgcctcgctcctcttcaggg

SEQ ID NO: 18088 - DNA, 20 bp, Artificial sequence
  synthetic
cacgctctgcgaggccttga

SEQ ID NO: 18089 - DNA, 20 bp, Artificial sequence
  synthetic
gccccgcctgagctcaggag

SEQ ID NO: 18090 - DNA, 20 bp, Artificial sequence
  synthetic
ctcgagcagtctctggaaca

SEQ ID NO: 18091 - DNA, 20 bp, Artificial sequence
  synthetic
aagaagaagagggggaggag

SEQ ID NO: 18092 - DNA, 20 bp, Artificial sequence
  synthetic
cgcgtcacgcggtggtgaat

SEQ ID NO: 18093 - DNA, 20 bp, Artificial sequence
  synthetic
gaagtggtcccgcagaggcg

SEQ ID NO: 18094 - DNA, 20 bp, Artificial sequence
  synthetic
cagcgctgccatggctgggg

SEQ ID NO: 18095 - DNA, 20 bp, Artificial sequence
  synthetic
ccagatcttttctcggatcc

SEQ ID NO: 18096 - DNA, 20 bp, Artificial sequence
  synthetic
gagacatccaggagggcgac

SEQ ID NO: 18097 - DNA, 20 bp, Artificial sequence
  synthetic
ccaccgtccgggagccgccg

SEQ ID NO: 18098 - DNA, 20 bp, Artificial sequence
  synthetic
tttgggggcttggcttagcg

SEQ ID NO: 18099 - DNA, 20 bp, Artificial sequence
  synthetic
ttggtctcaggtgtggactc

SEQ ID NO: 18100 - DNA, 20 bp, Artificial sequence
  synthetic
ggctgccgggagagatgctg

SEQ ID NO: 18101 - DNA, 20 bp, Artificial sequence
  synthetic
gaaggcagagtatgtgcatc

SEQ ID NO: 18102 - DNA, 20 bp, Artificial sequence
  synthetic
gcgccagcgctgcatccctg

SEQ ID NO: 18103 - DNA, 20 bp, Artificial sequence
  synthetic
agatccttgttgccgtccct

SEQ ID NO: 18104 - DNA, 20 bp, Artificial sequence
  synthetic
agccttcgtccctgcggtgc

SEQ ID NO: 18105 - DNA, 20 bp, Artificial sequence
  synthetic
ccagcgtccgaacgggcaga

SEQ ID NO: 18106 - DNA, 20 bp, Artificial sequence
  synthetic
gccccctagttcccaaaggg

SEQ ID NO: 18107 - DNA, 20 bp, Artificial sequence
  synthetic
ctgtttctttctttcttcct

SEQ ID NO: 18108 - DNA, 20 bp, Artificial sequence
  synthetic
tggagccctgacattgctgc

SEQ ID NO: 18109 - DNA, 20 bp, Artificial sequence
  synthetic
tccgtcttccttctgactgg

SEQ ID NO: 18110 - DNA, 20 bp, Artificial sequence
  synthetic
cctgtctgtggcaccagaca

SEQ ID NO: 18111 - DNA, 20 bp, Artificial sequence
  synthetic
tcccgggcagaaaggcgaca

SEQ ID NO: 18112 - DNA, 20 bp, Artificial sequence
  synthetic
ccagcgtcctgtcgcctcct

SEQ ID NO: 18113 - DNA, 20 bp, Artificial sequence
  synthetic
ctgcctcatggaaatgcctt

SEQ ID NO: 18114 - DNA, 20 bp, Artificial sequence
  synthetic
accggccgcgggcataaaag

SEQ ID NO: 18115 - DNA, 20 bp, Artificial sequence
  synthetic
cacggcccatgtgtcgcact

SEQ ID NO: 18116 - DNA, 20 bp, Artificial sequence
  synthetic
ggaggccgcgcccgggaccc

SEQ ID NO: 18117 - DNA, 20 bp, Artificial sequence
  synthetic
aggtgcggaccttaaactca

SEQ ID NO: 18118 - DNA, 20 bp, Artificial sequence
  synthetic
agccacgggcccacgcccgc

SEQ ID NO: 18119 - DNA, 20 bp, Artificial sequence
  synthetic
gctcggggcgacgcggcgct

SEQ ID NO: 18120 - DNA, 20 bp, Artificial sequence
  synthetic
tctttcttaaaggactgatt

SEQ ID NO: 18121 - DNA, 20 bp, Artificial sequence
  synthetic
ctcgcaggcgccctcagatc

SEQ ID NO: 18122 - DNA, 20 bp, Artificial sequence
  synthetic
ctccaactccagttctttcc

SEQ ID NO: 18123 - DNA, 20 bp, Artificial sequence
  synthetic
ggagccagacgtgtggagtc

SEQ ID NO: 18124 - DNA, 20 bp, Artificial sequence
  synthetic
ggcaactcccacgcaggccg

SEQ ID NO: 18125 - DNA, 20 bp, Artificial sequence
  synthetic
gcgccgccccgcctcctgtc

SEQ ID NO: 18126 - DNA, 20 bp, Artificial sequence
  synthetic
gctggaggcatgcccacagc

SEQ ID NO: 18127 - DNA, 20 bp, Artificial sequence
  synthetic
gagtgcggcgcagcgcagct

SEQ ID NO: 18128 - DNA, 20 bp, Artificial sequence
  synthetic
gtccttccgaggtgaaggaa

SEQ ID NO: 18129 - DNA, 20 bp, Artificial sequence
  synthetic
gagtagtctgcctgaccacc

SEQ ID NO: 18130 - DNA, 20 bp, Artificial sequence
  synthetic
ctcaggcgttgctgtttctt

SEQ ID NO: 18131 - DNA, 20 bp, Artificial sequence
  synthetic
cctcgcagagttgtttctcg

SEQ ID NO: 18132 - DNA, 20 bp, Artificial sequence
  synthetic
cctccagccagtgctgacca

SEQ ID NO: 18133 - DNA, 20 bp, Artificial sequence
  synthetic
gcgcctatcgctggctcttg

SEQ ID NO: 18134 - DNA, 20 bp, Artificial sequence
  synthetic
ctcagtccatcagggggggg

SEQ ID NO: 18135 - DNA, 20 bp, Artificial sequence
  synthetic
ccagaactagtggcgggctg

SEQ ID NO: 18136 - DNA, 20 bp, Artificial sequence
  synthetic
tcaggggacaggccaaccca

SEQ ID NO: 18137 - DNA, 20 bp, Artificial sequence
  synthetic
tggcggcggtggcggctgcg

SEQ ID NO: 18138 - DNA, 20 bp, Artificial sequence
  synthetic
gtcctcccgggcagaaaggc

SEQ ID NO: 18139 - DNA, 20 bp, Artificial sequence
  synthetic
ttctgaggccttcccagcta

SEQ ID NO: 18140 - DNA, 20 bp, Artificial sequence
  synthetic
gaaggcggacggcgagcgcc

SEQ ID NO: 18141 - DNA, 20 bp, Artificial sequence
  synthetic
gagggaggagaactgggggc

SEQ ID NO: 18142 - DNA, 20 bp, Artificial sequence
  synthetic
tcgaggctcctcccgctgcg

SEQ ID NO: 18143 - DNA, 20 bp, Artificial sequence
  synthetic
cacagctggttggcgtcgcc

SEQ ID NO: 18144 - DNA, 20 bp, Artificial sequence
  synthetic
tcctgcctcccggcctggtc

SEQ ID NO: 18145 - DNA, 20 bp, Artificial sequence
  synthetic
gtcctggtccacgagttgga

SEQ ID NO: 18146 - DNA, 20 bp, Artificial sequence
  synthetic
ttccccgtaggcagcccgcc

SEQ ID NO: 18147 - DNA, 20 bp, Artificial sequence
  synthetic
ttccagtggctcgcaagcct

SEQ ID NO: 18148 - DNA, 20 bp, Artificial sequence
  synthetic
agccctcaggcgaacctctc

SEQ ID NO: 18149 - DNA, 20 bp, Artificial sequence
  synthetic
aaaagctcctaggtgcgcgg

SEQ ID NO: 18150 - DNA, 20 bp, Artificial sequence
  synthetic
gttgtgcatccagaggtgga

SEQ ID NO: 18151 - DNA, 20 bp, Artificial sequence
  synthetic
gtccctgactttatatggct

SEQ ID NO: 18152 - DNA, 20 bp, Artificial sequence
  synthetic
ccgtttgtcccttgcggtac

SEQ ID NO: 18153 - DNA, 20 bp, Artificial sequence
  synthetic
cgagccctgcgagggccgat

SEQ ID NO: 18154 - DNA, 20 bp, Artificial sequence
  synthetic
gcaccttcttgccaagcctc

SEQ ID NO: 18155 - DNA, 20 bp, Artificial sequence
  synthetic
acaaaccccacccacaaagc

SEQ ID NO: 18156 - DNA, 20 bp, Artificial sequence
  synthetic
ggcgagcaacgctggagcat

SEQ ID NO: 18157 - DNA, 20 bp, Artificial sequence
  synthetic
tgccggcagctcttgacccg

SEQ ID NO: 18158 - DNA, 20 bp, Artificial sequence
  synthetic
ggccggtgagctcactagct

SEQ ID NO: 18159 - DNA, 20 bp, Artificial sequence
  synthetic
ggcgctggtgtaggctccaa

SEQ ID NO: 18160 - DNA, 20 bp, Artificial sequence
  synthetic
ctctgggccgccacctccgc

SEQ ID NO: 18161 - DNA, 20 bp, Artificial sequence
  synthetic
cactccgaagtggcagcagc

SEQ ID NO: 18162 - DNA, 20 bp, Artificial sequence
  synthetic
tcaatttggtactctgtaac

SEQ ID NO: 18163 - DNA, 20 bp, Artificial sequence
  synthetic
gcttctttgtttcgtgaaga

SEQ ID NO: 18164 - DNA, 20 bp, Artificial sequence
  synthetic
aggaacgccggctcttcgcc

SEQ ID NO: 18165 - DNA, 20 bp, Artificial sequence
  synthetic
gacagggaacagccagacga

SEQ ID NO: 18166 - DNA, 20 bp, Artificial sequence
  synthetic
tggcagtgcgggcagagccc

SEQ ID NO: 18167 - DNA, 20 bp, Artificial sequence
  synthetic
ccatccccgtaatcagtgaa

SEQ ID NO: 18168 - DNA, 20 bp, Artificial sequence
  synthetic
agagctgtccccggttctcc

SEQ ID NO: 18169 - DNA, 20 bp, Artificial sequence
  synthetic
tgcactgcagcgtagccgct

SEQ ID NO: 18170 - DNA, 20 bp, Artificial sequence
  synthetic
ttaatgcgaagagggggagg

SEQ ID NO: 18171 - DNA, 20 bp, Artificial sequence
  synthetic
cactctcagaaatcagactt

SEQ ID NO: 18172 - DNA, 20 bp, Artificial sequence
  synthetic
ggatctttgtcgctagctcc

SEQ ID NO: 18173 - DNA, 20 bp, Artificial sequence
  synthetic
gtagttccacctcccgccgc

SEQ ID NO: 18174 - DNA, 20 bp, Artificial sequence
  synthetic
ggaggggaaggcgcgaggtt

SEQ ID NO: 18175 - DNA, 20 bp, Artificial sequence
  synthetic
tcttgctgctcccctgaggt

SEQ ID NO: 18176 - DNA, 20 bp, Artificial sequence
  synthetic
cgccgcgtcgccggtgcctg

SEQ ID NO: 18177 - DNA, 20 bp, Artificial sequence
  synthetic
ccccagtcgtcgtcacacac

SEQ ID NO: 18178 - DNA, 20 bp, Artificial sequence
  synthetic
ctcctgctctggggtagtac

SEQ ID NO: 18179 - DNA, 20 bp, Artificial sequence
  synthetic
ccgtctcctgcgcctcccag

SEQ ID NO: 18180 - DNA, 20 bp, Artificial sequence
  synthetic
acatcgggctggggagtgac

SEQ ID NO: 18181 - DNA, 20 bp, Artificial sequence
  synthetic
acgcaaacgtggggccgcct

SEQ ID NO: 18182 - DNA, 20 bp, Artificial sequence
  synthetic
aggccctgcttagcccttcc

SEQ ID NO: 18183 - DNA, 20 bp, Artificial sequence
  synthetic
gcggggtcgcagggttggga

SEQ ID NO: 18184 - DNA, 20 bp, Artificial sequence
  synthetic
ctgcctcagccactgcctcc

SEQ ID NO: 18185 - DNA, 20 bp, Artificial sequence
  synthetic
gcctaaccctccttctcttc

SEQ ID NO: 18186 - DNA, 20 bp, Artificial sequence
  synthetic
ggcggccgaaccctccgcaa

SEQ ID NO: 18187 - DNA, 20 bp, Artificial sequence
  synthetic
cttcgccccggagctggccc

SEQ ID NO: 18188 - DNA, 20 bp, Artificial sequence
  synthetic
ttcaaaaaacccgcacacac

SEQ ID NO: 18189 - DNA, 20 bp, Artificial sequence
  synthetic
cctgctgcgggggaccgcgc

SEQ ID NO: 18190 - DNA, 20 bp, Artificial sequence
  synthetic
ggccgggctcggggacgccc

SEQ ID NO: 18191 - DNA, 20 bp, Artificial sequence
  synthetic
tccgcgcaaactctggcttc

SEQ ID NO: 18192 - DNA, 20 bp, Artificial sequence
  synthetic
agtgctgcgcgggaaggcac

SEQ ID NO: 18193 - DNA, 20 bp, Artificial sequence
  synthetic
cgcgaggagctagagagagc

SEQ ID NO: 18194 - DNA, 20 bp, Artificial sequence
  synthetic
ccccaggacttctgtgactc

SEQ ID NO: 18195 - DNA, 20 bp, Artificial sequence
  synthetic
gccgtagggcggtcagaagg

SEQ ID NO: 18196 - DNA, 20 bp, Artificial sequence
  synthetic
ggcggtgagagaggcggggg

SEQ ID NO: 18197 - DNA, 20 bp, Artificial sequence
  synthetic
gatggcggctgcgtcggggt

SEQ ID NO: 18198 - DNA, 20 bp, Artificial sequence
  synthetic
cgccccccggcaaactttcg

SEQ ID NO: 18199 - DNA, 20 bp, Artificial sequence
  synthetic
ccaaaatggcgcgggtgctg

SEQ ID NO: 18200 - DNA, 20 bp, Artificial sequence
  synthetic
gactctcaaaaggaaatagg

SEQ ID NO: 18201 - DNA, 20 bp, Artificial sequence
  synthetic
tccgccctcacagccaccgc

SEQ ID NO: 18202 - DNA, 20 bp, Artificial sequence
  synthetic
ggggaccgaacgagcagccc

SEQ ID NO: 18203 - DNA, 20 bp, Artificial sequence
  synthetic
gattctctcccaggccacaa

SEQ ID NO: 18204 - DNA, 20 bp, Artificial sequence
  synthetic
tccggcagctactggtcatg

SEQ ID NO: 18205 - DNA, 20 bp, Artificial sequence
  synthetic
tggctgctgtgattgcacat

SEQ ID NO: 18206 - DNA, 20 bp, Artificial sequence
  synthetic
gtgcgcgcctgggacctgaa

SEQ ID NO: 18207 - DNA, 20 bp, Artificial sequence
  synthetic
tggcccgagccagcatgatc

SEQ ID NO: 18208 - DNA, 20 bp, Artificial sequence
  synthetic
ccacgtgcgaaagccccgga

SEQ ID NO: 18209 - DNA, 20 bp, Artificial sequence
  synthetic
acggcttccccacgggagga

SEQ ID NO: 18210 - DNA, 20 bp, Artificial sequence
  synthetic
gctggccgccttggcgctgc

SEQ ID NO: 18211 - DNA, 20 bp, Artificial sequence
  synthetic
gctttctgccccttctctcg

SEQ ID NO: 18212 - DNA, 20 bp, Artificial sequence
  synthetic
caggggcacgagccgggggc

SEQ ID NO: 18213 - DNA, 20 bp, Artificial sequence
  synthetic
tcccgcgacagcaagaggcc

SEQ ID NO: 18214 - DNA, 20 bp, Artificial sequence
  synthetic
ttctgccaagatcggaactg

SEQ ID NO: 18215 - DNA, 20 bp, Artificial sequence
  synthetic
ctgccttatgctgtctcatc

SEQ ID NO: 18216 - DNA, 20 bp, Artificial sequence
  synthetic
cctcgcctggctcccagctg

SEQ ID NO: 18217 - DNA, 20 bp, Artificial sequence
  synthetic
actgcctcccttcctctttc

SEQ ID NO: 18218 - DNA, 20 bp, Artificial sequence
  synthetic
gaccgcctcgcggctgcttc

SEQ ID NO: 18219 - DNA, 20 bp, Artificial sequence
  synthetic
ggcgttctagcgcatcgcgg

SEQ ID NO: 18220 - DNA, 20 bp, Artificial sequence
  synthetic
gaagcggaggttccgggctc

SEQ ID NO: 18221 - DNA, 20 bp, Artificial sequence
  synthetic
ccgacgcttccgccgggtcc

SEQ ID NO: 18222 - DNA, 20 bp, Artificial sequence
  synthetic
cacgccggctcttcccgggg

SEQ ID NO: 18223 - DNA, 20 bp, Artificial sequence
  synthetic
catgtataagctggcctcct

SEQ ID NO: 18224 - DNA, 20 bp, Artificial sequence
  synthetic
gggaatcgcagtggccgagg

SEQ ID NO: 18225 - DNA, 20 bp, Artificial sequence
  synthetic
cagcagggtccaggggtaga

SEQ ID NO: 18226 - DNA, 20 bp, Artificial sequence
  synthetic
gcaggttttcctagtcccta

SEQ ID NO: 18227 - DNA, 20 bp, Artificial sequence
  synthetic
gcgaacccgcgtgcaacctg

SEQ ID NO: 18228 - DNA, 20 bp, Artificial sequence
  synthetic
cgcttccgtctccgccgggg

SEQ ID NO: 18229 - DNA, 20 bp, Artificial sequence
  synthetic
gtggcgcgcgggtccggcgg

SEQ ID NO: 18230 - DNA, 20 bp, Artificial sequence
  synthetic
caaattttgccacattaaca

SEQ ID NO: 18231 - DNA, 20 bp, Artificial sequence
  synthetic
gacctgctcggctggaacgt

SEQ ID NO: 18232 - DNA, 20 bp, Artificial sequence
  synthetic
ccgaggtgctaggagttgcc

SEQ ID NO: 18233 - DNA, 20 bp, Artificial sequence
  synthetic
gcttcacttgtggcaagatc

SEQ ID NO: 18234 - DNA, 20 bp, Artificial sequence
  synthetic
tctggcggagggaggtgttt

SEQ ID NO: 18235 - DNA, 20 bp, Artificial sequence
  synthetic
cctaattcgggaaacgtgca

SEQ ID NO: 18236 - DNA, 20 bp, Artificial sequence
  synthetic
tgggcctccttgcgtttccg

SEQ ID NO: 18237 - DNA, 20 bp, Artificial sequence
  synthetic
ccgccatggaagacacgccg

SEQ ID NO: 18238 - DNA, 20 bp, Artificial sequence
  synthetic
tgctgcctgccgggcagatg

SEQ ID NO: 18239 - DNA, 20 bp, Artificial sequence
  synthetic
attttgacaatgtcaagatt

SEQ ID NO: 18240 - DNA, 20 bp, Artificial sequence
  synthetic
ccggacgaggctcgctgcgc

SEQ ID NO: 18241 - DNA, 20 bp, Artificial sequence
  synthetic
tctccggtagctcctacccc

SEQ ID NO: 18242 - DNA, 20 bp, Artificial sequence
  synthetic
gcgcgcgcgaggccttggga

SEQ ID NO: 18243 - DNA, 20 bp, Artificial sequence
  synthetic
gtggcgttggtgggaagcgc

SEQ ID NO: 18244 - DNA, 20 bp, Artificial sequence
  synthetic
cgattggaacgcctccccat

SEQ ID NO: 18245 - DNA, 20 bp, Artificial sequence
  synthetic
ggaaaggcctggccgagagc

SEQ ID NO: 18246 - DNA, 20 bp, Artificial sequence
  synthetic
gccgtggctccgacttgggc

SEQ ID NO: 18247 - DNA, 20 bp, Artificial sequence
  synthetic
gattacgtacagagcgagtc

SEQ ID NO: 18248 - DNA, 20 bp, Artificial sequence
  synthetic
gcgcagcttgcagaggtctc

SEQ ID NO: 18249 - DNA, 20 bp, Artificial sequence
  synthetic
acatgcgcaatagcgagacg

SEQ ID NO: 18250 - DNA, 20 bp, Artificial sequence
  synthetic
gaaaatttcagctgtagccc

SEQ ID NO: 18251 - DNA, 20 bp, Artificial sequence
  synthetic
cccctccggctagctcgctg

SEQ ID NO: 18252 - DNA, 20 bp, Artificial sequence
  synthetic
gtcaaactcccgcagacttc

SEQ ID NO: 18253 - DNA, 20 bp, Artificial sequence
  synthetic
actatctttctagacaaggc

SEQ ID NO: 18254 - DNA, 20 bp, Artificial sequence
  synthetic
gggagcgcgagagccccccg

SEQ ID NO: 18255 - DNA, 20 bp, Artificial sequence
  synthetic
cccaggaggcctggcgggcc

SEQ ID NO: 18256 - DNA, 20 bp, Artificial sequence
  synthetic
agactcggcggtcgccacct

SEQ ID NO: 18257 - DNA, 20 bp, Artificial sequence
  synthetic
ccaggggatttcaaagagct

SEQ ID NO: 18258 - DNA, 20 bp, Artificial sequence
  synthetic
cgccaatcttcgaacgcagg

SEQ ID NO: 18259 - DNA, 20 bp, Artificial sequence
  synthetic
gtgtcttctggttggagtct

SEQ ID NO: 18260 - DNA, 20 bp, Artificial sequence
  synthetic
ggaggaggaggagatgactg

SEQ ID NO: 18261 - DNA, 20 bp, Artificial sequence
  synthetic
gccccgcgccgcttctccct

SEQ ID NO: 18262 - DNA, 20 bp, Artificial sequence
  synthetic
caaagaagaaccatgaggct

SEQ ID NO: 18263 - DNA, 20 bp, Artificial sequence
  synthetic
tcgttaactaattcaacaaa

SEQ ID NO: 18264 - DNA, 20 bp, Artificial sequence
  synthetic
tcgcagtcggctggcggcga

SEQ ID NO: 18265 - DNA, 20 bp, Artificial sequence
  synthetic
ccccgagtggaggtcggctg

SEQ ID NO: 18266 - DNA, 20 bp, Artificial sequence
  synthetic
gactcgcgctccggctgctg

SEQ ID NO: 18267 - DNA, 20 bp, Artificial sequence
  synthetic
tcaaccagctactcattgga

SEQ ID NO: 18268 - DNA, 20 bp, Artificial sequence
  synthetic
ttttttctccccccttctct

SEQ ID NO: 18269 - DNA, 20 bp, Artificial sequence
  synthetic
ctgtctgggtactgccagcc

SEQ ID NO: 18270 - DNA, 20 bp, Artificial sequence
  synthetic
ccacctgccctgcgccatct

SEQ ID NO: 18271 - DNA, 20 bp, Artificial sequence
  synthetic
ggggacagccgggcaagcag

SEQ ID NO: 18272 - DNA, 20 bp, Artificial sequence
  synthetic
ccctttcgggaggaagtttt

SEQ ID NO: 18273 - DNA, 20 bp, Artificial sequence
  synthetic
gcaaacacagcttccaaacc

SEQ ID NO: 18274 - DNA, 20 bp, Artificial sequence
  synthetic
tctatttccggtgtattgta

SEQ ID NO: 18275 - DNA, 20 bp, Artificial sequence
  synthetic
ttagcgccatctgctcgcgg

SEQ ID NO: 18276 - DNA, 20 bp, Artificial sequence
  synthetic
gcggttagggctgtgtaggg

SEQ ID NO: 18277 - DNA, 20 bp, Artificial sequence
  synthetic
tgtctcaagaatcagagtcg

SEQ ID NO: 18278 - DNA, 20 bp, Artificial sequence
  synthetic
aaccccggcagccctacaca

SEQ ID NO: 18279 - DNA, 20 bp, Artificial sequence
  synthetic
ccggagccgactacggagga

SEQ ID NO: 18280 - DNA, 20 bp, Artificial sequence
  synthetic
ccaagcatgccctgctctct

SEQ ID NO: 18281 - DNA, 20 bp, Artificial sequence
  synthetic
gacctggatgccctgctctc

SEQ ID NO: 18282 - DNA, 20 bp, Artificial sequence
  synthetic
tagacttcgggctccttgag

SEQ ID NO: 18283 - DNA, 20 bp, Artificial sequence
  synthetic
ctaccacctcgcacatgcca

SEQ ID NO: 18284 - DNA, 20 bp, Artificial sequence
  synthetic
taacagcagcctgcctgcag

SEQ ID NO: 18285 - DNA, 20 bp, Artificial sequence
  synthetic
gggccgcccccgaggaggtg

SEQ ID NO: 18286 - DNA, 20 bp, Artificial sequence
  synthetic
tctgggaacgaggcactagg

SEQ ID NO: 18287 - DNA, 20 bp, Artificial sequence
  synthetic
gtgctgctgctgcttctgag

SEQ ID NO: 18288 - DNA, 20 bp, Artificial sequence
  synthetic
caaccccctcagaccactct

SEQ ID NO: 18289 - DNA, 20 bp, Artificial sequence
  synthetic
ccaatcaggcgcggagggcg

SEQ ID NO: 18290 - DNA, 20 bp, Artificial sequence
  synthetic
cgtccttcctcagccgcggg

SEQ ID NO: 18291 - DNA, 20 bp, Artificial sequence
  synthetic
taaagtagtcgcggagacgg

SEQ ID NO: 18292 - DNA, 20 bp, Artificial sequence
  synthetic
acagctgtcggaaggtggcg

SEQ ID NO: 18293 - DNA, 20 bp, Artificial sequence
  synthetic
tttccttcggcttccgttct

SEQ ID NO: 18294 - DNA, 20 bp, Artificial sequence
  synthetic
agagcctgaaaaaggactgc

SEQ ID NO: 18295 - DNA, 20 bp, Artificial sequence
  synthetic
catgcaggcgcagcagctgc

SEQ ID NO: 18296 - DNA, 20 bp, Artificial sequence
  synthetic
tttgtgtagtgccttggagc

SEQ ID NO: 18297 - DNA, 20 bp, Artificial sequence
  synthetic
ttggagacccgaggaaagcc

SEQ ID NO: 18298 - DNA, 20 bp, Artificial sequence
  synthetic
gctctggctgtttaaaagct

SEQ ID NO: 18299 - DNA, 20 bp, Artificial sequence
  synthetic
cccttctcggcagtggtacc

SEQ ID NO: 18300 - DNA, 20 bp, Artificial sequence
  synthetic
ctccagagacctcctagagc

SEQ ID NO: 18301 - DNA, 20 bp, Artificial sequence
  synthetic
gctgtgggaataagatggcg

SEQ ID NO: 18302 - DNA, 20 bp, Artificial sequence
  synthetic
ttcggctggtgtcatcggtg

SEQ ID NO: 18303 - DNA, 20 bp, Artificial sequence
  synthetic
ggcgcggcaggaggacgagg

SEQ ID NO: 18304 - DNA, 20 bp, Artificial sequence
  synthetic
gtctgcgcggggccgctgac

SEQ ID NO: 18305 - DNA, 20 bp, Artificial sequence
  synthetic
accctccgacatgatatctc

SEQ ID NO: 18306 - DNA, 20 bp, Artificial sequence
  synthetic
tccgccccgcagcgccggag

SEQ ID NO: 18307 - DNA, 20 bp, Artificial sequence
  synthetic
gaccatggctgacgttttcc

SEQ ID NO: 18308 - DNA, 20 bp, Artificial sequence
  synthetic
aaatctcgtttctcttggac

SEQ ID NO: 18309 - DNA, 20 bp, Artificial sequence
  synthetic
tcccgccccgcggcagccct

SEQ ID NO: 18310 - DNA, 20 bp, Artificial sequence
  synthetic
tcctgagctgcgccgtgcca

SEQ ID NO: 18311 - DNA, 20 bp, Artificial sequence
  synthetic
caccgtggagagcgcggtcc

SEQ ID NO: 18312 - DNA, 20 bp, Artificial sequence
  synthetic
caatcactttcttcatcatc

SEQ ID NO: 18313 - DNA, 20 bp, Artificial sequence
  synthetic
gggggaaaggctgtttccaa

SEQ ID NO: 18314 - DNA, 20 bp, Artificial sequence
  synthetic
tccggcgaagttaaaccctc

SEQ ID NO: 18315 - DNA, 20 bp, Artificial sequence
  synthetic
gtagatccctcccgttagct

SEQ ID NO: 18316 - DNA, 20 bp, Artificial sequence
  synthetic
gctggccggtctgcctccgg

SEQ ID NO: 18317 - DNA, 20 bp, Artificial sequence
  synthetic
agccgctcgccttcctttca

SEQ ID NO: 18318 - DNA, 20 bp, Artificial sequence
  synthetic
aaaggtgaagcaggacatgc

SEQ ID NO: 18319 - DNA, 20 bp, Artificial sequence
  synthetic
gaaggtctcattcggtgttt

SEQ ID NO: 18320 - DNA, 20 bp, Artificial sequence
  synthetic
tccgcgggtggcaagcgggc

SEQ ID NO: 18321 - DNA, 20 bp, Artificial sequence
  synthetic
gctagtttctctaagccatc

SEQ ID NO: 18322 - DNA, 20 bp, Artificial sequence
  synthetic
cctaaatccaggcagggaaa

SEQ ID NO: 18323 - DNA, 20 bp, Artificial sequence
  synthetic
taaacccgcgcgcccgccag

SEQ ID NO: 18324 - DNA, 20 bp, Artificial sequence
  synthetic
tcgctccgaggtccccgcgc

SEQ ID NO: 18325 - DNA, 20 bp, Artificial sequence
  synthetic
taaggcggcacagggccgag

SEQ ID NO: 18326 - DNA, 20 bp, Artificial sequence
  synthetic
cttgttcagggctggtgggg

SEQ ID NO: 18327 - DNA, 20 bp, Artificial sequence
  synthetic
ccctaaagacgctagcgctg

SEQ ID NO: 18328 - DNA, 20 bp, Artificial sequence
  synthetic
cgcagtttgccggccgccat

SEQ ID NO: 18329 - DNA, 20 bp, Artificial sequence
  synthetic
ggagctgtgaggcagtgctg

SEQ ID NO: 18330 - DNA, 20 bp, Artificial sequence
  synthetic
ggattgaggcgccgccattt

SEQ ID NO: 18331 - DNA, 20 bp, Artificial sequence
  synthetic
cctcgtgcgcccccgccccc

SEQ ID NO: 18332 - DNA, 20 bp, Artificial sequence
  synthetic
tctcggcccttgacttctac

SEQ ID NO: 18333 - DNA, 20 bp, Artificial sequence
  synthetic
tatcagcacagcacttcttg

SEQ ID NO: 18334 - DNA, 20 bp, Artificial sequence
  synthetic
acaatctgtggcctcagccc

SEQ ID NO: 18335 - DNA, 20 bp, Artificial sequence
  synthetic
tccgagtttggtgttttgca

SEQ ID NO: 18336 - DNA, 20 bp, Artificial sequence
  synthetic
gggccacgtgataagcccgg

SEQ ID NO: 18337 - DNA, 20 bp, Artificial sequence
  synthetic
acctgggcttggtcgcctcc

SEQ ID NO: 18338 - DNA, 20 bp, Artificial sequence
  synthetic
acccctccccccgccttccc

SEQ ID NO: 18339 - DNA, 20 bp, Artificial sequence
  synthetic
agctaaggcaccccagccgg

SEQ ID NO: 18340 - DNA, 20 bp, Artificial sequence
  synthetic
gcagcgcttgagggtagcgg

SEQ ID NO: 18341 - DNA, 20 bp, Artificial sequence
  synthetic
ccgcgcgcgtcgcaacggag

SEQ ID NO: 18342 - DNA, 20 bp, Artificial sequence
  synthetic
gggaccaccgggggtggtga

SEQ ID NO: 18343 - DNA, 20 bp, Artificial sequence
  synthetic
caggaggcgtgcgtggcagg

SEQ ID NO: 18344 - DNA, 20 bp, Artificial sequence
  synthetic
cgtgcgtgaggcgtttactg

SEQ ID NO: 18345 - DNA, 20 bp, Artificial sequence
  synthetic
tccctccgggctcaagttgc

SEQ ID NO: 18346 - DNA, 20 bp, Artificial sequence
  synthetic
tgctctgcggctcagggagc

SEQ ID NO: 18347 - DNA, 20 bp, Artificial sequence
  synthetic
cgccacgcgcatatccctgc

SEQ ID NO: 18348 - DNA, 20 bp, Artificial sequence
  synthetic
cgagaagtcaagttctcatg

SEQ ID NO: 18349 - DNA, 20 bp, Artificial sequence
  synthetic
cctctttccctaagcagcct

SEQ ID NO: 18350 - DNA, 20 bp, Artificial sequence
  synthetic
agggcctgactttgggagcc

SEQ ID NO: 18351 - DNA, 20 bp, Artificial sequence
  synthetic
agacccagagggagggagga

SEQ ID NO: 18352 - DNA, 20 bp, Artificial sequence
  synthetic
agttctcccaaaatccaccg

SEQ ID NO: 18353 - DNA, 20 bp, Artificial sequence
  synthetic
gcctttgtgccatccgggtc

SEQ ID NO: 18354 - DNA, 20 bp, Artificial sequence
  synthetic
tctacccaagctccctcagc

SEQ ID NO: 18355 - DNA, 20 bp, Artificial sequence
  synthetic
gtgtcggtcgcctagtctgg

SEQ ID NO: 18356 - DNA, 20 bp, Artificial sequence
  synthetic
tcgcctagtctggagaacta

SEQ ID NO: 18357 - DNA, 20 bp, Artificial sequence
  synthetic
tgaacaagctgagtggaggc

SEQ ID NO: 18358 - DNA, 20 bp, Artificial sequence
  synthetic
tcctcccccctgttccccgc

SEQ ID NO: 18359 - DNA, 20 bp, Artificial sequence
  synthetic
ctttttgaacccacttattg

SEQ ID NO: 18360 - DNA, 20 bp, Artificial sequence
  synthetic
ctgtgtctggtacacattgt

SEQ ID NO: 18361 - DNA, 20 bp, Artificial sequence
  synthetic
ccgcttctcgactctgttgt

SEQ ID NO: 18362 - DNA, 20 bp, Artificial sequence
  synthetic
ctgtactgacgcgccctcgc

SEQ ID NO: 18363 - DNA, 20 bp, Artificial sequence
  synthetic
ctgcttggtcgcgtctgagg

SEQ ID NO: 18364 - DNA, 20 bp, Artificial sequence
  synthetic
gtgttctacgaagtctcttt

SEQ ID NO: 18365 - DNA, 20 bp, Artificial sequence
  synthetic
tccggcgatgccgccccagc

SEQ ID NO: 18366 - DNA, 20 bp, Artificial sequence
  synthetic
gcagctcggagcctgtggcg

SEQ ID NO: 18367 - DNA, 20 bp, Artificial sequence
  synthetic
gagtgagaaagagaaatctg

SEQ ID NO: 18368 - DNA, 20 bp, Artificial sequence
  synthetic
tagacctgcccttcgcctgg

SEQ ID NO: 18369 - DNA, 20 bp, Artificial sequence
  synthetic
gccagtcctttggctccgtt

SEQ ID NO: 18370 - DNA, 20 bp, Artificial sequence
  synthetic
tctcccgctccgtctcacac

SEQ ID NO: 18371 - DNA, 20 bp, Artificial sequence
  synthetic
ccaggcgccgcgaggcactg

SEQ ID NO: 18372 - DNA, 20 bp, Artificial sequence
  synthetic
catggtctcgccctagggag

SEQ ID NO: 18373 - DNA, 20 bp, Artificial sequence
  synthetic
ctctacgctcggcctcgatc

SEQ ID NO: 18374 - DNA, 20 bp, Artificial sequence
  synthetic
gggccgcagtgaccaacccc

SEQ ID NO: 18375 - DNA, 20 bp, Artificial sequence
  synthetic
acagcgccaagagcggcggc

SEQ ID NO: 18376 - DNA, 20 bp, Artificial sequence
  synthetic
aggggtgttcggccaggggc

SEQ ID NO: 18377 - DNA, 20 bp, Artificial sequence
  synthetic
ggagtaagcggcgcggtagc

SEQ ID NO: 18378 - DNA, 20 bp, Artificial sequence
  synthetic
agctgggggcccagctccgg

SEQ ID NO: 18379 - DNA, 20 bp, Artificial sequence
  synthetic
tggtgggcgggcgggagctg

SEQ ID NO: 18380 - DNA, 20 bp, Artificial sequence
  synthetic
ggctgcagcggggtgagcgg

SEQ ID NO: 18381 - DNA, 20 bp, Artificial sequence
  synthetic
tgccgggaagtgatccccaa

SEQ ID NO: 18382 - DNA, 20 bp, Artificial sequence
  synthetic
aggcagggtgagagttcccc

SEQ ID NO: 18383 - DNA, 20 bp, Artificial sequence
  synthetic
tgtgtttccaaaatggcggc

SEQ ID NO: 18384 - DNA, 20 bp, Artificial sequence
  synthetic
ggggctggcaggaggggagg

SEQ ID NO: 18385 - DNA, 20 bp, Artificial sequence
  synthetic
gtgaacagtggctgacaaca

SEQ ID NO: 18386 - DNA, 20 bp, Artificial sequence
  synthetic
ctgctgtgacgcgcggacag

SEQ ID NO: 18387 - DNA, 20 bp, Artificial sequence
  synthetic
gaagcgctggtcggcgtctg

SEQ ID NO: 18388 - DNA, 20 bp, Artificial sequence
  synthetic
cggcggcggcggcgtcggcg

SEQ ID NO: 18389 - DNA, 20 bp, Artificial sequence
  synthetic
gggcgaggaggttcccgtgg

SEQ ID NO: 18390 - DNA, 20 bp, Artificial sequence
  synthetic
acctcagcgcgagcgccagg

SEQ ID NO: 18391 - DNA, 20 bp, Artificial sequence
  synthetic
cgctctgagccctgccacca

SEQ ID NO: 18392 - DNA, 20 bp, Artificial sequence
  synthetic
gagatgaaatgcgaccgggt

SEQ ID NO: 18393 - DNA, 20 bp, Artificial sequence
  synthetic
ccgccgcaccgctgggggcc

SEQ ID NO: 18394 - DNA, 20 bp, Artificial sequence
  synthetic
tgtgggcgcggcagggcgca

SEQ ID NO: 18395 - DNA, 20 bp, Artificial sequence
  synthetic
ctggggagggctgtgcctga

SEQ ID NO: 18396 - DNA, 20 bp, Artificial sequence
  synthetic
tccggacatctccctgggag

SEQ ID NO: 18397 - DNA, 20 bp, Artificial sequence
  synthetic
ggccgcccgggacgagctcg

SEQ ID NO: 18398 - DNA, 20 bp, Artificial sequence
  synthetic
tgtcccctgcctctggggcc

SEQ ID NO: 18399 - DNA, 20 bp, Artificial sequence
  synthetic
tctctcgttttcggacggct

SEQ ID NO: 18400 - DNA, 20 bp, Artificial sequence
  synthetic
cgcgacggctgcagaacatc

SEQ ID NO: 18401 - DNA, 20 bp, Artificial sequence
  synthetic
atctcctgtctccgccgcct

SEQ ID NO: 18402 - DNA, 20 bp, Artificial sequence
  synthetic
cgtgctgttctgcggcaagg

SEQ ID NO: 18403 - DNA, 20 bp, Artificial sequence
  synthetic
cttgttcagcagaacaggtg

SEQ ID NO: 18404 - DNA, 20 bp, Artificial sequence
  synthetic
gcgggtatcatgggtgctgt

SEQ ID NO: 18405 - DNA, 20 bp, Artificial sequence
  synthetic
tgagattggcgaggggagag

SEQ ID NO: 18406 - DNA, 20 bp, Artificial sequence
  synthetic
aatggccgtggagcagcccc

SEQ ID NO: 18407 - DNA, 20 bp, Artificial sequence
  synthetic
gtggcctcgctccccgcccg

SEQ ID NO: 18408 - DNA, 20 bp, Artificial sequence
  synthetic
agagctacaagagcctggaa

SEQ ID NO: 18409 - DNA, 20 bp, Artificial sequence
  synthetic
taggctcccctgtgacagcc

SEQ ID NO: 18410 - DNA, 20 bp, Artificial sequence
  synthetic
aatttgcaacctccgctgcc

SEQ ID NO: 18411 - DNA, 20 bp, Artificial sequence
  synthetic
ggtagatccatggcttcctg

SEQ ID NO: 18412 - DNA, 20 bp, Artificial sequence
  synthetic
gagcgccgcgtcgggagcgg

SEQ ID NO: 18413 - DNA, 20 bp, Artificial sequence
  synthetic
tcatgctgtgcaaaaacttg

SEQ ID NO: 18414 - DNA, 20 bp, Artificial sequence
  synthetic
tggccgccgagcgggatctg

SEQ ID NO: 18415 - DNA, 20 bp, Artificial sequence
  synthetic
agccagagagaagaagataa

SEQ ID NO: 18416 - DNA, 20 bp, Artificial sequence
  synthetic
cctcattgcccagcggaccc

SEQ ID NO: 18417 - DNA, 20 bp, Artificial sequence
  synthetic
accccgaggtggctgaggct

SEQ ID NO: 18418 - DNA, 20 bp, Artificial sequence
  synthetic
gtgatggcggggccggtgaa

SEQ ID NO: 18419 - DNA, 20 bp, Artificial sequence
  synthetic
gcacagatgtcatctgctgc

SEQ ID NO: 18420 - DNA, 20 bp, Artificial sequence
  synthetic
cgctccggacgggcgacggt

SEQ ID NO: 18421 - DNA, 20 bp, Artificial sequence
  synthetic
tgcttcgggcttccacctca

SEQ ID NO: 18422 - DNA, 20 bp, Artificial sequence
  synthetic
gctccagtgccaaaacttcc

SEQ ID NO: 18423 - DNA, 20 bp, Artificial sequence
  synthetic
aacgagagactgcttgctgc

SEQ ID NO: 18424 - DNA, 20 bp, Artificial sequence
  synthetic
gaagtggtcgtttattggct

SEQ ID NO: 18425 - DNA, 20 bp, Artificial sequence
  synthetic
caggcgtcggtactcagcgg

SEQ ID NO: 18426 - DNA, 20 bp, Artificial sequence
  synthetic
ggcgggcggaaaccggtctc

SEQ ID NO: 18427 - DNA, 20 bp, Artificial sequence
  synthetic
gttcctccccagctcgaatg

SEQ ID NO: 18428 - DNA, 20 bp, Artificial sequence
  synthetic
taggagtcggcgattaagga

SEQ ID NO: 18429 - DNA, 20 bp, Artificial sequence
  synthetic
gcgcaccgctccgagggcca

SEQ ID NO: 18430 - DNA, 20 bp, Artificial sequence
  synthetic
tcattcctcccagggacccc

SEQ ID NO: 18431 - DNA, 20 bp, Artificial sequence
  synthetic
gcgaaagagcagcagaagtg

SEQ ID NO: 18432 - DNA, 20 bp, Artificial sequence
  synthetic
ctgcgttcggacccagaccc

SEQ ID NO: 18433 - DNA, 20 bp, Artificial sequence
  synthetic
gagcggaggaggaggaggag

SEQ ID NO: 18434 - DNA, 20 bp, Artificial sequence
  synthetic
aacgtcaggccacccgccgc

SEQ ID NO: 18435 - DNA, 20 bp, Artificial sequence
  synthetic
gaggaagtcggacgtgggcg

SEQ ID NO: 18436 - DNA, 20 bp, Artificial sequence
  synthetic
cacctagtacaacatcttac

SEQ ID NO: 18437 - DNA, 20 bp, Artificial sequence
  synthetic
ggatgaggcagaagattcag

SEQ ID NO: 18438 - DNA, 20 bp, Artificial sequence
  synthetic
gctggctcacaacaagatgc

SEQ ID NO: 18439 - DNA, 20 bp, Artificial sequence
  synthetic
acggacgtggctcgagtttc

SEQ ID NO: 18440 - DNA, 20 bp, Artificial sequence
  synthetic
ccggtcccttgcagcgctgc

SEQ ID NO: 18441 - DNA, 20 bp, Artificial sequence
  synthetic
cgcagcgcctacgggagtcc

SEQ ID NO: 18442 - DNA, 20 bp, Artificial sequence
  synthetic
taaccttcctgaagaggaca

SEQ ID NO: 18443 - DNA, 20 bp, Artificial sequence
  synthetic
tccggctcccacccgacgct

SEQ ID NO: 18444 - DNA, 20 bp, Artificial sequence
  synthetic
gaatgccactagagggtctg

SEQ ID NO: 18445 - DNA, 20 bp, Artificial sequence
  synthetic
attagggttgggagcaggaa

SEQ ID NO: 18446 - DNA, 20 bp, Artificial sequence
  synthetic
cggctgcgtggggctcggcc

SEQ ID NO: 18447 - DNA, 20 bp, Artificial sequence
  synthetic
agaaggccttggctccttga

SEQ ID NO: 18448 - DNA, 20 bp, Artificial sequence
  synthetic
ctgctctgcttccttcccat

SEQ ID NO: 18449 - DNA, 20 bp, Artificial sequence
  synthetic
aaggtcctctctgatgacat

SEQ ID NO: 18450 - DNA, 20 bp, Artificial sequence
  synthetic
aggacccgccccggccttga

SEQ ID NO: 18451 - DNA, 20 bp, Artificial sequence
  synthetic
cgaggcagcagttgcggccg

SEQ ID NO: 18452 - DNA, 20 bp, Artificial sequence
  synthetic
aagacggctcggatgccggc

SEQ ID NO: 18453 - DNA, 20 bp, Artificial sequence
  synthetic
gctgggctgggctgggctgg

SEQ ID NO: 18454 - DNA, 20 bp, Artificial sequence
  synthetic
tccacctgggaccggccggg

SEQ ID NO: 18455 - DNA, 20 bp, Artificial sequence
  synthetic
cttgaagcagaggagcagca

SEQ ID NO: 18456 - DNA, 20 bp, Artificial sequence
  synthetic
cggtctcgcatcggcggcga

SEQ ID NO: 18457 - DNA, 20 bp, Artificial sequence
  synthetic
gagggccagagactaagtta

SEQ ID NO: 18458 - DNA, 20 bp, Artificial sequence
  synthetic
gctccggcagcgttcctggg

SEQ ID NO: 18459 - DNA, 20 bp, Artificial sequence
  synthetic
gtgttgctccggcagcgttc

SEQ ID NO: 18460 - DNA, 20 bp, Artificial sequence
  synthetic
cggagggatctccgtggggc

SEQ ID NO: 18461 - DNA, 20 bp, Artificial sequence
  synthetic
ctgtgttttcttggttcagc

SEQ ID NO: 18462 - DNA, 20 bp, Artificial sequence
  synthetic
ttgtccttgggctgcctgtt

SEQ ID NO: 18463 - DNA, 20 bp, Artificial sequence
  synthetic
ctaccgtcgcggccgccgta

SEQ ID NO: 18464 - DNA, 20 bp, Artificial sequence
  synthetic
cggcagacaacaggggaccc

SEQ ID NO: 18465 - DNA, 20 bp, Artificial sequence
  synthetic
tggagacctgatttctaact

SEQ ID NO: 18466 - DNA, 20 bp, Artificial sequence
  synthetic
tcacgtcgcactcctcgcag

SEQ ID NO: 18467 - DNA, 20 bp, Artificial sequence
  synthetic
tcggactcgcgcccgtgggc

SEQ ID NO: 18468 - DNA, 20 bp, Artificial sequence
  synthetic
aagaagctggcggccgacgc

SEQ ID NO: 18469 - DNA, 20 bp, Artificial sequence
  synthetic
gctggaggcagtttctggtg

SEQ ID NO: 18470 - DNA, 20 bp, Artificial sequence
  synthetic
ccccatctccacttcctccc

SEQ ID NO: 18471 - DNA, 20 bp, Artificial sequence
  synthetic
gggcggcggcggtagctgcg

SEQ ID NO: 18472 - DNA, 20 bp, Artificial sequence
  synthetic
ccagggtcgtcaggggtgta

SEQ ID NO: 18473 - DNA, 20 bp, Artificial sequence
  synthetic
gctgggaaaaagaccaacag

SEQ ID NO: 18474 - DNA, 20 bp, Artificial sequence
  synthetic
tctcccgtcagaccttcctg

SEQ ID NO: 18475 - DNA, 20 bp, Artificial sequence
  synthetic
gcggtcgcccccttgggaaa

SEQ ID NO: 18476 - DNA, 20 bp, Artificial sequence
  synthetic
actcactccatggctgcagc

SEQ ID NO: 18477 - DNA, 20 bp, Artificial sequence
  synthetic
gcgccccaggccggcaggcg

SEQ ID NO: 18478 - DNA, 20 bp, Artificial sequence
  synthetic
agccgcgcgagtcgtagtgt

SEQ ID NO: 18479 - DNA, 20 bp, Artificial sequence
  synthetic
cgagggcagtaggctctcgg

SEQ ID NO: 18480 - DNA, 20 bp, Artificial sequence
  synthetic
agggctacgatgagctgcag

SEQ ID NO: 18481 - DNA, 20 bp, Artificial sequence
  synthetic
tgatccgattctttccagcg

SEQ ID NO: 18482 - DNA, 20 bp, Artificial sequence
  synthetic
tttttaagctcccctgagcc

SEQ ID NO: 18483 - DNA, 20 bp, Artificial sequence
  synthetic
ggcgtccgccacccgtctca

SEQ ID NO: 18484 - DNA, 20 bp, Artificial sequence
  synthetic
aggaaggctgtagtgtcggg

SEQ ID NO: 18485 - DNA, 20 bp, Artificial sequence
  synthetic
cggatcctcgctgctgctgc

SEQ ID NO: 18486 - DNA, 20 bp, Artificial sequence
  synthetic
ggctcagcctccagcccagg

SEQ ID NO: 18487 - DNA, 20 bp, Artificial sequence
  synthetic
aggcagaggaggctcagcgc

SEQ ID NO: 18488 - DNA, 20 bp, Artificial sequence
  synthetic
aaggtttccctgggcgttcc

SEQ ID NO: 18489 - DNA, 20 bp, Artificial sequence
  synthetic
aacgctacgatgcctgaacc

SEQ ID NO: 18490 - DNA, 20 bp, Artificial sequence
  synthetic
aaaaggaagcaaatgagctg

SEQ ID NO: 18491 - DNA, 20 bp, Artificial sequence
  synthetic
gcagccggaagggggaagtg

SEQ ID NO: 18492 - DNA, 20 bp, Artificial sequence
  synthetic
ccgctggccgcctcctgaca

SEQ ID NO: 18493 - DNA, 20 bp, Artificial sequence
  synthetic
actgcacggacccagggaac

SEQ ID NO: 18494 - DNA, 20 bp, Artificial sequence
  synthetic
cagcagggagaggctgagcc

SEQ ID NO: 18495 - DNA, 20 bp, Artificial sequence
  synthetic
caaaccctcctgcctccacc

SEQ ID NO: 18496 - DNA, 20 bp, Artificial sequence
  synthetic
gccagcctgaggctgggctg

SEQ ID NO: 18497 - DNA, 20 bp, Artificial sequence
  synthetic
ggcccactgctcagtggagc

SEQ ID NO: 18498 - DNA, 20 bp, Artificial sequence
  synthetic
cgcggcagccgaacaaagga

SEQ ID NO: 18499 - DNA, 20 bp, Artificial sequence
  synthetic
cgcccatctagctaacccga

SEQ ID NO: 18500 - DNA, 20 bp, Artificial sequence
  synthetic
gacctatagaggtatttcct

SEQ ID NO: 18501 - DNA, 20 bp, Artificial sequence
  synthetic
cggaggtgggggggggacgg

SEQ ID NO: 18502 - DNA, 20 bp, Artificial sequence
  synthetic
ccgcggcggagccaggccgg

SEQ ID NO: 18503 - DNA, 20 bp, Artificial sequence
  synthetic
gagcaggcagctgggggtgg

SEQ ID NO: 18504 - DNA, 20 bp, Artificial sequence
  synthetic
cgaaacttccctctacccgc

SEQ ID NO: 18505 - DNA, 20 bp, Artificial sequence
  synthetic
ttttcctgcgcaggagccgc

SEQ ID NO: 18506 - DNA, 20 bp, Artificial sequence
  synthetic
caagacggggcccgggcttt

SEQ ID NO: 18507 - DNA, 20 bp, Artificial sequence
  synthetic
tgctgctcagctcctcagct

SEQ ID NO: 18508 - DNA, 20 bp, Artificial sequence
  synthetic
cggcgcgagaagcggcggcc

SEQ ID NO: 18509 - DNA, 20 bp, Artificial sequence
  synthetic
ggagctgcggcgctggctac

SEQ ID NO: 18510 - DNA, 20 bp, Artificial sequence
  synthetic
caggccgggccaggctctct

SEQ ID NO: 18511 - DNA, 20 bp, Artificial sequence
  synthetic
gggctgtgtggccaaatctg

SEQ ID NO: 18512 - DNA, 20 bp, Artificial sequence
  synthetic
atatcttcctgcttctagtc

SEQ ID NO: 18513 - DNA, 20 bp, Artificial sequence
  synthetic
tggagccggccggcgctcac

SEQ ID NO: 18514 - DNA, 20 bp, Artificial sequence
  synthetic
ttggcgtggtgggcgactct

SEQ ID NO: 18515 - DNA, 20 bp, Artificial sequence
  synthetic
ctttggtttccgggtcggtt

SEQ ID NO: 18516 - DNA, 20 bp, Artificial sequence
  synthetic
ggcgcgggcggcgcggacag

SEQ ID NO: 18517 - DNA, 20 bp, Artificial sequence
  synthetic
gagccgggcggcgcaggcgc

SEQ ID NO: 18518 - DNA, 20 bp, Artificial sequence
  synthetic
cggcggcagcggaggaggag

SEQ ID NO: 18519 - DNA, 20 bp, Artificial sequence
  synthetic
tcctccggctttttcctccc

SEQ ID NO: 18520 - DNA, 20 bp, Artificial sequence
  synthetic
cgtgtcagtggcgctagcgg

SEQ ID NO: 18521 - DNA, 20 bp, Artificial sequence
  synthetic
ggatgcagaaagcctcagtg

SEQ ID NO: 18522 - DNA, 20 bp, Artificial sequence
  synthetic
ggcgcgaggcctgtgggccc

SEQ ID NO: 18523 - DNA, 20 bp, Artificial sequence
  synthetic
agctccaagtcctcacacag

SEQ ID NO: 18524 - DNA, 20 bp, Artificial sequence
  synthetic
agcagaggactttttagctg

SEQ ID NO: 18525 - DNA, 20 bp, Artificial sequence
  synthetic
ggcagctgcgggctccgcgc

SEQ ID NO: 18526 - DNA, 20 bp, Artificial sequence
  synthetic
ggcctatgtcttgactccgt

SEQ ID NO: 18527 - DNA, 20 bp, Artificial sequence
  synthetic
ttcggggtcaagccccagag

SEQ ID NO: 18528 - DNA, 20 bp, Artificial sequence
  synthetic
ggcctgctgtaggaaaatgc

SEQ ID NO: 18529 - DNA, 20 bp, Artificial sequence
  synthetic
ggaggggcaaaagctgaggg

SEQ ID NO: 18530 - DNA, 20 bp, Artificial sequence
  synthetic
cctcaccgggctgactagcc

SEQ ID NO: 18531 - DNA, 20 bp, Artificial sequence
  synthetic
ggcgtctcttcttctaactg

SEQ ID NO: 18532 - DNA, 20 bp, Artificial sequence
  synthetic
tgggagctgtttctcctggg

SEQ ID NO: 18533 - DNA, 20 bp, Artificial sequence
  synthetic
tagccacaatgcttaactgc

SEQ ID NO: 18534 - DNA, 20 bp, Artificial sequence
  synthetic
gtcaggctttcttcggtgga

SEQ ID NO: 18535 - DNA, 20 bp, Artificial sequence
  synthetic
cctgaactgaagagctgtgt

SEQ ID NO: 18536 - DNA, 20 bp, Artificial sequence
  synthetic
ggttgcccccgcgggcgtca

SEQ ID NO: 18537 - DNA, 20 bp, Artificial sequence
  synthetic
gcagaagctgtgacacgtgc

SEQ ID NO: 18538 - DNA, 20 bp, Artificial sequence
  synthetic
aggtccggattgcacgtgga

SEQ ID NO: 18539 - DNA, 20 bp, Artificial sequence
  synthetic
ccgcctccccgcgagtattt

SEQ ID NO: 18540 - DNA, 20 bp, Artificial sequence
  synthetic
gcggttgccgtggggaccgg

SEQ ID NO: 18541 - DNA, 20 bp, Artificial sequence
  synthetic
agggcgcctttcgattgcat

SEQ ID NO: 18542 - DNA, 20 bp, Artificial sequence
  synthetic
ggcgtggtgcatggctgtaa

SEQ ID NO: 18543 - DNA, 20 bp, Artificial sequence
  synthetic
aggtctgacaagatgtacca

SEQ ID NO: 18544 - DNA, 20 bp, Artificial sequence
  synthetic
gagctgggagaaggcagtga

SEQ ID NO: 18545 - DNA, 20 bp, Artificial sequence
  synthetic
cgcgcattggggacttgact

SEQ ID NO: 18546 - DNA, 20 bp, Artificial sequence
  synthetic
caggggacccagccaggggg

SEQ ID NO: 18547 - DNA, 20 bp, Artificial sequence
  synthetic
ccgcgctgcgaggcggaggt

SEQ ID NO: 18548 - DNA, 20 bp, Artificial sequence
  synthetic
tctgggatgtgcctcaccgg

SEQ ID NO: 18549 - DNA, 20 bp, Artificial sequence
  synthetic
taccccatgtctcaccacga

SEQ ID NO: 18550 - DNA, 20 bp, Artificial sequence
  synthetic
aagtgggtacgcaggggcgc

SEQ ID NO: 18551 - DNA, 20 bp, Artificial sequence
  synthetic
gaagctgctgttagctcgcc

SEQ ID NO: 18552 - DNA, 20 bp, Artificial sequence
  synthetic
cgggcactccagcgaccgtg

SEQ ID NO: 18553 - DNA, 20 bp, Artificial sequence
  synthetic
tcagcactgaaaccccgtcc

SEQ ID NO: 18554 - DNA, 20 bp, Artificial sequence
  synthetic
gggcctccgggacaagttgg

SEQ ID NO: 18555 - DNA, 20 bp, Artificial sequence
  synthetic
ctcgtgatccgcccgccttg

SEQ ID NO: 18556 - DNA, 20 bp, Artificial sequence
  synthetic
ggcgggcttcgggagcgccc

SEQ ID NO: 18557 - DNA, 20 bp, Artificial sequence
  synthetic
ttttcctgttccccctctgc

SEQ ID NO: 18558 - DNA, 20 bp, Artificial sequence
  synthetic
tgaggcgtagggggtggcgc

SEQ ID NO: 18559 - DNA, 20 bp, Artificial sequence
  synthetic
gacaaaacctcctccttttc

SEQ ID NO: 18560 - DNA, 20 bp, Artificial sequence
  synthetic
ttcgttcgagaacaactgtg

SEQ ID NO: 18561 - DNA, 20 bp, Artificial sequence
  synthetic
tcctccttttccaagcggct

SEQ ID NO: 18562 - DNA, 20 bp, Artificial sequence
  synthetic
accacacccaagtagctgcc

SEQ ID NO: 18563 - DNA, 20 bp, Artificial sequence
  synthetic
catagtgaccgtccgctcgc

SEQ ID NO: 18564 - DNA, 20 bp, Artificial sequence
  synthetic
gctactctgagaagaagaca

SEQ ID NO: 18565 - DNA, 20 bp, Artificial sequence
  synthetic
tcttgtgggctgaggggcag

SEQ ID NO: 18566 - DNA, 20 bp, Artificial sequence
  synthetic
cgcagtccctcaagcctgtg

SEQ ID NO: 18567 - DNA, 20 bp, Artificial sequence
  synthetic
gctgtgctctcactcaatgc

SEQ ID NO: 18568 - DNA, 20 bp, Artificial sequence
  synthetic
gagaaaggagctcccgggat

SEQ ID NO: 18569 - DNA, 20 bp, Artificial sequence
  synthetic
ctgacactggccctgaatca

SEQ ID NO: 18570 - DNA, 20 bp, Artificial sequence
  synthetic
aatcagggctggagggggca

SEQ ID NO: 18571 - DNA, 20 bp, Artificial sequence
  synthetic
acaactatttttgaggtatc

SEQ ID NO: 18572 - DNA, 20 bp, Artificial sequence
  synthetic
ttgggaagatggcggctgtg

SEQ ID NO: 18573 - DNA, 20 bp, Artificial sequence
  synthetic
cgccgcggcgcctgcgcggt

SEQ ID NO: 18574 - DNA, 20 bp, Artificial sequence
  synthetic
cgggcctggcctcccgataa

SEQ ID NO: 18575 - DNA, 20 bp, Artificial sequence
  synthetic
gtcccttgcggcggcgggag

SEQ ID NO: 18576 - DNA, 20 bp, Artificial sequence
  synthetic
gggaagaggctgagcccggc

SEQ ID NO: 18577 - DNA, 20 bp, Artificial sequence
  synthetic
ccaggcagctggcgctggag

SEQ ID NO: 18578 - DNA, 20 bp, Artificial sequence
  synthetic
cgcccttccaggagatgggt

SEQ ID NO: 18579 - DNA, 20 bp, Artificial sequence
  synthetic
cccggcctcagctctccgcc

SEQ ID NO: 18580 - DNA, 20 bp, Artificial sequence
  synthetic
ggcttttcatggggccgagc

SEQ ID NO: 18581 - DNA, 20 bp, Artificial sequence
  synthetic
cgggagcgcccttccaggag

SEQ ID NO: 18582 - DNA, 20 bp, Artificial sequence
  synthetic
aagggaagccctcgagggcc

SEQ ID NO: 18583 - DNA, 20 bp, Artificial sequence
  synthetic
tcccggctaccccccggacg

SEQ ID NO: 18584 - DNA, 20 bp, Artificial sequence
  synthetic
tgctctctctcgctgggtcg

SEQ ID NO: 18585 - DNA, 20 bp, Artificial sequence
  synthetic
acagccctgctctgggacac

SEQ ID NO: 18586 - DNA, 20 bp, Artificial sequence
  synthetic
tcctgagtcagaccataatc

SEQ ID NO: 18587 - DNA, 20 bp, Artificial sequence
  synthetic
ctaccctcacgtgtctggtt

SEQ ID NO: 18588 - DNA, 20 bp, Artificial sequence
  synthetic
ccgtcccactctgccctgtt

SEQ ID NO: 18589 - DNA, 20 bp, Artificial sequence
  synthetic
cgcttgccgcgtcctcccat

SEQ ID NO: 18590 - DNA, 20 bp, Artificial sequence
  synthetic
agtgtctgggcgggaagccg

SEQ ID NO: 18591 - DNA, 20 bp, Artificial sequence
  synthetic
ggcctcccgcagggcccact

SEQ ID NO: 18592 - DNA, 20 bp, Artificial sequence
  synthetic
agagcggtgcccgcgtcaga

SEQ ID NO: 18593 - DNA, 20 bp, Artificial sequence
  synthetic
caaagctcacggaagacaaa

SEQ ID NO: 18594 - DNA, 20 bp, Artificial sequence
  synthetic
cgatagctgcttcgggattg

SEQ ID NO: 18595 - DNA, 20 bp, Artificial sequence
  synthetic
ccaggaactgaccctgctct

SEQ ID NO: 18596 - DNA, 20 bp, Artificial sequence
  synthetic
cctttcgtttttttaaagaa

SEQ ID NO: 18597 - DNA, 20 bp, Artificial sequence
  synthetic
catcggcatgccgcagggaa

SEQ ID NO: 18598 - DNA, 20 bp, Artificial sequence
  synthetic
ggcgactacggctggtgtgg

SEQ ID NO: 18599 - DNA, 20 bp, Artificial sequence
  synthetic
gacgctgccggcggagacgg

SEQ ID NO: 18600 - DNA, 20 bp, Artificial sequence
  synthetic
cagcttcagatcactgtatc

SEQ ID NO: 18601 - DNA, 20 bp, Artificial sequence
  synthetic
ttcctgccggggcggcccca

SEQ ID NO: 18602 - DNA, 20 bp, Artificial sequence
  synthetic
actgggatacccttagactg

SEQ ID NO: 18603 - DNA, 20 bp, Artificial sequence
  synthetic
caggacgcggggtgggggac

SEQ ID NO: 18604 - DNA, 20 bp, Artificial sequence
  synthetic
cgcggttttcttaactttag

SEQ ID NO: 18605 - DNA, 20 bp, Artificial sequence
  synthetic
atggagaagccgcggcggag

SEQ ID NO: 18606 - DNA, 20 bp, Artificial sequence
  synthetic
tctctgcagcccagcaccag

SEQ ID NO: 18607 - DNA, 20 bp, Artificial sequence
  synthetic
ctggtatccctaagactggg

SEQ ID NO: 18608 - DNA, 20 bp, Artificial sequence
  synthetic
gagacaccccgtttcgtagt

SEQ ID NO: 18609 - DNA, 20 bp, Artificial sequence
  synthetic
cgcactgagcctaagcagcc

SEQ ID NO: 18610 - DNA, 20 bp, Artificial sequence
  synthetic
gcgcggctgaggcgcggcgg

SEQ ID NO: 18611 - DNA, 20 bp, Artificial sequence
  synthetic
cccaagacatctctgcacag

SEQ ID NO: 18612 - DNA, 20 bp, Artificial sequence
  synthetic
gccgcccggtgcactgtgga

SEQ ID NO: 18613 - DNA, 20 bp, Artificial sequence
  synthetic
ctgtatgatccaaggtaccc

SEQ ID NO: 18614 - DNA, 20 bp, Artificial sequence
  synthetic
cggcggcgggaacccggata

SEQ ID NO: 18615 - DNA, 20 bp, Artificial sequence
  synthetic
ggaccgcgtcctgcgccgga

SEQ ID NO: 18616 - DNA, 20 bp, Artificial sequence
  synthetic
gcctcattccttagctgggg

SEQ ID NO: 18617 - DNA, 20 bp, Artificial sequence
  synthetic
tgctgctgaggcgtgagaat

SEQ ID NO: 18618 - DNA, 20 bp, Artificial sequence
  synthetic
gggggctggggcatggtcta

SEQ ID NO: 18619 - DNA, 20 bp, Artificial sequence
  synthetic
gtgtacgcccgcagagccgc

SEQ ID NO: 18620 - DNA, 20 bp, Artificial sequence
  synthetic
gatcaccttgggatgatggt

SEQ ID NO: 18621 - DNA, 20 bp, Artificial sequence
  synthetic
gggtgcagtgagacaccagg

SEQ ID NO: 18622 - DNA, 20 bp, Artificial sequence
  synthetic
cggactgggcccagcttgtc

SEQ ID NO: 18623 - DNA, 20 bp, Artificial sequence
  synthetic
accctgtgatctgcaagtcc

SEQ ID NO: 18624 - DNA, 20 bp, Artificial sequence
  synthetic
ttggagctctgcgtctcgtc

SEQ ID NO: 18625 - DNA, 20 bp, Artificial sequence
  synthetic
cttttccgcgttctccaact

SEQ ID NO: 18626 - DNA, 20 bp, Artificial sequence
  synthetic
ggcggctcctccctccgcag

SEQ ID NO: 18627 - DNA, 20 bp, Artificial sequence
  synthetic
gctctgtgacctgcgggtat

SEQ ID NO: 18628 - DNA, 20 bp, Artificial sequence
  synthetic
aatgcctctctaaaacatga

SEQ ID NO: 18629 - DNA, 20 bp, Artificial sequence
  synthetic
gaccgcgggcgagtgcagcc

SEQ ID NO: 18630 - DNA, 20 bp, Artificial sequence
  synthetic
catctgcctctaggtcccat

SEQ ID NO: 18631 - DNA, 20 bp, Artificial sequence
  synthetic
cgcgcgcctacactcccgtg

SEQ ID NO: 18632 - DNA, 20 bp, Artificial sequence
  synthetic
gtcgtcgcagagcacagcct

SEQ ID NO: 18633 - DNA, 20 bp, Artificial sequence
  synthetic
cttgcttggcccgtccggcg

SEQ ID NO: 18634 - DNA, 20 bp, Artificial sequence
  synthetic
gccaagagcactgcatgagc

SEQ ID NO: 18635 - DNA, 20 bp, Artificial sequence
  synthetic
gcgagacttcctgctcatct

SEQ ID NO: 18636 - DNA, 20 bp, Artificial sequence
  synthetic
cgagacggagggccagagag

SEQ ID NO: 18637 - DNA, 20 bp, Artificial sequence
  synthetic
agccctccctagcatcacca

SEQ ID NO: 18638 - DNA, 20 bp, Artificial sequence
  synthetic
gcctcgggaggtggtggagt

SEQ ID NO: 18639 - DNA, 20 bp, Artificial sequence
  synthetic
cggcctccgtcacagccacc

SEQ ID NO: 18640 - DNA, 20 bp, Artificial sequence
  synthetic
tccttagccaaatctactga

SEQ ID NO: 18641 - DNA, 20 bp, Artificial sequence
  synthetic
tgtcgtccgctctctctgcc

SEQ ID NO: 18642 - DNA, 20 bp, Artificial sequence
  synthetic
accgtgttgcattcatcttt

SEQ ID NO: 18643 - DNA, 20 bp, Artificial sequence
  synthetic
agctgccgggacggtcccca

SEQ ID NO: 18644 - DNA, 20 bp, Artificial sequence
  synthetic
gtggcagcggccgtggcagg

SEQ ID NO: 18645 - DNA, 20 bp, Artificial sequence
  synthetic
ccggggcagaagtgctggtc

SEQ ID NO: 18646 - DNA, 20 bp, Artificial sequence
  synthetic
tcaccgcctgccgccgcgcc

SEQ ID NO: 18647 - DNA, 20 bp, Artificial sequence
  synthetic
aacctgttccaccttctcca

SEQ ID NO: 18648 - DNA, 20 bp, Artificial sequence
  synthetic
cgagcggcgctccaaaaccc

SEQ ID NO: 18649 - DNA, 20 bp, Artificial sequence
  synthetic
cttccccaaatcccgtaatc

SEQ ID NO: 18650 - DNA, 20 bp, Artificial sequence
  synthetic
gggatgccgcgcgccgcgcg

SEQ ID NO: 18651 - DNA, 20 bp, Artificial sequence
  synthetic
ggcggagaagactcgaacgg

SEQ ID NO: 18652 - DNA, 20 bp, Artificial sequence
  synthetic
gcctcccctcggaactcggg

SEQ ID NO: 18653 - DNA, 20 bp, Artificial sequence
  synthetic
gctgactggcgggtggggtt

SEQ ID NO: 18654 - DNA, 20 bp, Artificial sequence
  synthetic
gagttgctcagtggctctgc

SEQ ID NO: 18655 - DNA, 20 bp, Artificial sequence
  synthetic
ccggcggtggacccacgagc

SEQ ID NO: 18656 - DNA, 20 bp, Artificial sequence
  synthetic
gaacatggcggcccccgagt

SEQ ID NO: 18657 - DNA, 20 bp, Artificial sequence
  synthetic
gagtggaaagctgctgctga

SEQ ID NO: 18658 - DNA, 20 bp, Artificial sequence
  synthetic
tgcaggaggtggcactcctg

SEQ ID NO: 18659 - DNA, 20 bp, Artificial sequence
  synthetic
cccggtaaaggcctccgtgt

SEQ ID NO: 18660 - DNA, 20 bp, Artificial sequence
  synthetic
ggagcgccccgccccctccc

SEQ ID NO: 18661 - DNA, 20 bp, Artificial sequence
  synthetic
gtctccgccttctgcatcgc

SEQ ID NO: 18662 - DNA, 20 bp, Artificial sequence
  synthetic
aggagaatgaaaggttgcag

SEQ ID NO: 18663 - DNA, 20 bp, Artificial sequence
  synthetic
tgaagctagaatctcagaag

SEQ ID NO: 18664 - DNA, 20 bp, Artificial sequence
  synthetic
ttcagtatttgttattgtga

SEQ ID NO: 18665 - DNA, 20 bp, Artificial sequence
  synthetic
cgcggggtccgctatggcgg

SEQ ID NO: 18666 - DNA, 20 bp, Artificial sequence
  synthetic
ggaggaggtactcgccttac

SEQ ID NO: 18667 - DNA, 20 bp, Artificial sequence
  synthetic
actcttcagtctttgcaggc

SEQ ID NO: 18668 - DNA, 20 bp, Artificial sequence
  synthetic
gtcatcaggcaggtactaga

SEQ ID NO: 18669 - DNA, 20 bp, Artificial sequence
  synthetic
aagggctcgagacgcagccg

SEQ ID NO: 18670 - DNA, 20 bp, Artificial sequence
  synthetic
acaaatttttatgtggaggc

SEQ ID NO: 18671 - DNA, 20 bp, Artificial sequence
  synthetic
ctgcaacgtgtctctggggc

SEQ ID NO: 18672 - DNA, 20 bp, Artificial sequence
  synthetic
gcgcacgcatcctgcccgcg

SEQ ID NO: 18673 - DNA, 20 bp, Artificial sequence
  synthetic
cgcgaagagccctctgtacc

SEQ ID NO: 18674 - DNA, 20 bp, Artificial sequence
  synthetic
gcgcggcggtggaaggtgtc

SEQ ID NO: 18675 - DNA, 20 bp, Artificial sequence
  synthetic
ggctgcacgcggtgaagaaa

SEQ ID NO: 18676 - DNA, 20 bp, Artificial sequence
  synthetic
agccggggagccgccgccgc

SEQ ID NO: 18677 - DNA, 20 bp, Artificial sequence
  synthetic
accgttcttattgctggcgg

SEQ ID NO: 18678 - DNA, 20 bp, Artificial sequence
  synthetic
aggtcccggcaaccgcaggc

SEQ ID NO: 18679 - DNA, 20 bp, Artificial sequence
  synthetic
gatggcggcttcctagtgag

SEQ ID NO: 18680 - DNA, 20 bp, Artificial sequence
  synthetic
ggcctcctgacctttcacac

SEQ ID NO: 18681 - DNA, 20 bp, Artificial sequence
  synthetic
gtggggcggtggcgtcccac

SEQ ID NO: 18682 - DNA, 20 bp, Artificial sequence
  synthetic
gagggagcccagtggaggcg

SEQ ID NO: 18683 - DNA, 20 bp, Artificial sequence
  synthetic
ttttgtcaaagaggcctcct

SEQ ID NO: 18684 - DNA, 20 bp, Artificial sequence
  synthetic
tcacagccagtgcaccggag

SEQ ID NO: 18685 - DNA, 20 bp, Artificial sequence
  synthetic
gagttgtaagacgttcatcg

SEQ ID NO: 18686 - DNA, 20 bp, Artificial sequence
  synthetic
ccggttgtcctcttcgctgc

SEQ ID NO: 18687 - DNA, 20 bp, Artificial sequence
  synthetic
ttacgcgggccagttgttgc

SEQ ID NO: 18688 - DNA, 20 bp, Artificial sequence
  synthetic
cagccggggactctgcgcct

SEQ ID NO: 18689 - DNA, 20 bp, Artificial sequence
  synthetic
gggagccgcggacaagccca

SEQ ID NO: 18690 - DNA, 20 bp, Artificial sequence
  synthetic
ggcccccagcgtgttgaccg

SEQ ID NO: 18691 - DNA, 20 bp, Artificial sequence
  synthetic
agcagcggcggacgctctgc

SEQ ID NO: 18692 - DNA, 20 bp, Artificial sequence
  synthetic
gttgctctgcgctctgcggc

SEQ ID NO: 18693 - DNA, 20 bp, Artificial sequence
  synthetic
tttccggataacgactacag

SEQ ID NO: 18694 - DNA, 20 bp, Artificial sequence
  synthetic
ttttccatttacctccgctg

SEQ ID NO: 18695 - DNA, 20 bp, Artificial sequence
  synthetic
ggagacgtgggccctcggaa

SEQ ID NO: 18696 - DNA, 20 bp, Artificial sequence
  synthetic
agctctgtgtgatttctgga

SEQ ID NO: 18697 - DNA, 20 bp, Artificial sequence
  synthetic
cagaaccagcaaaaccagaa

SEQ ID NO: 18698 - DNA, 20 bp, Artificial sequence
  synthetic
gggaggcctggctgtgtgga

SEQ ID NO: 18699 - DNA, 20 bp, Artificial sequence
  synthetic
cccagacagagtgtccccac

SEQ ID NO: 18700 - DNA, 20 bp, Artificial sequence
  synthetic
agcagcaggcgagcctcggc

SEQ ID NO: 18701 - DNA, 20 bp, Artificial sequence
  synthetic
ttccggggagaagcctttcc

SEQ ID NO: 18702 - DNA, 20 bp, Artificial sequence
  synthetic
aaagataggaactgacagga

SEQ ID NO: 18703 - DNA, 20 bp, Artificial sequence
  synthetic
tccgctgggctgcagggact

SEQ ID NO: 18704 - DNA, 20 bp, Artificial sequence
  synthetic
agtgcaatggcgctatctcg

SEQ ID NO: 18705 - DNA, 20 bp, Artificial sequence
  synthetic
gtagcggcggcggctcgggc

SEQ ID NO: 18706 - DNA, 20 bp, Artificial sequence
  synthetic
gaccccaccccctggctacc

SEQ ID NO: 18707 - DNA, 20 bp, Artificial sequence
  synthetic
gcgcagctctggtacaccgg

SEQ ID NO: 18708 - DNA, 20 bp, Artificial sequence
  synthetic
tgcgcagtggcgtccgctgt

SEQ ID NO: 18709 - DNA, 20 bp, Artificial sequence
  synthetic
tccggcggagcgcgcctccc

SEQ ID NO: 18710 - DNA, 20 bp, Artificial sequence
  synthetic
cttccgggcaaacgaccatc

SEQ ID NO: 18711 - DNA, 20 bp, Artificial sequence
  synthetic
aagagcggcgcgacgtgagc

SEQ ID NO: 18712 - DNA, 20 bp, Artificial sequence
  synthetic
ctagcactagaaggtgaggc

SEQ ID NO: 18713 - DNA, 20 bp, Artificial sequence
  synthetic
ccgcggacgtccttgtgggc

SEQ ID NO: 18714 - DNA, 20 bp, Artificial sequence
  synthetic
tcctcccgccggcgctgggc

SEQ ID NO: 18715 - DNA, 20 bp, Artificial sequence
  synthetic
gcggtggggggaaagcggcc

SEQ ID NO: 18716 - DNA, 20 bp, Artificial sequence
  synthetic
tctggctataaaaatgctat

SEQ ID NO: 18717 - DNA, 20 bp, Artificial sequence
  synthetic
ccgccccgcccgcggctgct

SEQ ID NO: 18718 - DNA, 20 bp, Artificial sequence
  synthetic
acgtagctgcccttcagcca

SEQ ID NO: 18719 - DNA, 20 bp, Artificial sequence
  synthetic
tttttgcatttttcctccca

SEQ ID NO: 18720 - DNA, 20 bp, Artificial sequence
  synthetic
aactgcccaggagtgagtag

SEQ ID NO: 18721 - DNA, 20 bp, Artificial sequence
  synthetic
cttggtggttttgctgcagc

SEQ ID NO: 18722 - DNA, 20 bp, Artificial sequence
  synthetic
ctggccttccatctctctca

SEQ ID NO: 18723 - DNA, 20 bp, Artificial sequence
  synthetic
caccctcactggctgtcgct

SEQ ID NO: 18724 - DNA, 20 bp, Artificial sequence
  synthetic
gccttccatctctctcagac

SEQ ID NO: 18725 - DNA, 20 bp, Artificial sequence
  synthetic
aatcagactccaagcagcga

SEQ ID NO: 18726 - DNA, 20 bp, Artificial sequence
  synthetic
tctcagacaccaagctgcag

SEQ ID NO: 18727 - DNA, 20 bp, Artificial sequence
  synthetic
taacactgccccaagtgaaa

SEQ ID NO: 18728 - DNA, 20 bp, Artificial sequence
  synthetic
taattaagcaagagaaactg

SEQ ID NO: 18729 - DNA, 20 bp, Artificial sequence
  synthetic
tagagacaaaatatcagtgt

SEQ ID NO: 18730 - DNA, 20 bp, Artificial sequence
  synthetic
tccttgaccacaacaaagat

SEQ ID NO: 18731 - DNA, 20 bp, Artificial sequence
  synthetic
gattcttctgcctcagcctc

SEQ ID NO: 18732 - DNA, 20 bp, Artificial sequence
  synthetic
ccatcattctccacccagct

SEQ ID NO: 18733 - DNA, 20 bp, Artificial sequence
  synthetic
ccagcttgcctcctcttgag

SEQ ID NO: 18734 - DNA, 20 bp, Artificial sequence
  synthetic
tgcgcgctgggcggaaagga

SEQ ID NO: 18735 - DNA, 20 bp, Artificial sequence
  synthetic
gttaatggcttttctgcacg

SEQ ID NO: 18736 - DNA, 20 bp, Artificial sequence
  synthetic
taccaaatcactggacctta

SEQ ID NO: 18737 - DNA, 20 bp, Artificial sequence
  synthetic
cctgtcgcagccgcgccgcc

SEQ ID NO: 18738 - DNA, 20 bp, Artificial sequence
  synthetic
attcccgaagggcaagaagt

SEQ ID NO: 18739 - DNA, 20 bp, Artificial sequence
  synthetic
ccaggacctgcaggaaggga

SEQ ID NO: 18740 - DNA, 20 bp, Artificial sequence
  synthetic
tcccccactggaaaggattc

SEQ ID NO: 18741 - DNA, 20 bp, Artificial sequence
  synthetic
ggcagcatcactgtgcctgt

SEQ ID NO: 18742 - DNA, 20 bp, Artificial sequence
  synthetic
gggggagaccagcgcaggtc

SEQ ID NO: 18743 - DNA, 20 bp, Artificial sequence
  synthetic
ccttgggttcgggtgaaagc

SEQ ID NO: 18744 - DNA, 20 bp, Artificial sequence
  synthetic
tcaggctccataatgggaga

SEQ ID NO: 18745 - DNA, 20 bp, Artificial sequence
  synthetic
agcaacaaaactgacggagg

SEQ ID NO: 18746 - DNA, 20 bp, Artificial sequence
  synthetic
gctacagttaattaatcctt

SEQ ID NO: 18747 - DNA, 20 bp, Artificial sequence
  synthetic
ccatctcacctctgtcggat

SEQ ID NO: 18748 - DNA, 20 bp, Artificial sequence
  synthetic
aggtcacagggcaccgctgg

SEQ ID NO: 18749 - DNA, 20 bp, Artificial sequence
  synthetic
ggtcgcgcggctcgcgcagg

SEQ ID NO: 18750 - DNA, 20 bp, Artificial sequence
  synthetic
tccccctctcctccatcccc

SEQ ID NO: 18751 - DNA, 20 bp, Artificial sequence
  synthetic
cttccccctctctcctggga

SEQ ID NO: 18752 - DNA, 20 bp, Artificial sequence
  synthetic
gcccggttggccaccccgtt

SEQ ID NO: 18753 - DNA, 20 bp, Artificial sequence
  synthetic
ctgagcctgaactaggagca

SEQ ID NO: 18754 - DNA, 20 bp, Artificial sequence
  synthetic
aggttcttcttgaggaaact

SEQ ID NO: 18755 - DNA, 20 bp, Artificial sequence
  synthetic
gggtttgaatgtgccccggc

SEQ ID NO: 18756 - DNA, 20 bp, Artificial sequence
  synthetic
gcctgaagaccaaggagtgg

SEQ ID NO: 18757 - DNA, 20 bp, Artificial sequence
  synthetic
gtacatcccctcctccccca

SEQ ID NO: 18758 - DNA, 20 bp, Artificial sequence
  synthetic
aacggagaaaagaagccgtg

SEQ ID NO: 18759 - DNA, 20 bp, Artificial sequence
  synthetic
gcgtcccgccagaacgatcg

SEQ ID NO: 18760 - DNA, 20 bp, Artificial sequence
  synthetic
cagcgtcctaggactcacct

SEQ ID NO: 18761 - DNA, 20 bp, Artificial sequence
  synthetic
cgcagcgatcgcgagcgtgt

SEQ ID NO: 18762 - DNA, 20 bp, Artificial sequence
  synthetic
cgtactcgtgcgcctcgctt

SEQ ID NO: 18763 - DNA, 20 bp, Artificial sequence
  synthetic
cgccccatcctgtctgtccg

SEQ ID NO: 18764 - DNA, 20 bp, Artificial sequence
  synthetic
ttcctttagcccgctggcgc

SEQ ID NO: 18765 - DNA, 20 bp, Artificial sequence
  synthetic
gtgagagggaggctccccat

SEQ ID NO: 18766 - DNA, 20 bp, Artificial sequence
  synthetic
tcaagctccggacagggaag

SEQ ID NO: 18767 - DNA, 20 bp, Artificial sequence
  synthetic
ccaaagctgaccaagaagaa

SEQ ID NO: 18768 - DNA, 20 bp, Artificial sequence
  synthetic
gcctgggtgcagcagtgtgc

SEQ ID NO: 18769 - DNA, 20 bp, Artificial sequence
  synthetic
tcgtggcgtgtgcggtttcg

SEQ ID NO: 18770 - DNA, 20 bp, Artificial sequence
  synthetic
cagcacctcctcgccagcag

SEQ ID NO: 18771 - DNA, 20 bp, Artificial sequence
  synthetic
gccagttcaaagccctgctg

SEQ ID NO: 18772 - DNA, 20 bp, Artificial sequence
  synthetic
tggcgcttgggtactggctg

SEQ ID NO: 18773 - DNA, 20 bp, Artificial sequence
  synthetic
catcttggctcactgcagtg

SEQ ID NO: 18774 - DNA, 20 bp, Artificial sequence
  synthetic
tgtgctgagcggcgggactg

SEQ ID NO: 18775 - DNA, 20 bp, Artificial sequence
  synthetic
agggggagctggaggctgga

SEQ ID NO: 18776 - DNA, 20 bp, Artificial sequence
  synthetic
ttctcgtgagcttaggccgc

SEQ ID NO: 18777 - DNA, 20 bp, Artificial sequence
  synthetic
acaccatggtcaactcctgt

SEQ ID NO: 18778 - DNA, 20 bp, Artificial sequence
  synthetic
acttttaagtttttccgctt

SEQ ID NO: 18779 - DNA, 20 bp, Artificial sequence
  synthetic
aggaccacgcaggaggtggt

SEQ ID NO: 18780 - DNA, 20 bp, Artificial sequence
  synthetic
ccccgcctccacgtgagagc

SEQ ID NO: 18781 - DNA, 20 bp, Artificial sequence
  synthetic
aggcggggctgctaggcctc

SEQ ID NO: 18782 - DNA, 20 bp, Artificial sequence
  synthetic
gaaaactacccctaaaagcc

SEQ ID NO: 18783 - DNA, 20 bp, Artificial sequence
  synthetic
gggcgtggtgtcctggtgct

SEQ ID NO: 18784 - DNA, 20 bp, Artificial sequence
  synthetic
cccttcggacctcgtctccc

SEQ ID NO: 18785 - DNA, 20 bp, Artificial sequence
  synthetic
cagtagtaatttgagcctct

SEQ ID NO: 18786 - DNA, 20 bp, Artificial sequence
  synthetic
ccagctgcagagagcttcag

SEQ ID NO: 18787 - DNA, 20 bp, Artificial sequence
  synthetic
ttgcaaggaagggcgagatt

SEQ ID NO: 18788 - DNA, 20 bp, Artificial sequence
  synthetic
cgtggtggtgcaggcgagac

SEQ ID NO: 18789 - DNA, 20 bp, Artificial sequence
  synthetic
tcaagtgttgcggagatagg

SEQ ID NO: 18790 - DNA, 20 bp, Artificial sequence
  synthetic
aagatggcggctgctgtagg

SEQ ID NO: 18791 - DNA, 20 bp, Artificial sequence
  synthetic
acctcgcacagcctctccca

SEQ ID NO: 18792 - DNA, 20 bp, Artificial sequence
  synthetic
tgagcttcagggaaaagaag

SEQ ID NO: 18793 - DNA, 20 bp, Artificial sequence
  synthetic
ggtgacgctgctgctggggc

SEQ ID NO: 18794 - DNA, 20 bp, Artificial sequence
  synthetic
cagctaacctctaatgggag

SEQ ID NO: 18795 - DNA, 20 bp, Artificial sequence
  synthetic
cagccgctacttaagaggct

SEQ ID NO: 18796 - DNA, 20 bp, Artificial sequence
  synthetic
tgcaccctcgcacccacacc

SEQ ID NO: 18797 - DNA, 20 bp, Artificial sequence
  synthetic
cccgcggtcctccgtcggtt

SEQ ID NO: 18798 - DNA, 20 bp, Artificial sequence
  synthetic
accgacaaccaagaccccgc

SEQ ID NO: 18799 - DNA, 20 bp, Artificial sequence
  synthetic
ccagaatggctactctgatc

SEQ ID NO: 18800 - DNA, 20 bp, Artificial sequence
  synthetic
agaggtctgtacctcgaggg

SEQ ID NO: 18801 - DNA, 20 bp, Artificial sequence
  synthetic
cagtcgccccgacgctagtg

SEQ ID NO: 18802 - DNA, 20 bp, Artificial sequence
  synthetic
gtcctttgcatctgcacgtg

SEQ ID NO: 18803 - DNA, 20 bp, Artificial sequence
  synthetic
caccctctcccctcgtccac

SEQ ID NO: 18804 - DNA, 20 bp, Artificial sequence
  synthetic
tggacaaaatggcgaagatc

SEQ ID NO: 18805 - DNA, 20 bp, Artificial sequence
  synthetic
ctttatctcctgactcacgg

SEQ ID NO: 18806 - DNA, 20 bp, Artificial sequence
  synthetic
ggggctgcttagatgcgcca

SEQ ID NO: 18807 - DNA, 20 bp, Artificial sequence
  synthetic
gagcgccggagcggagggag

SEQ ID NO: 18808 - DNA, 20 bp, Artificial sequence
  synthetic
ccatggccgcctctcccgga

SEQ ID NO: 18809 - DNA, 20 bp, Artificial sequence
  synthetic
gataatcggcgcccggggcc

SEQ ID NO: 18810 - DNA, 20 bp, Artificial sequence
  synthetic
actgtgcacgagcgaagggt

SEQ ID NO: 18811 - DNA, 20 bp, Artificial sequence
  synthetic
cggtagtcgattggtcaagt

SEQ ID NO: 18812 - DNA, 20 bp, Artificial sequence
  synthetic
tcctgctcggcggagtggtg

SEQ ID NO: 18813 - DNA, 20 bp, Artificial sequence
  synthetic
actgtcacatggtgcgcgct

SEQ ID NO: 18814 - DNA, 20 bp, Artificial sequence
  synthetic
tccgtccgctcgccgcaccg

SEQ ID NO: 18815 - DNA, 20 bp, Artificial sequence
  synthetic
cgggtttgatatttgacaaa

SEQ ID NO: 18816 - DNA, 20 bp, Artificial sequence
  synthetic
cctctacccacccgccgcac

SEQ ID NO: 18817 - DNA, 20 bp, Artificial sequence
  synthetic
ggcggcgaggagagcggtgc

SEQ ID NO: 18818 - DNA, 20 bp, Artificial sequence
  synthetic
ggactcgagtctcaaccggg

SEQ ID NO: 18819 - DNA, 20 bp, Artificial sequence
  synthetic
gttggtcctggagcggcgca

SEQ ID NO: 18820 - DNA, 20 bp, Artificial sequence
  synthetic
cgagcagcagagtccgcacg

SEQ ID NO: 18821 - DNA, 20 bp, Artificial sequence
  synthetic
cgtgcacattgctttgcttg

SEQ ID NO: 18822 - DNA, 20 bp, Artificial sequence
  synthetic
cggtagcgggagcggagagc

SEQ ID NO: 18823 - DNA, 20 bp, Artificial sequence
  synthetic
ccctcggagtcaccgtggcc

SEQ ID NO: 18824 - DNA, 20 bp, Artificial sequence
  synthetic
gcgcggcatagcccggctcg

SEQ ID NO: 18825 - DNA, 20 bp, Artificial sequence
  synthetic
ttctttcggttctacctggg

SEQ ID NO: 18826 - DNA, 20 bp, Artificial sequence
  synthetic
cggacgcagtctggccgcca

SEQ ID NO: 18827 - DNA, 20 bp, Artificial sequence
  synthetic
ggctctcggctgcagcgctg

SEQ ID NO: 18828 - DNA, 20 bp, Artificial sequence
  synthetic
cggcgcaggggcggagcgaa

SEQ ID NO: 18829 - DNA, 20 bp, Artificial sequence
  synthetic
aacaaaaagcaacacccccc

SEQ ID NO: 18830 - DNA, 20 bp, Artificial sequence
  synthetic
cccatcacttaataaatagc

SEQ ID NO: 18831 - DNA, 20 bp, Artificial sequence
  synthetic
ttcactgccataaatgtggg

SEQ ID NO: 18832 - DNA, 20 bp, Artificial sequence
  synthetic
cagccattccgaaggtcaag

SEQ ID NO: 18833 - DNA, 20 bp, Artificial sequence
  synthetic
ggatgatccatcggtccacg

SEQ ID NO: 18834 - DNA, 20 bp, Artificial sequence
  synthetic
caccaaagattgagacggac

SEQ ID NO: 18835 - DNA, 20 bp, Artificial sequence
  synthetic
tgaaagaagagatggagaaa

SEQ ID NO: 18836 - DNA, 20 bp, Artificial sequence
  synthetic
ggcggtgccccataggatgt

SEQ ID NO: 18837 - DNA, 20 bp, Artificial sequence
  synthetic
cgaaacacagagtagtgtcc

SEQ ID NO: 18838 - DNA, 20 bp, Artificial sequence
  synthetic
caaaaacaagtcccatgtcc

SEQ ID NO: 18839 - DNA, 20 bp, Artificial sequence
  synthetic
agtagactccttcgaacgta

SEQ ID NO: 18840 - DNA, 20 bp, Artificial sequence
  synthetic
ctaaagacattgtcaccgag

SEQ ID NO: 18841 - DNA, 20 bp, Artificial sequence
  synthetic
gcttaagaatttaagctctg

SEQ ID NO: 18842 - DNA, 20 bp, Artificial sequence
  synthetic
tgtgtgtgtgtgtgtgtgtg

SEQ ID NO: 18843 - DNA, 20 bp, Artificial sequence
  synthetic
cccatcctctctctgtgccc

SEQ ID NO: 18844 - DNA, 20 bp, Artificial sequence
  synthetic
caagatggctattggtctgc

SEQ ID NO: 18845 - DNA, 20 bp, Artificial sequence
  synthetic
actcttaagtgcataatgat

SEQ ID NO: 18846 - DNA, 20 bp, Artificial sequence
  synthetic
ggtgctcacagaaccctttt

SEQ ID NO: 18847 - DNA, 20 bp, Artificial sequence
  synthetic
aactacccaactatgttgtg

SEQ ID NO: 18848 - DNA, 20 bp, Artificial sequence
  synthetic
tgaaaagctgtgtcgtgttc

SEQ ID NO: 18849 - DNA, 20 bp, Artificial sequence
  synthetic
tgtgatccctacctgctccc

SEQ ID NO: 18850 - DNA, 20 bp, Artificial sequence
  synthetic
cctggactaccagcggatgt

SEQ ID NO: 18851 - DNA, 20 bp, Artificial sequence
  synthetic
gatcctggattacaaggatt

SEQ ID NO: 18852 - DNA, 20 bp, Artificial sequence
  synthetic
agggtaccaggatgttcggg

SEQ ID NO: 18853 - DNA, 20 bp, Artificial sequence
  synthetic
ccaggcaccagaccccagcg

SEQ ID NO: 18854 - DNA, 20 bp, Artificial sequence
  synthetic
atggcgtagaaatttctatg

SEQ ID NO: 18855 - DNA, 20 bp, Artificial sequence
  synthetic
tttgtcctgctgtgttgcag

SEQ ID NO: 18856 - DNA, 20 bp, Artificial sequence
  synthetic
caagtagaatagtttctgag

SEQ ID NO: 18857 - DNA, 20 bp, Artificial sequence
  synthetic
gtgtgtgtgtgtgtgtgtgt

SEQ ID NO: 18858 - DNA, 20 bp, Artificial sequence
  synthetic
cctcttccttggtctacata

SEQ ID NO: 18859 - DNA, 20 bp, Artificial sequence
  synthetic
atgtccatcctggtcacagc

SEQ ID NO: 18860 - DNA, 20 bp, Artificial sequence
  synthetic
tgggaacatttgacttcctt

SEQ ID NO: 18861 - DNA, 20 bp, Artificial sequence
  synthetic
gcacagctagctatgcatct

SEQ ID NO: 18862 - DNA, 20 bp, Artificial sequence
  synthetic
agacaggtgaccgctccagg

SEQ ID NO: 18863 - DNA, 20 bp, Artificial sequence
  synthetic
ctgtacttcctatgccagcc

SEQ ID NO: 18864 - DNA, 20 bp, Artificial sequence
  synthetic
tctggtgggcgggcgggagc

SEQ ID NO: 18865 - DNA, 20 bp, Artificial sequence
  synthetic
gtggattgacaccacggctt

SEQ ID NO: 18866 - DNA, 20 bp, Artificial sequence
  synthetic
tgcagacaccatcaaggacc

SEQ ID NO: 18867 - DNA, 20 bp, Artificial sequence
  synthetic
gcgcgagggggaccagctga

SEQ ID NO: 18868 - DNA, 20 bp, Artificial sequence
  synthetic
gtgtccgggatgtgtggcca

SEQ ID NO: 18869 - DNA, 20 bp, Artificial sequence
  synthetic
ttacccatgactcagcctgg

SEQ ID NO: 18870 - DNA, 20 bp, Artificial sequence
  synthetic
gtagctgaggactggtctga

SEQ ID NO: 18871 - DNA, 20 bp, Artificial sequence
  synthetic
tacacagctatggaataccg

SEQ ID NO: 18872 - DNA, 20 bp, Artificial sequence
  synthetic
tttctggatgtattgattca

SEQ ID NO: 18873 - DNA, 20 bp, Artificial sequence
  synthetic
tatattcccccaaaagccaa

SEQ ID NO: 18874 - DNA, 20 bp, Artificial sequence
  synthetic
agcgcttagatatggtgccg

SEQ ID NO: 18875 - DNA, 20 bp, Artificial sequence
  synthetic
ctggtgcctctcggctgccc

SEQ ID NO: 18876 - DNA, 20 bp, Artificial sequence
  synthetic
agaccatggatcacaaccgg

SEQ ID NO: 18877 - DNA, 20 bp, Artificial sequence
  synthetic
ggcgaagggtatgtggcgag

SEQ ID NO: 18878 - DNA, 20 bp, Artificial sequence
  synthetic
gatcattcccttttagaagg

SEQ ID NO: 18879 - DNA, 20 bp, Artificial sequence
  synthetic
gtgcagtattgcattcatta

SEQ ID NO: 18880 - DNA, 20 bp, Artificial sequence
  synthetic
tcctcctgcctcagcctccc

SEQ ID NO: 18881 - DNA, 20 bp, Artificial sequence
  synthetic
atatgagccactggcctggc

SEQ ID NO: 18882 - DNA, 20 bp, Artificial sequence
  synthetic
agccttgaatggcccttgtc

SEQ ID NO: 18883 - DNA, 20 bp, Artificial sequence
  synthetic
ctcgagccactcccaggacg

SEQ ID NO: 18884 - DNA, 20 bp, Artificial sequence
  synthetic
agtggcgcggaccttcattt

SEQ ID NO: 18885 - DNA, 20 bp, Artificial sequence
  synthetic
cctgaccagccatgggggct

SEQ ID NO: 18886 - DNA, 20 bp, Artificial sequence
  synthetic
tcttggtccatgtgaccgac

SEQ ID NO: 18887 - DNA, 20 bp, Artificial sequence
  synthetic
ataccttttggggagttgtg

SEQ ID NO: 18888 - DNA, 20 bp, Artificial sequence
  synthetic
taccctaaactgcctttttt

SEQ ID NO: 18889 - DNA, 20 bp, Artificial sequence
  synthetic
gtttgggaactggcattact

SEQ ID NO: 18890 - DNA, 20 bp, Artificial sequence
  synthetic
ggactcagcattgcaaccat

SEQ ID NO: 18891 - DNA, 20 bp, Artificial sequence
  synthetic
ttctgtccagatgttgaatt

SEQ ID NO: 18892 - DNA, 20 bp, Artificial sequence
  synthetic
aagaaggggaaagaccaatc

SEQ ID NO: 18893 - DNA, 20 bp, Artificial sequence
  synthetic
cctacatatgagacaacata

SEQ ID NO: 18894 - DNA, 20 bp, Artificial sequence
  synthetic
tttggaaaacatatgtgatg

SEQ ID NO: 18895 - DNA, 20 bp, Artificial sequence
  synthetic
aaaagctattagaagtaaag

SEQ ID NO: 18896 - DNA, 20 bp, Artificial sequence
  synthetic
ctcttcggtgctaggaaaga

SEQ ID NO: 18897 - DNA, 20 bp, Artificial sequence
  synthetic
tatacccagccatgaaacaa

SEQ ID NO: 18898 - DNA, 20 bp, Artificial sequence
  synthetic
tttcaatgtatgtttccatt

SEQ ID NO: 18899 - DNA, 20 bp, Artificial sequence
  synthetic
agccttttcctaatgcagct

SEQ ID NO: 18900 - DNA, 20 bp, Artificial sequence
  synthetic
acgggaggccttcacatatt

SEQ ID NO: 18901 - DNA, 20 bp, Artificial sequence
  synthetic
cctgtctacctttcatgacc

SEQ ID NO: 18902 - DNA, 20 bp, Artificial sequence
  synthetic
accccaaatttggacttttg

SEQ ID NO: 18903 - DNA, 20 bp, Artificial sequence
  synthetic
ggaccaccaagaaggcccgg

SEQ ID NO: 18904 - DNA, 20 bp, Artificial sequence
  synthetic
gaaatcaatggctatacatt

SEQ ID NO: 18905 - DNA, 20 bp, Artificial sequence
  synthetic
gccaatcagccacccccttt

SEQ ID NO: 18906 - DNA, 20 bp, Artificial sequence
  synthetic
gaacatggatgttgatatat

SEQ ID NO: 18907 - DNA, 20 bp, Artificial sequence
  synthetic
ggtgaggtagagctgcaatg

SEQ ID NO: 18908 - DNA, 20 bp, Artificial sequence
  synthetic
atgagtaaagaaagagatgt

SEQ ID NO: 18909 - DNA, 20 bp, Artificial sequence
  synthetic
tccattaactttggaccatg

SEQ ID NO: 18910 - DNA, 20 bp, Artificial sequence
  synthetic
atttccttctgtgggcattg

SEQ ID NO: 18911 - DNA, 20 bp, Artificial sequence
  synthetic
ctttccctgcccggtcccga

SEQ ID NO: 18912 - DNA, 20 bp, Artificial sequence
  synthetic
acagttcagaaaagaaaatc

SEQ ID NO: 18913 - DNA, 20 bp, Artificial sequence
  synthetic
tgtgatgttcaatgtaaagc

SEQ ID NO: 18914 - DNA, 20 bp, Artificial sequence
  synthetic
gtagaagcagaaaattctaa

SEQ ID NO: 18915 - DNA, 20 bp, Artificial sequence
  synthetic
tttgaagaaatcaagttcag

SEQ ID NO: 18916 - DNA, 20 bp, Artificial sequence
  synthetic
actgacttggactttcctga

SEQ ID NO: 18917 - DNA, 20 bp, Artificial sequence
  synthetic
caaggaaaaagtaaaagaag

SEQ ID NO: 18918 - DNA, 20 bp, Artificial sequence
  synthetic
gccgtgagtcctcggtgctc

SEQ ID NO: 18919 - DNA, 20 bp, Artificial sequence
  synthetic
gtattagcagagccacaggc

SEQ ID NO: 18920 - DNA, 20 bp, Artificial sequence
  synthetic
ccccctcctcactggccctt

SEQ ID NO: 18921 - DNA, 20 bp, Artificial sequence
  synthetic
acctctagaatcccagcagc

SEQ ID NO: 18922 - DNA, 20 bp, Artificial sequence
  synthetic
tcaccacgtgcagtatctca

SEQ ID NO: 18923 - DNA, 20 bp, Artificial sequence
  synthetic
ggttaggactctccactcaa

SEQ ID NO: 18924 - DNA, 20 bp, Artificial sequence
  synthetic
gctgcaaagtgccgaaacaa

SEQ ID NO: 18925 - DNA, 20 bp, Artificial sequence
  synthetic
tttctctgaagaagagggtc

SEQ ID NO: 18926 - DNA, 20 bp, Artificial sequence
  synthetic
ttgcttgtcccccaggagtc

SEQ ID NO: 18927 - DNA, 20 bp, Artificial sequence
  synthetic
gcctgcagtgattcagcagg

SEQ ID NO: 18928 - DNA, 20 bp, Artificial sequence
  synthetic
gcttgtcagcaagaggagga

SEQ ID NO: 18929 - DNA, 20 bp, Artificial sequence
  synthetic
ctaggctggaagagccaaag

SEQ ID NO: 18930 - DNA, 20 bp, Artificial sequence
  synthetic
tccctaatcacgtggtgaat

SEQ ID NO: 18931 - DNA, 20 bp, Artificial sequence
  synthetic
tttttgaagccatccgcaga

SEQ ID NO: 18932 - DNA, 20 bp, Artificial sequence
  synthetic
atccacctctcctttttgcc

SEQ ID NO: 18933 - DNA, 20 bp, Artificial sequence
  synthetic
cattcttctgctgggtgcca

SEQ ID NO: 18934 - DNA, 20 bp, Artificial sequence
  synthetic
gagctaggggtgcctgtaag

SEQ ID NO: 18935 - DNA, 20 bp, Artificial sequence
  synthetic
tttaaagagacatcatcctg

SEQ ID NO: 18936 - DNA, 20 bp, Artificial sequence
  synthetic
ttcccacccctaataacatt

SEQ ID NO: 18937 - DNA, 20 bp, Artificial sequence
  synthetic
aacactattgtgctgtttgc

SEQ ID NO: 18938 - DNA, 20 bp, Artificial sequence
  synthetic
ttttgctcaggttgtaccca

SEQ ID NO: 18939 - DNA, 20 bp, Artificial sequence
  synthetic
gaccctgaaggatgaatatg

SEQ ID NO: 18940 - DNA, 20 bp, Artificial sequence
  synthetic
ggacaatgtggatactcatc

SEQ ID NO: 18941 - DNA, 20 bp, Artificial sequence
  synthetic
gctgtctgctaagttcctgc

SEQ ID NO: 18942 - DNA, 20 bp, Artificial sequence
  synthetic
gtcgccctctggctcgcacg

SEQ ID NO: 18943 - DNA, 20 bp, Artificial sequence
  synthetic
catacctcacttgggggagc

SEQ ID NO: 18944 - DNA, 20 bp, Artificial sequence
  synthetic
ttaagcattggattaacgga

SEQ ID NO: 18945 - DNA, 20 bp, Artificial sequence
  synthetic
ctgcagaaagagcttgcaga

SEQ ID NO: 18946 - DNA, 20 bp, Artificial sequence
  synthetic
tctatcactaatatctttgg

SEQ ID NO: 18947 - DNA, 20 bp, Artificial sequence
  synthetic
ttactggccactggaggcat

SEQ ID NO: 18948 - DNA, 20 bp, Artificial sequence
  synthetic
tgggctcctgcagccctgtc

SEQ ID NO: 18949 - DNA, 20 bp, Artificial sequence
  synthetic
cttagcagaggctcaggttc

SEQ ID NO: 18950 - DNA, 20 bp, Artificial sequence
  synthetic
gctctctttcccccacaaaa

SEQ ID NO: 18951 - DNA, 20 bp, Artificial sequence
  synthetic
gtgaagaggcgacccagagt

SEQ ID NO: 18952 - DNA, 20 bp, Artificial sequence
  synthetic
ttacctcccagcagggcagc

SEQ ID NO: 18953 - DNA, 20 bp, Artificial sequence
  synthetic
agctctaatttgccttgggc

SEQ ID NO: 18954 - DNA, 20 bp, Artificial sequence
  synthetic
ataagtagaccacttatccc

SEQ ID NO: 18955 - DNA, 20 bp, Artificial sequence
  synthetic
tacgcccctgcactccagcc

SEQ ID NO: 18956 - DNA, 20 bp, Artificial sequence
  synthetic
tgcgctataactctacctaa

SEQ ID NO: 18957 - DNA, 20 bp, Artificial sequence
  synthetic
ctctagctcccacttcctct

SEQ ID NO: 18958 - DNA, 20 bp, Artificial sequence
  synthetic
atttgttggctgtctgctgt

SEQ ID NO: 18959 - DNA, 20 bp, Artificial sequence
  synthetic
tcctaatttttactccctct

SEQ ID NO: 18960 - DNA, 20 bp, Artificial sequence
  synthetic
gcggggcctgcgctcagccc

SEQ ID NO: 18961 - DNA, 20 bp, Artificial sequence
  synthetic
gctgggtaggtgcacttggt

SEQ ID NO: 18962 - DNA, 20 bp, Artificial sequence
  synthetic
tcagagtgagcccggatggg

SEQ ID NO: 18963 - DNA, 20 bp, Artificial sequence
  synthetic
gtagctttattcagaatctg

SEQ ID NO: 18964 - DNA, 20 bp, Artificial sequence
  synthetic
tcgaggactaacccctacag

SEQ ID NO: 18965 - DNA, 20 bp, Artificial sequence
  synthetic
tgggaaccaaaggatgatgc

SEQ ID NO: 18966 - DNA, 20 bp, Artificial sequence
  synthetic
tgttgaacacttgaagccat

SEQ ID NO: 18967 - DNA, 20 bp, Artificial sequence
  synthetic
gcctgcaccccggagcggat

SEQ ID NO: 18968 - DNA, 20 bp, Artificial sequence
  synthetic
cagtgaatgtgtctggacct

SEQ ID NO: 18969 - DNA, 20 bp, Artificial sequence
  synthetic
agctgcagggtggattgtta

SEQ ID NO: 18970 - DNA, 20 bp, Artificial sequence
  synthetic
cagaatgcttcaagtgtttg

SEQ ID NO: 18971 - DNA, 20 bp, Artificial sequence
  synthetic
atccagtaataaaatggaag

SEQ ID NO: 18972 - DNA, 20 bp, Artificial sequence
  synthetic
cctgcactctcagaaatcag

SEQ ID NO: 18973 - DNA, 20 bp, Artificial sequence
  synthetic
gactatgaaaatccagatga

SEQ ID NO: 18974 - DNA, 20 bp, Artificial sequence
  synthetic
tccccacccttcagcaagac

SEQ ID NO: 18975 - DNA, 20 bp, Artificial sequence
  synthetic
gaaaactatattcatcccac

SEQ ID NO: 18976 - DNA, 20 bp, Artificial sequence
  synthetic
ttgccacgggccgggaaaaa

SEQ ID NO: 18977 - DNA, 20 bp, Artificial sequence
  synthetic
tggttggtgttggccgagcc

SEQ ID NO: 18978 - DNA, 20 bp, Artificial sequence
  synthetic
tgatggaggaattcgctttc

SEQ ID NO: 18979 - DNA, 20 bp, Artificial sequence
  synthetic
gagaagggagctcgggagca

SEQ ID NO: 18980 - DNA, 20 bp, Artificial sequence
  synthetic
gtcattggcggccgctcagg

SEQ ID NO: 18981 - DNA, 20 bp, Artificial sequence
  synthetic
aaaaggacctggtctaaaac

SEQ ID NO: 18982 - DNA, 20 bp, Artificial sequence
  synthetic
agcgaattgcatcgtcctcg

SEQ ID NO: 18983 - DNA, 20 bp, Artificial sequence
  synthetic
tggctggaatgtcatggact

SEQ ID NO: 18984 - DNA, 20 bp, Artificial sequence
  synthetic
tgggaccaaatgtcagccct

SEQ ID NO: 18985 - DNA, 20 bp, Artificial sequence
  synthetic
ccccctcatcatcatcggct

SEQ ID NO: 18986 - DNA, 20 bp, Artificial sequence
  synthetic
ggaggtggcagaagtgagtc

SEQ ID NO: 18987 - DNA, 20 bp, Artificial sequence
  synthetic
gggcgaggccgagcgaggca

SEQ ID NO: 18988 - DNA, 20 bp, Artificial sequence
  synthetic
ccagagcccagccaagatgg

SEQ ID NO: 18989 - DNA, 20 bp, Artificial sequence
  synthetic
cgaccgtggggaagacggcc

SEQ ID NO: 18990 - DNA, 20 bp, Artificial sequence
  synthetic
tgtgcagcccaacgcacctc

SEQ ID NO: 18991 - DNA, 20 bp, Artificial sequence
  synthetic
ccccttcttctttgtcaata

SEQ ID NO: 18992 - DNA, 20 bp, Artificial sequence
  synthetic
gtaccgcatgtggcagttcg

SEQ ID NO: 18993 - DNA, 20 bp, Artificial sequence
  synthetic
gctgaaagtcatggcttttg

SEQ ID NO: 18994 - DNA, 20 bp, Artificial sequence
  synthetic
agatgagttccaaatcactg

SEQ ID NO: 18995 - DNA, 20 bp, Artificial sequence
  synthetic
gatgatcatggagtactacc

SEQ ID NO: 18996 - DNA, 20 bp, Artificial sequence
  synthetic
ctccgacagcgagcactacc

SEQ ID NO: 18997 - DNA, 20 bp, Artificial sequence
  synthetic
cagcgagggccgagagcaca

SEQ ID NO: 18998 - DNA, 20 bp, Artificial sequence
  synthetic
caggatggagaggcgggtcc

SEQ ID NO: 18999 - DNA, 20 bp, Artificial sequence
  synthetic
acaccagctcctgtgctgcg

SEQ ID NO: 19000 - DNA, 20 bp, Artificial sequence
  synthetic
cgccacctggatgctggagg

SEQ ID NO: 19001 - DNA, 20 bp, Artificial sequence
  synthetic
cgtggacatctgagggcgcc

SEQ ID NO: 19002 - DNA, 20 bp, Artificial sequence
  synthetic
ccgaggggaaggggcggtgc

SEQ ID NO: 19003 - DNA, 20 bp, Artificial sequence
  synthetic
tggggcaagggcacaagtcc

SEQ ID NO: 19004 - DNA, 20 bp, Artificial sequence
  synthetic
aaagggaccgcttggagcag

SEQ ID NO: 19005 - DNA, 20 bp, Artificial sequence
  synthetic
acagcgacaaagtgaaagcc

SEQ ID NO: 19006 - DNA, 20 bp, Artificial sequence
  synthetic
tggcgcgggagtacggatcc

SEQ ID NO: 19007 - DNA, 20 bp, Artificial sequence
  synthetic
attcggaaatcgatcagatc

SEQ ID NO: 19008 - DNA, 20 bp, Artificial sequence
  synthetic
tcatgaacaagttcctgacc

SEQ ID NO: 19009 - DNA, 20 bp, Artificial sequence
  synthetic
tggtcccctctcctctccgc

SEQ ID NO: 19010 - DNA, 20 bp, Artificial sequence
  synthetic
cgggctgcgtaggggcgctt

SEQ ID NO: 19011 - DNA, 20 bp, Artificial sequence
  synthetic
caatgcgcaggaataaggaa

SEQ ID NO: 19012 - DNA, 20 bp, Artificial sequence
  synthetic
cgctaagctccagtcggcgc

SEQ ID NO: 19013 - DNA, 20 bp, Artificial sequence
  synthetic
actctggagctcccattctt

SEQ ID NO: 19014 - DNA, 20 bp, Artificial sequence
  synthetic
cttccctgtctgatccttag

SEQ ID NO: 19015 - DNA, 20 bp, Artificial sequence
  synthetic
tggcatggcaatggttagag

SEQ ID NO: 19016 - DNA, 20 bp, Artificial sequence
  synthetic
aaggagccaggagttaatac

SEQ ID NO: 19017 - DNA, 20 bp, Artificial sequence
  synthetic
tcacctggaaggggagttac

SEQ ID NO: 19018 - DNA, 20 bp, Artificial sequence
  synthetic
gcagaaagctgaggaggctg

SEQ ID NO: 19019 - DNA, 20 bp, Artificial sequence
  synthetic
ggtcaccaaggggcagctgg

SEQ ID NO: 19020 - DNA, 20 bp, Artificial sequence
  synthetic
tcatcaagacctgtggaaga

SEQ ID NO: 19021 - DNA, 20 bp, Artificial sequence
  synthetic
tttggccctcctgacccaga

SEQ ID NO: 19022 - DNA, 20 bp, Artificial sequence
  synthetic
ggagctagagaagtgtaggt

SEQ ID NO: 19023 - DNA, 20 bp, Artificial sequence
  synthetic
gaggagagaccaggagctga

SEQ ID NO: 19024 - DNA, 20 bp, Artificial sequence
  synthetic
cctcctcctgtcccagcgag

SEQ ID NO: 19025 - DNA, 20 bp, Artificial sequence
  synthetic
ggcccagggacaggaggaga

SEQ ID NO: 19026 - DNA, 20 bp, Artificial sequence
  synthetic
ggaggtgctgggagacctaa

SEQ ID NO: 19027 - DNA, 20 bp, Artificial sequence
  synthetic
ggcactctccctagcgcaga

SEQ ID NO: 19028 - DNA, 20 bp, Artificial sequence
  synthetic
cacagcagaactggggtcca

SEQ ID NO: 19029 - DNA, 20 bp, Artificial sequence
  synthetic
ggcagagacccgcaggctgg

SEQ ID NO: 19030 - DNA, 20 bp, Artificial sequence
  synthetic
gtttgccaaaggaaaagcct

SEQ ID NO: 19031 - DNA, 20 bp, Artificial sequence
  synthetic
tagagagagcgcgctctgct

SEQ ID NO: 19032 - DNA, 20 bp, Artificial sequence
  synthetic
tttatttatttttcgttttt

SEQ ID NO: 19033 - DNA, 20 bp, Artificial sequence
  synthetic
cagcagctctgaatcttctg

SEQ ID NO: 19034 - DNA, 20 bp, Artificial sequence
  synthetic
tcggaagccggcaccctcaa

SEQ ID NO: 19035 - DNA, 20 bp, Artificial sequence
  synthetic
tgatttcaagtccaaccata

SEQ ID NO: 19036 - DNA, 20 bp, Artificial sequence
  synthetic
gctagagcctttccttctcc

SEQ ID NO: 19037 - DNA, 20 bp, Artificial sequence
  synthetic
ctctgcttctgagagtgaaa

SEQ ID NO: 19038 - DNA, 20 bp, Artificial sequence
  synthetic
agcacgtgatgctgagctgg

SEQ ID NO: 19039 - DNA, 20 bp, Artificial sequence
  synthetic
gatttatgaacatggctatg

SEQ ID NO: 19040 - DNA, 20 bp, Artificial sequence
  synthetic
tattacagcaggaagtgaac

SEQ ID NO: 19041 - DNA, 20 bp, Artificial sequence
  synthetic
agaagaggagcaaaagaaga

SEQ ID NO: 19042 - DNA, 20 bp, Artificial sequence
  synthetic
gcgacatatggatgcccacc

SEQ ID NO: 19043 - DNA, 20 bp, Artificial sequence
  synthetic
ccaccagcaggatttccgac

SEQ ID NO: 19044 - DNA, 20 bp, Artificial sequence
  synthetic
tttgacgggcacttggagga

SEQ ID NO: 19045 - DNA, 20 bp, Artificial sequence
  synthetic
ggacctggtgaacagtgtgt

SEQ ID NO: 19046 - DNA, 20 bp, Artificial sequence
  synthetic
atgtgaaacctgtgggtggg

SEQ ID NO: 19047 - DNA, 20 bp, Artificial sequence
  synthetic
tggctgactgagtactgtga

SEQ ID NO: 19048 - DNA, 20 bp, Artificial sequence
  synthetic
ggagaaggggatgcagaggc

SEQ ID NO: 19049 - DNA, 20 bp, Artificial sequence
  synthetic
ctatggccttagaaaagggc

SEQ ID NO: 19050 - DNA, 20 bp, Artificial sequence
  synthetic
tgcaggcgcagccgcggcga

SEQ ID NO: 19051 - DNA, 20 bp, Artificial sequence
  synthetic
ggcagccatgtccatgggcc

SEQ ID NO: 19052 - DNA, 20 bp, Artificial sequence
  synthetic
gagcaccggccagatgcagt

SEQ ID NO: 19053 - DNA, 20 bp, Artificial sequence
  synthetic
caagatcaccatcgtggcag

SEQ ID NO: 19054 - DNA, 20 bp, Artificial sequence
  synthetic
gcagctgctggggggcgcgc

SEQ ID NO: 19055 - DNA, 20 bp, Artificial sequence
  synthetic
ggggcccagggaccaacctg

SEQ ID NO: 19056 - DNA, 20 bp, Artificial sequence
  synthetic
aaaaatggaaattttcaaga

SEQ ID NO: 19057 - DNA, 20 bp, Artificial sequence
  synthetic
ggctggctaccaagagttta

SEQ ID NO: 19058 - DNA, 20 bp, Artificial sequence
  synthetic
ttttgatcgcgggaggaccg

SEQ ID NO: 19059 - DNA, 20 bp, Artificial sequence
  synthetic
ggcagaatcagcctgttttg

SEQ ID NO: 19060 - DNA, 20 bp, Artificial sequence
  synthetic
agttccacccagaggtcacc

SEQ ID NO: 19061 - DNA, 20 bp, Artificial sequence
  synthetic
tgttttcagataaactaaat

SEQ ID NO: 19062 - DNA, 20 bp, Artificial sequence
  synthetic
ttgtggctcctgcccagaca

SEQ ID NO: 19063 - DNA, 20 bp, Artificial sequence
  synthetic
caaactatctctatgttacc

SEQ ID NO: 19064 - DNA, 20 bp, Artificial sequence
  synthetic
ggccttcctatgttttgagt

SEQ ID NO: 19065 - DNA, 20 bp, Artificial sequence
  synthetic
tgcagaaatctcgcaaggtg

SEQ ID NO: 19066 - DNA, 20 bp, Artificial sequence
  synthetic
ttctttttgagatggagtca

SEQ ID NO: 19067 - DNA, 20 bp, Artificial sequence
  synthetic
atttgattggtgtgctgtct

SEQ ID NO: 19068 - DNA, 20 bp, Artificial sequence
  synthetic
gctgacaaaatttgttgaag

SEQ ID NO: 19069 - DNA, 20 bp, Artificial sequence
  synthetic
gaaggatgctacccggaaga

SEQ ID NO: 19070 - DNA, 20 bp, Artificial sequence
  synthetic
gctcaacgccaacaatgtcc

SEQ ID NO: 19071 - DNA, 20 bp, Artificial sequence
  synthetic
agctgttgatagtggaatcc

SEQ ID NO: 19072 - DNA, 20 bp, Artificial sequence
  synthetic
aagttgagaaatgtgacaga

SEQ ID NO: 19073 - DNA, 20 bp, Artificial sequence
  synthetic
aagtaaggttcattccctta

SEQ ID NO: 19074 - DNA, 20 bp, Artificial sequence
  synthetic
actagcgcaggagaaggcta

SEQ ID NO: 19075 - DNA, 20 bp, Artificial sequence
  synthetic
accacagagattaacttcaa

SEQ ID NO: 19076 - DNA, 20 bp, Artificial sequence
  synthetic
gaactgatcctgaccatgac

SEQ ID NO: 19077 - DNA, 20 bp, Artificial sequence
  synthetic
cagtcacttctgggggtcac

SEQ ID NO: 19078 - DNA, 20 bp, Artificial sequence
  synthetic
gttccgtacagggtataaaa

SEQ ID NO: 19079 - DNA, 20 bp, Artificial sequence
  synthetic
gaccaacgatggggaactga

SEQ ID NO: 19080 - DNA, 20 bp, Artificial sequence
  synthetic
gctccccttaccccagtcac

SEQ ID NO: 19081 - DNA, 20 bp, Artificial sequence
  synthetic
ggcggctcgagctcctggaa

SEQ ID NO: 19082 - DNA, 20 bp, Artificial sequence
  synthetic
tctccggtcccctcctcgga

SEQ ID NO: 19083 - DNA, 20 bp, Artificial sequence
  synthetic
tttctatacagcagcaacaa

SEQ ID NO: 19084 - DNA, 20 bp, Artificial sequence
  synthetic
tcatcatctagccaggcatg

SEQ ID NO: 19085 - DNA, 20 bp, Artificial sequence
  synthetic
tggaagttgctctcaaggga

SEQ ID NO: 19086 - DNA, 20 bp, Artificial sequence
  synthetic
cctcctcacaaggtttcctg

SEQ ID NO: 19087 - DNA, 20 bp, Artificial sequence
  synthetic
ggcaagtggcatctgaattt

SEQ ID NO: 19088 - DNA, 20 bp, Artificial sequence
  synthetic
gcgcgccacaatgagctccc

SEQ ID NO: 19089 - DNA, 20 bp, Artificial sequence
  synthetic
catggaggaccaggacggcc

SEQ ID NO: 19090 - DNA, 20 bp, Artificial sequence
  synthetic
tattgttcaaacaacttcat

SEQ ID NO: 19091 - DNA, 20 bp, Artificial sequence
  synthetic
gaacgtcatgatgatccagt

SEQ ID NO: 19092 - DNA, 20 bp, Artificial sequence
  synthetic
cgcggagctggccgctggat

SEQ ID NO: 19093 - DNA, 20 bp, Artificial sequence
  synthetic
tccttacttagcaagactat

SEQ ID NO: 19094 - DNA, 20 bp, Artificial sequence
  synthetic
ggtgtagaggcccctgccag

SEQ ID NO: 19095 - DNA, 20 bp, Artificial sequence
  synthetic
gaagctggcaccacagttcc

SEQ ID NO: 19096 - DNA, 20 bp, Artificial sequence
  synthetic
gcctgggttggcacctactt

SEQ ID NO: 19097 - DNA, 20 bp, Artificial sequence
  synthetic
gaggatcccaatgcgcctcc

SEQ ID NO: 19098 - DNA, 20 bp, Artificial sequence
  synthetic
tggtgttgtctgtggagacc

SEQ ID NO: 19099 - DNA, 20 bp, Artificial sequence
  synthetic
ccagggtgtttcaaacttag

SEQ ID NO: 19100 - DNA, 20 bp, Artificial sequence
  synthetic
aggggctggaagctggaggg

SEQ ID NO: 19101 - DNA, 20 bp, Artificial sequence
  synthetic
actgctctccagagggcatt

SEQ ID NO: 19102 - DNA, 20 bp, Artificial sequence
  synthetic
ttcgcgccgaatccccgggg

SEQ ID NO: 19103 - DNA, 20 bp, Artificial sequence
  synthetic
ctgctgctgcccctctgggg

SEQ ID NO: 19104 - DNA, 20 bp, Artificial sequence
  synthetic
attcctgatggcacggctgt

SEQ ID NO: 19105 - DNA, 20 bp, Artificial sequence
  synthetic
gctgcggatgaacctgtgac

SEQ ID NO: 19106 - DNA, 20 bp, Artificial sequence
  synthetic
atcgccaataagaagccccc

SEQ ID NO: 19107 - DNA, 20 bp, Artificial sequence
  synthetic
ccagtcagggatcctgttcc

SEQ ID NO: 19108 - DNA, 20 bp, Artificial sequence
  synthetic
gcagttgctacccctcccac

SEQ ID NO: 19109 - DNA, 20 bp, Artificial sequence
  synthetic
actgacaagctgaagctgac

SEQ ID NO: 19110 - DNA, 20 bp, Artificial sequence
  synthetic
atcactgtgacgggctctgg

SEQ ID NO: 19111 - DNA, 20 bp, Artificial sequence
  synthetic
gaggagaaggctcccctacc

SEQ ID NO: 19112 - DNA, 20 bp, Artificial sequence
  synthetic
cgtcccaagaacatgacccc

SEQ ID NO: 19113 - DNA, 20 bp, Artificial sequence
  synthetic
agtggaggtggagggagcga

SEQ ID NO: 19114 - DNA, 20 bp, Artificial sequence
  synthetic
cccacgaccaaggggtcttc

SEQ ID NO: 19115 - DNA, 20 bp, Artificial sequence
  synthetic
tacagcagtttgtacgagct

SEQ ID NO: 19116 - DNA, 20 bp, Artificial sequence
  synthetic
tccccagggggtactctgga

SEQ ID NO: 19117 - DNA, 20 bp, Artificial sequence
  synthetic
tcccttggggtgccgagtgg

SEQ ID NO: 19118 - DNA, 20 bp, Artificial sequence
  synthetic
gaggaagatcatggactgtc

SEQ ID NO: 19119 - DNA, 20 bp, Artificial sequence
  synthetic
ggactgtggttggatttatg

SEQ ID NO: 19120 - DNA, 20 bp, Artificial sequence
  synthetic
aagatatttgaatgaaatag

SEQ ID NO: 19121 - DNA, 20 bp, Artificial sequence
  synthetic
acctgcgtcaggtggcagtt

SEQ ID NO: 19122 - DNA, 20 bp, Artificial sequence
  synthetic
ttctggtcttaagtataatg

SEQ ID NO: 19123 - DNA, 20 bp, Artificial sequence
  synthetic
ccagaaagtccatatgctgt

SEQ ID NO: 19124 - DNA, 20 bp, Artificial sequence
  synthetic
cctagccattgctgatgttt

SEQ ID NO: 19125 - DNA, 20 bp, Artificial sequence
  synthetic
tgtccagtggctgaagcccc

SEQ ID NO: 19126 - DNA, 20 bp, Artificial sequence
  synthetic
agaccctaaagggattgttc

SEQ ID NO: 19127 - DNA, 20 bp, Artificial sequence
  synthetic
agaagacatttgggaataca

SEQ ID NO: 19128 - DNA, 20 bp, Artificial sequence
  synthetic
ggctggtgatcatcctttta

SEQ ID NO: 19129 - DNA, 20 bp, Artificial sequence
  synthetic
caagcttcatgtgcaagaac

SEQ ID NO: 19130 - DNA, 20 bp, Artificial sequence
  synthetic
tccctgggacccttaatttc

SEQ ID NO: 19131 - DNA, 20 bp, Artificial sequence
  synthetic
tccagactataaaagcggct

SEQ ID NO: 19132 - DNA, 20 bp, Artificial sequence
  synthetic
cttgatgagctgcctaaatt

SEQ ID NO: 19133 - DNA, 20 bp, Artificial sequence
  synthetic
agaggcgatgggcctatttg

SEQ ID NO: 19134 - DNA, 20 bp, Artificial sequence
  synthetic
attgcaacacctggaagact

SEQ ID NO: 19135 - DNA, 20 bp, Artificial sequence
  synthetic
gcgacttggccaaaagaagt

SEQ ID NO: 19136 - DNA, 20 bp, Artificial sequence
  synthetic
agtgagaaggagaataaaac

SEQ ID NO: 19137 - DNA, 20 bp, Artificial sequence
  synthetic
attgctacagatgtggcctc

SEQ ID NO: 19138 - DNA, 20 bp, Artificial sequence
  synthetic
taaattctgattattaaact

SEQ ID NO: 19139 - DNA, 20 bp, Artificial sequence
  synthetic
gagccagcacgatggtccta

SEQ ID NO: 19140 - DNA, 20 bp, Artificial sequence
  synthetic
agcactctgccgctcaagag

SEQ ID NO: 19141 - DNA, 20 bp, Artificial sequence
  synthetic
ctgcagtaccccactctacg

SEQ ID NO: 19142 - DNA, 20 bp, Artificial sequence
  synthetic
cgtgttcaacttccccgtct

SEQ ID NO: 19143 - DNA, 20 bp, Artificial sequence
  synthetic
tggtacattgcttggctggc

SEQ ID NO: 19144 - DNA, 20 bp, Artificial sequence
  synthetic
tacagcctacccatgcaggg

SEQ ID NO: 19145 - DNA, 20 bp, Artificial sequence
  synthetic
tttcctcatgattttttctc

SEQ ID NO: 19146 - DNA, 20 bp, Artificial sequence
  synthetic
gtgcagcctcccgagtgcag

SEQ ID NO: 19147 - DNA, 20 bp, Artificial sequence
  synthetic
agtaccctgtgcagccagga

SEQ ID NO: 19148 - DNA, 20 bp, Artificial sequence
  synthetic
ggtcacagggagcaatcatt

SEQ ID NO: 19149 - DNA, 20 bp, Artificial sequence
  synthetic
tggcatctcacacagtggaa

SEQ ID NO: 19150 - DNA, 20 bp, Artificial sequence
  synthetic
tggacaaggccaataaaaca

SEQ ID NO: 19151 - DNA, 20 bp, Artificial sequence
  synthetic
cccaggacctattccgcagg

SEQ ID NO: 19152 - DNA, 20 bp, Artificial sequence
  synthetic
cggcagaggaacgaggacgc

SEQ ID NO: 19153 - DNA, 20 bp, Artificial sequence
  synthetic
tggatgatggtggctggaac

SEQ ID NO: 19154 - DNA, 20 bp, Artificial sequence
  synthetic
tgaagcgagaagctgcccta

SEQ ID NO: 19155 - DNA, 20 bp, Artificial sequence
  synthetic
tacggcatggtgtcgagtct

SEQ ID NO: 19156 - DNA, 20 bp, Artificial sequence
  synthetic
tgtggcgagaagccgggctt

SEQ ID NO: 19157 - DNA, 20 bp, Artificial sequence
  synthetic
agggcagcagtaaccagcgg

SEQ ID NO: 19158 - DNA, 20 bp, Artificial sequence
  synthetic
tgcagaaatacctgtgtgac

SEQ ID NO: 19159 - DNA, 20 bp, Artificial sequence
  synthetic
agcagcggcggtggcagtgg

SEQ ID NO: 19160 - DNA, 20 bp, Artificial sequence
  synthetic
ctggccttttagggcctgac

SEQ ID NO: 19161 - DNA, 20 bp, Artificial sequence
  synthetic
acaggggcgttccacatacg

SEQ ID NO: 19162 - DNA, 20 bp, Artificial sequence
  synthetic
gaaccagccaccccagattg

SEQ ID NO: 19163 - DNA, 20 bp, Artificial sequence
  synthetic
gccccaggttgctgtcattg

SEQ ID NO: 19164 - DNA, 20 bp, Artificial sequence
  synthetic
agtcctctctattcctgggg

SEQ ID NO: 19165 - DNA, 20 bp, Artificial sequence
  synthetic
gttttcttccagtcctctcc

SEQ ID NO: 19166 - DNA, 20 bp, Artificial sequence
  synthetic
tgcccaacctgaggaactgc

SEQ ID NO: 19167 - DNA, 20 bp, Artificial sequence
  synthetic
gaggagacggaaaattaagg

SEQ ID NO: 19168 - DNA, 20 bp, Artificial sequence
  synthetic
gccagagggattgccacata

SEQ ID NO: 19169 - DNA, 20 bp, Artificial sequence
  synthetic
tgagaaggccatttcagagc

SEQ ID NO: 19170 - DNA, 20 bp, Artificial sequence
  synthetic
tcctccaggccctcccatca

SEQ ID NO: 19171 - DNA, 20 bp, Artificial sequence
  synthetic
tagcctcacggaggatcggg

SEQ ID NO: 19172 - DNA, 20 bp, Artificial sequence
  synthetic
attggctgaggacatggaaa

SEQ ID NO: 19173 - DNA, 20 bp, Artificial sequence
  synthetic
cctgtgcaaaagcatgggtc

SEQ ID NO: 19174 - DNA, 20 bp, Artificial sequence
  synthetic
acagagatatattatatata

SEQ ID NO: 19175 - DNA, 20 bp, Artificial sequence
  synthetic
cattcggggagactctggtg

SEQ ID NO: 19176 - DNA, 20 bp, Artificial sequence
  synthetic
tgtgctccttgatgttaagt

SEQ ID NO: 19177 - DNA, 20 bp, Artificial sequence
  synthetic
ctgctcctatggctcaaggg

SEQ ID NO: 19178 - DNA, 20 bp, Artificial sequence
  synthetic
ttgtgactgaatatctaaat

SEQ ID NO: 19179 - DNA, 20 bp, Artificial sequence
  synthetic
cttttgttcccaggaaggga

SEQ ID NO: 19180 - DNA, 20 bp, Artificial sequence
  synthetic
tttcggagagacctcatcta

SEQ ID NO: 19181 - DNA, 20 bp, Artificial sequence
  synthetic
caaacgaaaaagaacgacat

SEQ ID NO: 19182 - DNA, 20 bp, Artificial sequence
  synthetic
tctatgataagcgtgaaaat

SEQ ID NO: 19183 - DNA, 20 bp, Artificial sequence
  synthetic
ctcccacacaatcgcagttt

SEQ ID NO: 19184 - DNA, 20 bp, Artificial sequence
  synthetic
ctcgtgccatcatttcagag

SEQ ID NO: 19185 - DNA, 20 bp, Artificial sequence
  synthetic
atcacgttgatctacaagtc

SEQ ID NO: 19186 - DNA, 20 bp, Artificial sequence
  synthetic
gcaggtccaaccacgctggt

SEQ ID NO: 19187 - DNA, 20 bp, Artificial sequence
  synthetic
aatcagcacatcatgatggt

SEQ ID NO: 19188 - DNA, 20 bp, Artificial sequence
  synthetic
ggaggtggcagcagaaatcc

SEQ ID NO: 19189 - DNA, 20 bp, Artificial sequence
  synthetic
gacagggagtttctgctgga

SEQ ID NO: 19190 - DNA, 20 bp, Artificial sequence
  synthetic
gattttggaaggcagacacc

SEQ ID NO: 19191 - DNA, 20 bp, Artificial sequence
  synthetic
gctattgatgaacccagttt

SEQ ID NO: 19192 - DNA, 20 bp, Artificial sequence
  synthetic
gtgaagctgctaaagaacca

SEQ ID NO: 19193 - DNA, 20 bp, Artificial sequence
  synthetic
gatgccttacggtcaagtgc

SEQ ID NO: 19194 - DNA, 20 bp, Artificial sequence
  synthetic
cggccaaatactttcatgag

SEQ ID NO: 19195 - DNA, 20 bp, Artificial sequence
  synthetic
gtggagtccaccctggaaag

SEQ ID NO: 19196 - DNA, 20 bp, Artificial sequence
  synthetic
gctgaactggtgacccccat

SEQ ID NO: 19197 - DNA, 20 bp, Artificial sequence
  synthetic
atcacagtgcagcaaggcca

SEQ ID NO: 19198 - DNA, 20 bp, Artificial sequence
  synthetic
cgaatcttcactcccgctgt

SEQ ID NO: 19199 - DNA, 20 bp, Artificial sequence
  synthetic
actgcagtgtaccaggctaa

SEQ ID NO: 19200 - DNA, 20 bp, Artificial sequence
  synthetic
cctggaccaggacctgggga

SEQ ID NO: 19201 - DNA, 20 bp, Artificial sequence
  synthetic
agcgaccagaagcaagagga

SEQ ID NO: 19202 - DNA, 20 bp, Artificial sequence
  synthetic
tcttctgttgctcgaagtac

SEQ ID NO: 19203 - DNA, 20 bp, Artificial sequence
  synthetic
acaccagcctttgctgattt

SEQ ID NO: 19204 - DNA, 20 bp, Artificial sequence
  synthetic
gttgggtcacgaagatctca

SEQ ID NO: 19205 - DNA, 20 bp, Artificial sequence
  synthetic
aggcttcatgatgaactgga

SEQ ID NO: 19206 - DNA, 20 bp, Artificial sequence
  synthetic
gcagatcaagggcctaaaac

SEQ ID NO: 19207 - DNA, 20 bp, Artificial sequence
  synthetic
caacctccagcaccctcagg

SEQ ID NO: 19208 - DNA, 20 bp, Artificial sequence
  synthetic
aatcagtctcaagaagagca

SEQ ID NO: 19209 - DNA, 20 bp, Artificial sequence
  synthetic
ctttatgcactacaagcatc

SEQ ID NO: 19210 - DNA, 20 bp, Artificial sequence
  synthetic
gagtgggagaggggaaagag

SEQ ID NO: 19211 - DNA, 20 bp, Artificial sequence
  synthetic
aagtggagaagaacaagtac

SEQ ID NO: 19212 - DNA, 20 bp, Artificial sequence
  synthetic
tcggagactatggcctcgcc

SEQ ID NO: 19213 - DNA, 20 bp, Artificial sequence
  synthetic
atctattttttctaaaacat

SEQ ID NO: 19214 - DNA, 20 bp, Artificial sequence
  synthetic
ttgtcttagctacctgtgta

SEQ ID NO: 19215 - DNA, 20 bp, Artificial sequence
  synthetic
gatgcgaatgatcctgtcac

SEQ ID NO: 19216 - DNA, 20 bp, Artificial sequence
  synthetic
tactgaccctgagcaacccc

SEQ ID NO: 19217 - DNA, 20 bp, Artificial sequence
  synthetic
ggccctttgaccagggcagc

SEQ ID NO: 19218 - DNA, 20 bp, Artificial sequence
  synthetic
gtgacgtggacctggatccc

SEQ ID NO: 19219 - DNA, 20 bp, Artificial sequence
  synthetic
cccacctgtgggagttcatc

SEQ ID NO: 19220 - DNA, 20 bp, Artificial sequence
  synthetic
aaaccttcctgggaggacag

SEQ ID NO: 19221 - DNA, 20 bp, Artificial sequence
  synthetic
caggccctccagtgggctga

SEQ ID NO: 19222 - DNA, 20 bp, Artificial sequence
  synthetic
caatcgattccagaactatt

SEQ ID NO: 19223 - DNA, 20 bp, Artificial sequence
  synthetic
gatacccctcgacgaggatg

SEQ ID NO: 19224 - DNA, 20 bp, Artificial sequence
  synthetic
gttcctcagcctccgctacc

SEQ ID NO: 19225 - DNA, 20 bp, Artificial sequence
  synthetic
cctcgcctggagccccgagg

SEQ ID NO: 19226 - DNA, 20 bp, Artificial sequence
  synthetic
tcagaaagcccggaggctgt

SEQ ID NO: 19227 - DNA, 20 bp, Artificial sequence
  synthetic
catccggctttcctgactct

SEQ ID NO: 19228 - DNA, 20 bp, Artificial sequence
  synthetic
aggcttcatctccggctcca

SEQ ID NO: 19229 - DNA, 20 bp, Artificial sequence
  synthetic
cccttccgtccccttttgcc

SEQ ID NO: 19230 - DNA, 20 bp, Artificial sequence
  synthetic
ctccagtgtctccactgtgg

SEQ ID NO: 19231 - DNA, 20 bp, Artificial sequence
  synthetic
tgtcacctgcatctcctttt

SEQ ID NO: 19232 - DNA, 20 bp, Artificial sequence
  synthetic
ggattgctggggaccctcaa

SEQ ID NO: 19233 - DNA, 20 bp, Artificial sequence
  synthetic
aatgtccacctcctgggttc

SEQ ID NO: 19234 - DNA, 20 bp, Artificial sequence
  synthetic
cctctagcgctgggtgttgg

SEQ ID NO: 19235 - DNA, 20 bp, Artificial sequence
  synthetic
gcctctggaaggggctgggg

SEQ ID NO: 19236 - DNA, 20 bp, Artificial sequence
  synthetic
cgtgaagtcagtcaacaaaa

SEQ ID NO: 19237 - DNA, 20 bp, Artificial sequence
  synthetic
aaggagcagggtcctggtcc

SEQ ID NO: 19238 - DNA, 20 bp, Artificial sequence
  synthetic
tctctaacatatgatactga

SEQ ID NO: 19239 - DNA, 20 bp, Artificial sequence
  synthetic
acatgctctagtttattaac

SEQ ID NO: 19240 - DNA, 20 bp, Artificial sequence
  synthetic
ggctaagtgggacattagta

SEQ ID NO: 19241 - DNA, 20 bp, Artificial sequence
  synthetic
acaaagaaatccccccttca

SEQ ID NO: 19242 - DNA, 20 bp, Artificial sequence
  synthetic
tctgcagttccatcaggtcc

SEQ ID NO: 19243 - DNA, 20 bp, Artificial sequence
  synthetic
ctacctgagcattcaggcag

SEQ ID NO: 19244 - DNA, 20 bp, Artificial sequence
  synthetic
gttaataatagtattttaga

SEQ ID NO: 19245 - DNA, 20 bp, Artificial sequence
  synthetic
taaacacagactttgtaggt

SEQ ID NO: 19246 - DNA, 20 bp, Artificial sequence
  synthetic
gcggagcaagtacaatgatg

SEQ ID NO: 19247 - DNA, 20 bp, Artificial sequence
  synthetic
acggagaacgctccaggagg

SEQ ID NO: 19248 - DNA, 20 bp, Artificial sequence
  synthetic
ggttataataaagatataaa

SEQ ID NO: 19249 - DNA, 20 bp, Artificial sequence
  synthetic
agggttggacctaatgcccc

SEQ ID NO: 19250 - DNA, 20 bp, Artificial sequence
  synthetic
actgcataattctgaagtta

SEQ ID NO: 19251 - DNA, 20 bp, Artificial sequence
  synthetic
cagatttgcacaaaaagata

SEQ ID NO: 19252 - DNA, 20 bp, Artificial sequence
  synthetic
taatatatagcatttatggt

SEQ ID NO: 19253 - DNA, 20 bp, Artificial sequence
  synthetic
ttggttttgttttttgagtc

SEQ ID NO: 19254 - DNA, 20 bp, Artificial sequence
  synthetic
aaacagaaattggtaccttg

SEQ ID NO: 19255 - DNA, 20 bp, Artificial sequence
  synthetic
cccggtggctgtcagtcaaa

SEQ ID NO: 19256 - DNA, 20 bp, Artificial sequence
  synthetic
caagtacactgggaacactt

SEQ ID NO: 19257 - DNA, 20 bp, Artificial sequence
  synthetic
gctttgcacgtgcctgggca

SEQ ID NO: 19258 - DNA, 20 bp, Artificial sequence
  synthetic
gaccacacagaactatgatg

SEQ ID NO: 19259 - DNA, 20 bp, Artificial sequence
  synthetic
atggacatgcattgcctact

SEQ ID NO: 19260 - DNA, 20 bp, Artificial sequence
  synthetic
ttcagagactgggacgtttt

SEQ ID NO: 19261 - DNA, 20 bp, Artificial sequence
  synthetic
tcagcccaactcccacccca

SEQ ID NO: 19262 - DNA, 20 bp, Artificial sequence
  synthetic
ccagctcatcagcatccagc

SEQ ID NO: 19263 - DNA, 20 bp, Artificial sequence
  synthetic
ggtctcctgggtctcagctt

SEQ ID NO: 19264 - DNA, 20 bp, Artificial sequence
  synthetic
ggatggggagcagagtttga

SEQ ID NO: 19265 - DNA, 20 bp, Artificial sequence
  synthetic
cacagaactcaaccttcctg

SEQ ID NO: 19266 - DNA, 20 bp, Artificial sequence
  synthetic
gcagcctgggagctctattc

SEQ ID NO: 19267 - DNA, 20 bp, Artificial sequence
  synthetic
ctctgataccatcatcccag

SEQ ID NO: 19268 - DNA, 20 bp, Artificial sequence
  synthetic
cgaacaacatgagagcacac

SEQ ID NO: 19269 - DNA, 20 bp, Artificial sequence
  synthetic
acctcgagaagatcgggtgc

SEQ ID NO: 19270 - DNA, 20 bp, Artificial sequence
  synthetic
cactgtgtatgctgtcactg

SEQ ID NO: 19271 - DNA, 20 bp, Artificial sequence
  synthetic
agttgtcaccactctggaga

SEQ ID NO: 19272 - DNA, 20 bp, Artificial sequence
  synthetic
tgtcagaagctacaccatca

SEQ ID NO: 19273 - DNA, 20 bp, Artificial sequence
  synthetic
atggcagccgccacgtgcca

SEQ ID NO: 19274 - DNA, 20 bp, Artificial sequence
  synthetic
cacttctggtcagcaaccca

SEQ ID NO: 19275 - DNA, 20 bp, Artificial sequence
  synthetic
tcacctgtacccacagggtc

SEQ ID NO: 19276 - DNA, 20 bp, Artificial sequence
  synthetic
taccagtgccactctgacag

SEQ ID NO: 19277 - DNA, 20 bp, Artificial sequence
  synthetic
ggagtttcctgagggttttc

SEQ ID NO: 19278 - DNA, 20 bp, Artificial sequence
  synthetic
atctcttcactaatggagat

SEQ ID NO: 19279 - DNA, 20 bp, Artificial sequence
  synthetic
gccgagagtcgtcggggttt

SEQ ID NO: 19280 - DNA, 20 bp, Artificial sequence
  synthetic
cgcctctccttagtcgccgc

SEQ ID NO: 19281 - DNA, 20 bp, Artificial sequence
  synthetic
aatgtgaatcagtcactact

SEQ ID NO: 19282 - DNA, 20 bp, Artificial sequence
  synthetic
gaatatctctttgacaagca

SEQ ID NO: 19283 - DNA, 20 bp, Artificial sequence
  synthetic
ttgggcagtatactaaggtg

SEQ ID NO: 19284 - DNA, 20 bp, Artificial sequence
  synthetic
gttacagtggttatagccag

SEQ ID NO: 19285 - DNA, 20 bp, Artificial sequence
  synthetic
gccgagggcgaggaggaccc

SEQ ID NO: 19286 - DNA, 20 bp, Artificial sequence
  synthetic
tgcatccttgaatcttgggt

SEQ ID NO: 19287 - DNA, 20 bp, Artificial sequence
  synthetic
ttcctgggtttcagtacttg

SEQ ID NO: 19288 - DNA, 20 bp, Artificial sequence
  synthetic
gtctcactctcacccaggct

SEQ ID NO: 19289 - DNA, 20 bp, Artificial sequence
  synthetic
gcggcgcctgtgagtgagtg

SEQ ID NO: 19290 - DNA, 20 bp, Artificial sequence
  synthetic
taagtcaacttatttgtttt

SEQ ID NO: 19291 - DNA, 20 bp, Artificial sequence
  synthetic
atcccatcaccatcttccag

SEQ ID NO: 19292 - DNA, 20 bp, Artificial sequence
  synthetic
tggatggcccctccgggaaa

SEQ ID NO: 19293 - DNA, 20 bp, Artificial sequence
  synthetic
acgaccactttgtcaagctc

SEQ ID NO: 19294 - DNA, 20 bp, Artificial sequence
  synthetic
ctcagtcccccaccacactg

SEQ ID NO: 19295 - DNA, 20 bp, Artificial sequence
  synthetic
ggtagagcggccgccatgtt

SEQ ID NO: 19296 - DNA, 20 bp, Artificial sequence
  synthetic
agattattctctgatttggt

SEQ ID NO: 19297 - DNA, 20 bp, Artificial sequence
  synthetic
acgggaagcttgtcatcaat

SEQ ID NO: 19298 - DNA, 20 bp, Artificial sequence
  synthetic
ccatcactgccacccagaag

SEQ ID NO: 19299 - DNA, 20 bp, Artificial sequence
  synthetic
cactgctggggagtccctgc

SEQ ID NO: 19300 - DNA, 20 bp, Artificial sequence
  synthetic
aaaggctaagctaaggtcaa

SEQ ID NO: 19301 - DNA, 20 bp, Artificial sequence
  synthetic
tttattttcataacagcatg

SEQ ID NO: 19302 - DNA, 20 bp, Artificial sequence
  synthetic
ggatgttatcgctattgaat

SEQ ID NO: 19303 - DNA, 20 bp, Artificial sequence
  synthetic
cacgggctggaagagacatg

SEQ ID NO: 19304 - DNA, 20 bp, Artificial sequence
  synthetic
ctattccacacattttcagc

SEQ ID NO: 19305 - DNA, 20 bp, Artificial sequence
  synthetic
cccaaagtgctgggatgaca

SEQ ID NO: 19306 - DNA, 20 bp, Artificial sequence
  synthetic
ctcagcagctccccagcacc

SEQ ID NO: 19307 - DNA, 20 bp, Artificial sequence
  synthetic
cttcaaattcctggggctga

SEQ ID NO: 19308 - DNA, 20 bp, Artificial sequence
  synthetic
tgaaagaatcttccaattct

SEQ ID NO: 19309 - DNA, 20 bp, Artificial sequence
  synthetic
ttctggaacaagatagagtg

SEQ ID NO: 19310 - DNA, 20 bp, Artificial sequence
  synthetic
aagtgcctggagtatcttct

SEQ ID NO: 19311 - DNA, 20 bp, Artificial sequence
  synthetic
tgaaaaagtctggcaagctg

SEQ ID NO: 19312 - DNA, 20 bp, Artificial sequence
  synthetic
ctaatgaaacttgtaccgtg

SEQ ID NO: 19313 - DNA, 20 bp, Artificial sequence
  synthetic
ggctgcagtgagccatgatc

SEQ ID NO: 19314 - DNA, 20 bp, Artificial sequence
  synthetic
gcatatcttctccagaagtc

SEQ ID NO: 19315 - DNA, 20 bp, Artificial sequence
  synthetic
ttttatttgcattttattga

SEQ ID NO: 19316 - DNA, 20 bp, Artificial sequence
  synthetic
gatggaaaggaaacaagaaa

SEQ ID NO: 19317 - DNA, 20 bp, Artificial sequence
  synthetic
tgtccagatgggagtcccat

SEQ ID NO: 19318 - DNA, 20 bp, Artificial sequence
  synthetic
gggtggatcacctgaggtca

SEQ ID NO: 19319 - DNA, 20 bp, Artificial sequence
  synthetic
agtatggctctgacatctct

SEQ ID NO: 19320 - DNA, 20 bp, Artificial sequence
  synthetic
agaagccaactagccaacac

SEQ ID NO: 19321 - DNA, 20 bp, Artificial sequence
  synthetic
ctcattttacattttaaagt

SEQ ID NO: 19322 - DNA, 20 bp, Artificial sequence
  synthetic
ctgcagtgcgaagaaactga

SEQ ID NO: 19323 - DNA, 20 bp, Artificial sequence
  synthetic
tcttggtctgatccacgctg

SEQ ID NO: 19324 - DNA, 20 bp, Artificial sequence
  synthetic
ctctgtccagcccacagcaa

SEQ ID NO: 19325 - DNA, 20 bp, Artificial sequence
  synthetic
tcagcatcagcccatcatca

SEQ ID NO: 19326 - DNA, 20 bp, Artificial sequence
  synthetic
ctcttctttgagcagccctt

SEQ ID NO: 19327 - DNA, 20 bp, Artificial sequence
  synthetic
aggtctcctgagcaataaga

SEQ ID NO: 19328 - DNA, 20 bp, Artificial sequence
  synthetic
catctgctgcaccagttcct

SEQ ID NO: 19329 - DNA, 20 bp, Artificial sequence
  synthetic
ataatgctgtaccgattgta

SEQ ID NO: 19330 - DNA, 20 bp, Artificial sequence
  synthetic
ggccggcgctggttgaacag

SEQ ID NO: 19331 - DNA, 20 bp, Artificial sequence
  synthetic
ccctaagttgttcaccggga

SEQ ID NO: 19332 - DNA, 20 bp, Artificial sequence
  synthetic
gtaagaaatgagatgcagga

SEQ ID NO: 19333 - DNA, 20 bp, Artificial sequence
  synthetic
gggtcacagtgacctgacct

SEQ ID NO: 19334 - DNA, 20 bp, Artificial sequence
  synthetic
ggtgatattattttcagtgc

SEQ ID NO: 19335 - DNA, 20 bp, Artificial sequence
  synthetic
acataatatggtaaaatgta

SEQ ID NO: 19336 - DNA, 20 bp, Artificial sequence
  synthetic
ggctcatcggggatgcggcc

SEQ ID NO: 19337 - DNA, 20 bp, Artificial sequence
  synthetic
acaagggggagaccaaggca

SEQ ID NO: 19338 - DNA, 20 bp, Artificial sequence
  synthetic
tgttggggcgcttcgagctg

SEQ ID NO: 19339 - DNA, 20 bp, Artificial sequence
  synthetic
gagggtctgggtcaggcccc

SEQ ID NO: 19340 - DNA, 20 bp, Artificial sequence
  synthetic
tttccggtttctacatgcag

SEQ ID NO: 19341 - DNA, 20 bp, Artificial sequence
  synthetic
tctacatgcagagatgaatt

SEQ ID NO: 19342 - DNA, 20 bp, Artificial sequence
  synthetic
tacggcctgtggctggactg

SEQ ID NO: 19343 - DNA, 20 bp, Artificial sequence
  synthetic
gtattcttcgagtgacagct

SEQ ID NO: 19344 - DNA, 20 bp, Artificial sequence
  synthetic
tggaaagctatgcctattct

SEQ ID NO: 19345 - DNA, 20 bp, Artificial sequence
  synthetic
taatctaagaaaaggggaga

SEQ ID NO: 19346 - DNA, 20 bp, Artificial sequence
  synthetic
agctgcttggattctctgag

SEQ ID NO: 19347 - DNA, 20 bp, Artificial sequence
  synthetic
ggtgacattgaaactacact

SEQ ID NO: 19348 - DNA, 20 bp, Artificial sequence
  synthetic
ggttaaatggtagttagcaa

SEQ ID NO: 19349 - DNA, 20 bp, Artificial sequence
  synthetic
ttagacgcaccccggtgagc

SEQ ID NO: 19350 - DNA, 20 bp, Artificial sequence
  synthetic
gggaccgcggcttctacttc

SEQ ID NO: 19351 - DNA, 20 bp, Artificial sequence
  synthetic
ccacccaagaccccgcccac

SEQ ID NO: 19352 - DNA, 20 bp, Artificial sequence
  synthetic
cttctcctgacccagtcccc

SEQ ID NO: 19353 - DNA, 20 bp, Artificial sequence
  synthetic
gaattttcagggtaaactgg

SEQ ID NO: 19354 - DNA, 20 bp, Artificial sequence
  synthetic
cacacaaacgcacagcacac

SEQ ID NO: 19355 - DNA, 20 bp, Artificial sequence
  synthetic
ggctggcctccttggcgcct

SEQ ID NO: 19356 - DNA, 20 bp, Artificial sequence
  synthetic
agcctgactccctggtgtgc

SEQ ID NO: 19357 - DNA, 20 bp, Artificial sequence
  synthetic
ccctcggtgacatcttgccc

SEQ ID NO: 19358 - DNA, 20 bp, Artificial sequence
  synthetic
cgtgcctagtcgtggctctc

SEQ ID NO: 19359 - DNA, 20 bp, Artificial sequence
  synthetic
ccagctgccccagcggcctc

SEQ ID NO: 19360 - DNA, 20 bp, Artificial sequence
  synthetic
gccccctgcccagcctgccc

SEQ ID NO: 19361 - DNA, 20 bp, Artificial sequence
  synthetic
caatggggaagtcgatgctg

SEQ ID NO: 19362 - DNA, 20 bp, Artificial sequence
  synthetic
gcagccgtggcatcgttgag

SEQ ID NO: 19363 - DNA, 20 bp, Artificial sequence
  synthetic
agcagtccacccagcgcctg

SEQ ID NO: 19364 - DNA, 20 bp, Artificial sequence
  synthetic
atcggaagtgagcaaaactg

SEQ ID NO: 19365 - DNA, 20 bp, Artificial sequence
  synthetic
ctcctcggccccctccatcg

SEQ ID NO: 19366 - DNA, 20 bp, Artificial sequence
  synthetic
ggctcctcactcccttttcc

SEQ ID NO: 19367 - DNA, 20 bp, Artificial sequence
  synthetic
acacacaaagacacagcaca

SEQ ID NO: 19368 - DNA, 20 bp, Artificial sequence
  synthetic
cgatgctccccataccccac

SEQ ID NO: 19369 - DNA, 20 bp, Artificial sequence
  synthetic
ggagggggctcctggctggc

SEQ ID NO: 19370 - DNA, 20 bp, Artificial sequence
  synthetic
ggcgcctagggctgcggcag

SEQ ID NO: 19371 - DNA, 20 bp, Artificial sequence
  synthetic
cagtcgcagagggtccctcg

SEQ ID NO: 19372 - DNA, 20 bp, Artificial sequence
  synthetic
gttatattctgcctcgccgg

SEQ ID NO: 19373 - DNA, 20 bp, Artificial sequence
  synthetic
gtcttcagtggggggccccc

SEQ ID NO: 19374 - DNA, 20 bp, Artificial sequence
  synthetic
ctgctcctgctgcagctgct

SEQ ID NO: 19375 - DNA, 20 bp, Artificial sequence
  synthetic
ggaactcctgaatttgtaac

SEQ ID NO: 19376 - DNA, 20 bp, Artificial sequence
  synthetic
ttggtggatgactccgatcc

SEQ ID NO: 19377 - DNA, 20 bp, Artificial sequence
  synthetic
tccgcgctggtccgccatgc

SEQ ID NO: 19378 - DNA, 20 bp, Artificial sequence
  synthetic
agacacacaccgagagctac

SEQ ID NO: 19379 - DNA, 20 bp, Artificial sequence
  synthetic
aaaagcctccagctgtccac

SEQ ID NO: 19380 - DNA, 20 bp, Artificial sequence
  synthetic
acttactttgagtttgaaac

SEQ ID NO: 19381 - DNA, 20 bp, Artificial sequence
  synthetic
tgcaatcctctcccttacat

SEQ ID NO: 19382 - DNA, 20 bp, Artificial sequence
  synthetic
tccaccaggatcacgtttga

SEQ ID NO: 19383 - DNA, 20 bp, Artificial sequence
  synthetic
acgcagtatgcctgcccacc

SEQ ID NO: 19384 - DNA, 20 bp, Artificial sequence
  synthetic
gctggcactgagccgtgccc

SEQ ID NO: 19385 - DNA, 20 bp, Artificial sequence
  synthetic
cgattcacctgcagcgagag

SEQ ID NO: 19386 - DNA, 20 bp, Artificial sequence
  synthetic
tccttaagtggcagggcggg

SEQ ID NO: 19387 - DNA, 20 bp, Artificial sequence
  synthetic
cagctggtgtacaaggatgg

SEQ ID NO: 19388 - DNA, 20 bp, Artificial sequence
  synthetic
tccacgagcacctttaaggt

SEQ ID NO: 19389 - DNA, 20 bp, Artificial sequence
  synthetic
caggatgaagcggtcgtttt

SEQ ID NO: 19390 - DNA, 20 bp, Artificial sequence
  synthetic
gacagctgcacttactactt

SEQ ID NO: 19391 - DNA, 20 bp, Artificial sequence
  synthetic
gacaactacctgtatgagat

SEQ ID NO: 19392 - DNA, 20 bp, Artificial sequence
  synthetic
gcctcttcctctaagtgcgg

SEQ ID NO: 19393 - DNA, 20 bp, Artificial sequence
  synthetic
gacagcgagaatcccgggga

SEQ ID NO: 19394 - DNA, 20 bp, Artificial sequence
  synthetic
tccctgcatggggatgacca

SEQ ID NO: 19395 - DNA, 20 bp, Artificial sequence
  synthetic
gcgaggaaagggaagtccag

SEQ ID NO: 19396 - DNA, 20 bp, Artificial sequence
  synthetic
actgtgcttatttttttaag

SEQ ID NO: 19397 - DNA, 20 bp, Artificial sequence
  synthetic
aggaggagggaggccaggcg

SEQ ID NO: 19398 - DNA, 20 bp, Artificial sequence
  synthetic
ccggtttggctggcttgttt

SEQ ID NO: 19399 - DNA, 20 bp, Artificial sequence
  synthetic
gcagtgtaactgcatagttt

SEQ ID NO: 19400 - DNA, 20 bp, Artificial sequence
  synthetic
gctaggaagtctggtgcagt

SEQ ID NO: 19401 - DNA, 20 bp, Artificial sequence
  synthetic
tacccaagtaaaagtaacct

SEQ ID NO: 19402 - DNA, 20 bp, Artificial sequence
  synthetic
cggctttcaaacaaaagagg

SEQ ID NO: 19403 - DNA, 20 bp, Artificial sequence
  synthetic
ggctcccggagcagggcgag

SEQ ID NO: 19404 - DNA, 20 bp, Artificial sequence
  synthetic
cttcatatgcaattcccaag

SEQ ID NO: 19405 - DNA, 20 bp, Artificial sequence
  synthetic
caacgaagtggaacctggtt

SEQ ID NO: 19406 - DNA, 20 bp, Artificial sequence
  synthetic
gtttttcattgacaacatac

SEQ ID NO: 19407 - DNA, 20 bp, Artificial sequence
  synthetic
tgccttctgcaatcccgtca

SEQ ID NO: 19408 - DNA, 20 bp, Artificial sequence
  synthetic
ctacaccatgggtcataact

SEQ ID NO: 19409 - DNA, 20 bp, Artificial sequence
  synthetic
ggaaggggaacactgtcagt

SEQ ID NO: 19410 - DNA, 20 bp, Artificial sequence
  synthetic
cttctggggagaccccgacg

SEQ ID NO: 19411 - DNA, 20 bp, Artificial sequence
  synthetic
ctgccaccagtgctttgctc

SEQ ID NO: 19412 - DNA, 20 bp, Artificial sequence
  synthetic
gagccccgcagcagagccac

SEQ ID NO: 19413 - DNA, 20 bp, Artificial sequence
  synthetic
cctagacaacactgtgaaag

SEQ ID NO: 19414 - DNA, 20 bp, Artificial sequence
  synthetic
atgtggcgggccaaactgca

SEQ ID NO: 19415 - DNA, 20 bp, Artificial sequence
  synthetic
tgaagtattgaaaatggaga

SEQ ID NO: 19416 - DNA, 20 bp, Artificial sequence
  synthetic
tgcaacagatgttaaagtca

SEQ ID NO: 19417 - DNA, 20 bp, Artificial sequence
  synthetic
caacgcgtcccagcgcatca

SEQ ID NO: 19418 - DNA, 20 bp, Artificial sequence
  synthetic
cccttccaactctcctttcc

SEQ ID NO: 19419 - DNA, 20 bp, Artificial sequence
  synthetic
cccttgtctccgggtggtgt

SEQ ID NO: 19420 - DNA, 20 bp, Artificial sequence
  synthetic
cctcagcatgaacagagaaa

SEQ ID NO: 19421 - DNA, 20 bp, Artificial sequence
  synthetic
gagcatcttgcatccaaacc

SEQ ID NO: 19422 - DNA, 20 bp, Artificial sequence
  synthetic
ctaaagcttttatttaacag

SEQ ID NO: 19423 - DNA, 20 bp, Artificial sequence
  synthetic
tcttcttttctttttttaaa

SEQ ID NO: 19424 - DNA, 20 bp, Artificial sequence
  synthetic
cgcagaagaaaggcggagaa

SEQ ID NO: 19425 - DNA, 20 bp, Artificial sequence
  synthetic
gtgcccgtggtgcagccatc

SEQ ID NO: 19426 - DNA, 20 bp, Artificial sequence
  synthetic
tctccgggtggtgttggaca

SEQ ID NO: 19427 - DNA, 20 bp, Artificial sequence
  synthetic
atggtggaaaacgaagctca

SEQ ID NO: 19428 - DNA, 20 bp, Artificial sequence
  synthetic
tatgggggttctggagagcg

SEQ ID NO: 19429 - DNA, 20 bp, Artificial sequence
  synthetic
gcagggtgcaaccgagctgg

SEQ ID NO: 19430 - DNA, 20 bp, Artificial sequence
  synthetic
gctatactcctggcctgtgc

SEQ ID NO: 19431 - DNA, 20 bp, Artificial sequence
  synthetic
ccgccgggatgctgctgagc

SEQ ID NO: 19432 - DNA, 20 bp, Artificial sequence
  synthetic
ctcccatgaggctcctggca

SEQ ID NO: 19433 - DNA, 20 bp, Artificial sequence
  synthetic
caccttggagctattcacag

SEQ ID NO: 19434 - DNA, 20 bp, Artificial sequence
  synthetic
cctccgtgccctgcatctca

SEQ ID NO: 19435 - DNA, 20 bp, Artificial sequence
  synthetic
tgctgctatgaagggcaact

SEQ ID NO: 19436 - DNA, 20 bp, Artificial sequence
  synthetic
cagcaaacaggcattctcac

SEQ ID NO: 19437 - DNA, 20 bp, Artificial sequence
  synthetic
cccatccctcctccagatgc

SEQ ID NO: 19438 - DNA, 20 bp, Artificial sequence
  synthetic
gagcctcctccaaaactgcc

SEQ ID NO: 19439 - DNA, 20 bp, Artificial sequence
  synthetic
acagcatgtgccaagattct

SEQ ID NO: 19440 - DNA, 20 bp, Artificial sequence
  synthetic
ggctgctcccacctggctct

SEQ ID NO: 19441 - DNA, 20 bp, Artificial sequence
  synthetic
aagaggggatgagttgtgtg

SEQ ID NO: 19442 - DNA, 20 bp, Artificial sequence
  synthetic
ctgggccgtggagcctatgg

SEQ ID NO: 19443 - DNA, 20 bp, Artificial sequence
  synthetic
gtgatccacagagatgtgaa

SEQ ID NO: 19444 - DNA, 20 bp, Artificial sequence
  synthetic
ggctacaatgtcaagtccga

SEQ ID NO: 19445 - DNA, 20 bp, Artificial sequence
  synthetic
actgctcagtgcctgaggaa

SEQ ID NO: 19446 - DNA, 20 bp, Artificial sequence
  synthetic
gagccccacagccccatctg

SEQ ID NO: 19447 - DNA, 20 bp, Artificial sequence
  synthetic
tcggccccaccagtgcctct

SEQ ID NO: 19448 - DNA, 20 bp, Artificial sequence
  synthetic
aaacagggcctctgcggagc

SEQ ID NO: 19449 - DNA, 20 bp, Artificial sequence
  synthetic
ctagggtaccagcaggcaga

SEQ ID NO: 19450 - DNA, 20 bp, Artificial sequence
  synthetic
cagaggtgctcatcagcact

SEQ ID NO: 19451 - DNA, 20 bp, Artificial sequence
  synthetic
ctctagccgacattgttttg

SEQ ID NO: 19452 - DNA, 20 bp, Artificial sequence
  synthetic
tgcctgtggctggagaaagg

SEQ ID NO: 19453 - DNA, 20 bp, Artificial sequence
  synthetic
cagcaacagagaccaaggct

SEQ ID NO: 19454 - DNA, 20 bp, Artificial sequence
  synthetic
tgaaacgaggttttgtgctg

SEQ ID NO: 19455 - DNA, 20 bp, Artificial sequence
  synthetic
agcctcagtgtaaagtctgc

SEQ ID NO: 19456 - DNA, 20 bp, Artificial sequence
  synthetic
tctttgggggctatgtgcct

SEQ ID NO: 19457 - DNA, 20 bp, Artificial sequence
  synthetic
agccacagcagatacaagcg

SEQ ID NO: 19458 - DNA, 20 bp, Artificial sequence
  synthetic
ctccgcccacactggcctca

SEQ ID NO: 19459 - DNA, 20 bp, Artificial sequence
  synthetic
tctgttccccttcgggtcca

SEQ ID NO: 19460 - DNA, 20 bp, Artificial sequence
  synthetic
tggggagcagccgctgtggg

SEQ ID NO: 19461 - DNA, 20 bp, Artificial sequence
  synthetic
ccctgctgcgccgcgcctgg

SEQ ID NO: 19462 - DNA, 20 bp, Artificial sequence
  synthetic
tgagcttcctgaccatcccg

SEQ ID NO: 19463 - DNA, 20 bp, Artificial sequence
  synthetic
cccttcggtactgggcctcc

SEQ ID NO: 19464 - DNA, 20 bp, Artificial sequence
  synthetic
tgccagctggtcccgggaat

SEQ ID NO: 19465 - DNA, 20 bp, Artificial sequence
  synthetic
ctgggagtgggaagcctctt

SEQ ID NO: 19466 - DNA, 20 bp, Artificial sequence
  synthetic
acaggcccgttcttccgcta

SEQ ID NO: 19467 - DNA, 20 bp, Artificial sequence
  synthetic
ttctacgcccgcccgctgcc

SEQ ID NO: 19468 - DNA, 20 bp, Artificial sequence
  synthetic
gactgggtgcactggttcct

SEQ ID NO: 19469 - DNA, 20 bp, Artificial sequence
  synthetic
tccccagctaaataccctgc

SEQ ID NO: 19470 - DNA, 20 bp, Artificial sequence
  synthetic
ggggcccctgggcagtgggt

SEQ ID NO: 19471 - DNA, 20 bp, Artificial sequence
  synthetic
ctggaggaagctgccaagga

SEQ ID NO: 19472 - DNA, 20 bp, Artificial sequence
  synthetic
gcggcctctggggtccgtgc

SEQ ID NO: 19473 - DNA, 20 bp, Artificial sequence
  synthetic
atgcccgacaaatgcaaatg

SEQ ID NO: 19474 - DNA, 20 bp, Artificial sequence
  synthetic
gtctatgaggtcatctccaa

SEQ ID NO: 19475 - DNA, 20 bp, Artificial sequence
  synthetic
cagcttctgaagtttgtgga

SEQ ID NO: 19476 - DNA, 20 bp, Artificial sequence
  synthetic
gacttcatgcccaccatctt

SEQ ID NO: 19477 - DNA, 20 bp, Artificial sequence
  synthetic
gaagccctcagcaagatgaa

SEQ ID NO: 19478 - DNA, 20 bp, Artificial sequence
  synthetic
ctcaagcgccgctttgccat

SEQ ID NO: 19479 - DNA, 20 bp, Artificial sequence
  synthetic
tggccaggctggcacatacc

SEQ ID NO: 19480 - DNA, 20 bp, Artificial sequence
  synthetic
ccccacccttgcccgcggca

SEQ ID NO: 19481 - DNA, 20 bp, Artificial sequence
  synthetic
gccccaagcctttgcagccc

SEQ ID NO: 19482 - DNA, 20 bp, Artificial sequence
  synthetic
aggacaacatagacgaggat

SEQ ID NO: 19483 - DNA, 20 bp, Artificial sequence
  synthetic
cccacctccccgtgcagcag

SEQ ID NO: 19484 - DNA, 20 bp, Artificial sequence
  synthetic
tccagactgtgaaccacgtt

SEQ ID NO: 19485 - DNA, 20 bp, Artificial sequence
  synthetic
tggtcaccatgccctccttc

SEQ ID NO: 19486 - DNA, 20 bp, Artificial sequence
  synthetic
gtgcgatgtggacgtcacgc

SEQ ID NO: 19487 - DNA, 20 bp, Artificial sequence
  synthetic
ccactgggcccctgtcccca

SEQ ID NO: 19488 - DNA, 20 bp, Artificial sequence
  synthetic
cctcctgcagtttgggagac

SEQ ID NO: 19489 - DNA, 20 bp, Artificial sequence
  synthetic
gcttctgctccagccccttt

SEQ ID NO: 19490 - DNA, 20 bp, Artificial sequence
  synthetic
ttcctgttccctcctggtcc

SEQ ID NO: 19491 - DNA, 20 bp, Artificial sequence
  synthetic
tgctattcccattgtgacag

SEQ ID NO: 19492 - DNA, 20 bp, Artificial sequence
  synthetic
cccccagcatcgggggcctg

SEQ ID NO: 19493 - DNA, 20 bp, Artificial sequence
  synthetic
cccactgttaacaacgacta

SEQ ID NO: 19494 - DNA, 20 bp, Artificial sequence
  synthetic
ttcaaacatgcacttgcagc

SEQ ID NO: 19495 - DNA, 20 bp, Artificial sequence
  synthetic
caagaggtggaatctccaac

SEQ ID NO: 19496 - DNA, 20 bp, Artificial sequence
  synthetic
ctcaaagcatttacagtacc

SEQ ID NO: 19497 - DNA, 20 bp, Artificial sequence
  synthetic
tccagaaaagcattatggtt

SEQ ID NO: 19498 - DNA, 20 bp, Artificial sequence
  synthetic
tatacaagcatgcgttgcac

SEQ ID NO: 19499 - DNA, 20 bp, Artificial sequence
  synthetic
actggggagacagaaactgt

SEQ ID NO: 19500 - DNA, 20 bp, Artificial sequence
  synthetic
ctagggtggaagagccgggc

SEQ ID NO: 19501 - DNA, 20 bp, Artificial sequence
  synthetic
tgcactggaacttacaacac

SEQ ID NO: 19502 - DNA, 20 bp, Artificial sequence
  synthetic
gtttcatctgcgacccggac

SEQ ID NO: 19503 - DNA, 20 bp, Artificial sequence
  synthetic
ccacctccagcttgtacctg

SEQ ID NO: 19504 - DNA, 20 bp, Artificial sequence
  synthetic
ccccgcagggcagccccgag

SEQ ID NO: 19505 - DNA, 20 bp, Artificial sequence
  synthetic
gcaaacctcctcacagccca

SEQ ID NO: 19506 - DNA, 20 bp, Artificial sequence
  synthetic
ggtcctcggacaccgaggag

SEQ ID NO: 19507 - DNA, 20 bp, Artificial sequence
  synthetic
aggtactataaaccctaatt

SEQ ID NO: 19508 - DNA, 20 bp, Artificial sequence
  synthetic
gccgatatttggagttctta

SEQ ID NO: 19509 - DNA, 20 bp, Artificial sequence
  synthetic
attcctgaattttggttaac

SEQ ID NO: 19510 - DNA, 20 bp, Artificial sequence
  synthetic
acaaatgaagtgctgacaaa

SEQ ID NO: 19511 - DNA, 20 bp, Artificial sequence
  synthetic
gggacagttcgtactgtgac

SEQ ID NO: 19512 - DNA, 20 bp, Artificial sequence
  synthetic
ttacataaaggggatgtggt

SEQ ID NO: 19513 - DNA, 20 bp, Artificial sequence
  synthetic
atcacttataaagaaaactg

SEQ ID NO: 19514 - DNA, 20 bp, Artificial sequence
  synthetic
atatggtaaggcccctaaaa

SEQ ID NO: 19515 - DNA, 20 bp, Artificial sequence
  synthetic
agcctccccaaaggcagctc

SEQ ID NO: 19516 - DNA, 20 bp, Artificial sequence
  synthetic
agtgactttgaacagcttcc

SEQ ID NO: 19517 - DNA, 20 bp, Artificial sequence
  synthetic
acaacacgatgccatgagct

SEQ ID NO: 19518 - DNA, 20 bp, Artificial sequence
  synthetic
aggccattcagaaaaagctt

SEQ ID NO: 19519 - DNA, 20 bp, Artificial sequence
  synthetic
tcttacctctttgactgaac

SEQ ID NO: 19520 - DNA, 20 bp, Artificial sequence
  synthetic
gaggccgcagtggcagcttc

SEQ ID NO: 19521 - DNA, 20 bp, Artificial sequence
  synthetic
gtccaagatgctaatggcct

SEQ ID NO: 19522 - DNA, 20 bp, Artificial sequence
  synthetic
gtagctgaattcacctgact

SEQ ID NO: 19523 - DNA, 20 bp, Artificial sequence
  synthetic
ccgagcatagtatgctgagt

SEQ ID NO: 19524 - DNA, 20 bp, Artificial sequence
  synthetic
tcataccagggtcatgcgtt

SEQ ID NO: 19525 - DNA, 20 bp, Artificial sequence
  synthetic
ggtctgccagctgagatgct

SEQ ID NO: 19526 - DNA, 20 bp, Artificial sequence
  synthetic
aattttctctactgtctgta

SEQ ID NO: 19527 - DNA, 20 bp, Artificial sequence
  synthetic
aacagctgagggtgtttgct

SEQ ID NO: 19528 - DNA, 20 bp, Artificial sequence
  synthetic
taggcctcagcccaggtcct

SEQ ID NO: 19529 - DNA, 20 bp, Artificial sequence
  synthetic
cggccacctacatgttccac

SEQ ID NO: 19530 - DNA, 20 bp, Artificial sequence
  synthetic
gcatcagcgtgcaccgctac

SEQ ID NO: 19531 - DNA, 20 bp, Artificial sequence
  synthetic
atgacaccactcggcctgaa

SEQ ID NO: 19532 - DNA, 20 bp, Artificial sequence
  synthetic
tccgcaccatagctgtggtg

SEQ ID NO: 19533 - DNA, 20 bp, Artificial sequence
  synthetic
atcctgtgctctacttgctc

SEQ ID NO: 19534 - DNA, 20 bp, Artificial sequence
  synthetic
gtgacctcatctctcataac

SEQ ID NO: 19535 - DNA, 20 bp, Artificial sequence
  synthetic
ttgtttctgttccttcctgg

SEQ ID NO: 19536 - DNA, 20 bp, Artificial sequence
  synthetic
agcttggctcgtggaagaag

SEQ ID NO: 19537 - DNA, 20 bp, Artificial sequence
  synthetic
tgctgcaacaaccgcaacgt

SEQ ID NO: 19538 - DNA, 20 bp, Artificial sequence
  synthetic
cgctgtggactgtcctgagg

SEQ ID NO: 19539 - DNA, 20 bp, Artificial sequence
  synthetic
aaacaccagtcacctcgtct

SEQ ID NO: 19540 - DNA, 20 bp, Artificial sequence
  synthetic
tatgacaatttctggcagat

SEQ ID NO: 19541 - DNA, 20 bp, Artificial sequence
  synthetic
ctcgtgggctgggaatgggg

SEQ ID NO: 19542 - DNA, 20 bp, Artificial sequence
  synthetic
cccgcccccctacccggccc

SEQ ID NO: 19543 - DNA, 20 bp, Artificial sequence
  synthetic
gccggccatgatcgccgagt

SEQ ID NO: 19544 - DNA, 20 bp, Artificial sequence
  synthetic
gcgacctgtccaggtgagaa

SEQ ID NO: 19545 - DNA, 20 bp, Artificial sequence
  synthetic
tcgggtgaccattcggacgg

SEQ ID NO: 19546 - DNA, 20 bp, Artificial sequence
  synthetic
gggtccttggagtgataata

SEQ ID NO: 19547 - DNA, 20 bp, Artificial sequence
  synthetic
gaactccatcgccatcttct

SEQ ID NO: 19548 - DNA, 20 bp, Artificial sequence
  synthetic
gcctgatccctgaacccctg

SEQ ID NO: 19549 - DNA, 20 bp, Artificial sequence
  synthetic
tgattcacctcttcctctgg

SEQ ID NO: 19550 - DNA, 20 bp, Artificial sequence
  synthetic
gggacacctgggagaaggtc

SEQ ID NO: 19551 - DNA, 20 bp, Artificial sequence
  synthetic
ccctggggtgggatctgagc

SEQ ID NO: 19552 - DNA, 20 bp, Artificial sequence
  synthetic
tggaatcctgaagtgcctgc

SEQ ID NO: 19553 - DNA, 20 bp, Artificial sequence
  synthetic
tggcatggttttgctgaatt

SEQ ID NO: 19554 - DNA, 20 bp, Artificial sequence
  synthetic
cacaccataggatgtgagca

SEQ ID NO: 19555 - DNA, 20 bp, Artificial sequence
  synthetic
tgacataatatgataatgtg

SEQ ID NO: 19556 - DNA, 20 bp, Artificial sequence
  synthetic
cttaaaagtaaattcagact

SEQ ID NO: 19557 - DNA, 20 bp, Artificial sequence
  synthetic
caccatgcctggctaatttt

SEQ ID NO: 19558 - DNA, 20 bp, Artificial sequence
  synthetic
tgaggtgttcttagaagggt

SEQ ID NO: 19559 - DNA, 20 bp, Artificial sequence
  synthetic
cagattcggctaggaaaaga

SEQ ID NO: 19560 - DNA, 20 bp, Artificial sequence
  synthetic
gattaattttttgattttcc

SEQ ID NO: 19561 - DNA, 20 bp, Artificial sequence
  synthetic
tagtcatcctaagtatacca

SEQ ID NO: 19562 - DNA, 20 bp, Artificial sequence
  synthetic
tgattcagagctgtcattct

SEQ ID NO: 19563 - DNA, 20 bp, Artificial sequence
  synthetic
ttctgtaattttaaaacatt

SEQ ID NO: 19564 - DNA, 20 bp, Artificial sequence
  synthetic
gtgagaaagggcctcaccca

SEQ ID NO: 19565 - DNA, 20 bp, Artificial sequence
  synthetic
tgctgttgtcagtattactc

SEQ ID NO: 19566 - DNA, 20 bp, Artificial sequence
  synthetic
tgcacattcctgaaccagcc

SEQ ID NO: 19567 - DNA, 20 bp, Artificial sequence
  synthetic
actagttagagtctacattt

SEQ ID NO: 19568 - DNA, 20 bp, Artificial sequence
  synthetic
gctcgcgcgccctcccgccg

SEQ ID NO: 19569 - DNA, 20 bp, Artificial sequence
  synthetic
tcctctgggcaccgtccctg

SEQ ID NO: 19570 - DNA, 20 bp, Artificial sequence
  synthetic
ggcagcggcggcttcggctc

SEQ ID NO: 19571 - DNA, 20 bp, Artificial sequence
  synthetic
gtcattaggctcctggactg

SEQ ID NO: 19572 - DNA, 20 bp, Artificial sequence
  synthetic
gataggccaaccttcgaaga

SEQ ID NO: 19573 - DNA, 20 bp, Artificial sequence
  synthetic
tctccagcttcccgagtacc

SEQ ID NO: 19574 - DNA, 20 bp, Artificial sequence
  synthetic
tcttctcataggtgtccagc

SEQ ID NO: 19575 - DNA, 20 bp, Artificial sequence
  synthetic
ccaccacatctacggactgc

SEQ ID NO: 19576 - DNA, 20 bp, Artificial sequence
  synthetic
cgagcctgctgtcattgaga

SEQ ID NO: 19577 - DNA, 20 bp, Artificial sequence
  synthetic
atcacctgaggccaggaatt

SEQ ID NO: 19578 - DNA, 20 bp, Artificial sequence
  synthetic
ccgtggctccggatctcttc

SEQ ID NO: 19579 - DNA, 20 bp, Artificial sequence
  synthetic
tcgggctgaaggcagtgatg

SEQ ID NO: 19580 - DNA, 20 bp, Artificial sequence
  synthetic
ccagacagctcgtcaggccc

SEQ ID NO: 19581 - DNA, 20 bp, Artificial sequence
  synthetic
agggaagaagatcaacgcct

SEQ ID NO: 19582 - DNA, 20 bp, Artificial sequence
  synthetic
tgtgtgtactctgtccagtt

SEQ ID NO: 19583 - DNA, 20 bp, Artificial sequence
  synthetic
cagctgtcctgcagcaaaca

SEQ ID NO: 19584 - DNA, 20 bp, Artificial sequence
  synthetic
gggcgtctgggatgcagtgg

SEQ ID NO: 19585 - DNA, 20 bp, Artificial sequence
  synthetic
catggctgacacattcctgg

SEQ ID NO: 19586 - DNA, 20 bp, Artificial sequence
  synthetic
aactcatgagtaccatgcgg

SEQ ID NO: 19587 - DNA, 20 bp, Artificial sequence
  synthetic
cgtggacctccgggtgaact

SEQ ID NO: 19588 - DNA, 20 bp, Artificial sequence
  synthetic
aagagttaggggccttaggg

SEQ ID NO: 19589 - DNA, 20 bp, Artificial sequence
  synthetic
agcgctctcactcgcacaag

SEQ ID NO: 19590 - DNA, 20 bp, Artificial sequence
  synthetic
tcaggcagattgtgtctgga

SEQ ID NO: 19591 - DNA, 20 bp, Artificial sequence
  synthetic
caagggttcttcggggatgt

SEQ ID NO: 19592 - DNA, 20 bp, Artificial sequence
  synthetic
acatgagcctccttccagac

SEQ ID NO: 19593 - DNA, 20 bp, Artificial sequence
  synthetic
ggatatctacaactttcagg

SEQ ID NO: 19594 - DNA, 20 bp, Artificial sequence
  synthetic
aagaatgatctagagtatgt

SEQ ID NO: 19595 - DNA, 20 bp, Artificial sequence
  synthetic
gggggaccgcggcccaggct

SEQ ID NO: 19596 - DNA, 20 bp, Artificial sequence
  synthetic
ctccccactcgaggccggcg

SEQ ID NO: 19597 - DNA, 20 bp, Artificial sequence
  synthetic
ggacacgctttcaccagctt

SEQ ID NO: 19598 - DNA, 20 bp, Artificial sequence
  synthetic
tatggagacactgtgtatgg

SEQ ID NO: 19599 - DNA, 20 bp, Artificial sequence
  synthetic
tgattttgccatgaagttca

SEQ ID NO: 19600 - DNA, 20 bp, Artificial sequence
  synthetic
catgctgctttttaatcata

SEQ ID NO: 19601 - DNA, 20 bp, Artificial sequence
  synthetic
aaaattagccgggtgtggtg

SEQ ID NO: 19602 - DNA, 20 bp, Artificial sequence
  synthetic
gttatgttgcttttaaagat

SEQ ID NO: 19603 - DNA, 20 bp, Artificial sequence
  synthetic
tactctgcaggctgaggtgg

SEQ ID NO: 19604 - DNA, 20 bp, Artificial sequence
  synthetic
gtcaacaagatccaggggct

SEQ ID NO: 19605 - DNA, 20 bp, Artificial sequence
  synthetic
ctgaaagtcactcgacattg

SEQ ID NO: 19606 - DNA, 20 bp, Artificial sequence
  synthetic
cagttacagcggcaggagcg

SEQ ID NO: 19607 - DNA, 20 bp, Artificial sequence
  synthetic
gttgtctggaggttccaggg

SEQ ID NO: 19608 - DNA, 20 bp, Artificial sequence
  synthetic
ggccaccttcaacagctggt

SEQ ID NO: 19609 - DNA, 20 bp, Artificial sequence
  synthetic
ccaccacctgaaggctcatg

SEQ ID NO: 19610 - DNA, 20 bp, Artificial sequence
  synthetic
aaatacactgcgtacacgtg

SEQ ID NO: 19611 - DNA, 20 bp, Artificial sequence
  synthetic
tagataagagtagcttggag

SEQ ID NO: 19612 - DNA, 20 bp, Artificial sequence
  synthetic
atttcacaagtgcctttctg

SEQ ID NO: 19613 - DNA, 20 bp, Artificial sequence
  synthetic
tcactgctgccagtgcacgt

SEQ ID NO: 19614 - DNA, 20 bp, Artificial sequence
  synthetic
caagaagacggagtcggatg

SEQ ID NO: 19615 - DNA, 20 bp, Artificial sequence
  synthetic
tagagcttggacagtctgag

SEQ ID NO: 19616 - DNA, 20 bp, Artificial sequence
  synthetic
ggaatggtggtgttcttagg

SEQ ID NO: 19617 - DNA, 20 bp, Artificial sequence
  synthetic
ttcatagcctgggctgggtg

SEQ ID NO: 19618 - DNA, 20 bp, Artificial sequence
  synthetic
aggaccaccgcctccaggga

SEQ ID NO: 19619 - DNA, 20 bp, Artificial sequence
  synthetic
tgacagagttagattccacc

SEQ ID NO: 19620 - DNA, 20 bp, Artificial sequence
  synthetic
ccaggagtgtcggagcacat

SEQ ID NO: 19621 - DNA, 20 bp, Artificial sequence
  synthetic
gcagacaaggcacccttctg

SEQ ID NO: 19622 - DNA, 20 bp, Artificial sequence
  synthetic
agcaagcccaatgcacccag

SEQ ID NO: 19623 - DNA, 20 bp, Artificial sequence
  synthetic
tggatgccatggctctgggc

SEQ ID NO: 19624 - DNA, 20 bp, Artificial sequence
  synthetic
gccatctcaccaaaggatta

SEQ ID NO: 19625 - DNA, 20 bp, Artificial sequence
  synthetic
tggaaattactgccctcctg

SEQ ID NO: 19626 - DNA, 20 bp, Artificial sequence
  synthetic
cgtgcttcgcccggcagtgt

SEQ ID NO: 19627 - DNA, 20 bp, Artificial sequence
  synthetic
acaccccagcgcagacacgc

SEQ ID NO: 19628 - DNA, 20 bp, Artificial sequence
  synthetic
acagatgcagtgcaagctgt

SEQ ID NO: 19629 - DNA, 20 bp, Artificial sequence
  synthetic
ggcccagatgcagatcgaca

SEQ ID NO: 19630 - DNA, 20 bp, Artificial sequence
  synthetic
ctcatcatattgatgagcga

SEQ ID NO: 19631 - DNA, 20 bp, Artificial sequence
  synthetic
acacccttcccaccctgctg

SEQ ID NO: 19632 - DNA, 20 bp, Artificial sequence
  synthetic
gcacactggagtggacgcct

SEQ ID NO: 19633 - DNA, 20 bp, Artificial sequence
  synthetic
ctgtgccgtccacacctcta

SEQ ID NO: 19634 - DNA, 20 bp, Artificial sequence
  synthetic
gctttaagccttagccagct

SEQ ID NO: 19635 - DNA, 20 bp, Artificial sequence
  synthetic
ccggcctcacccccacgagc

SEQ ID NO: 19636 - DNA, 20 bp, Artificial sequence
  synthetic
ccaagttcctatagaagagc

SEQ ID NO: 19637 - DNA, 20 bp, Artificial sequence
  synthetic
gaaccgaaactctggcagct

SEQ ID NO: 19638 - DNA, 20 bp, Artificial sequence
  synthetic
tggggaaggaacgctgtcag

SEQ ID NO: 19639 - DNA, 20 bp, Artificial sequence
  synthetic
tgagcccatgctgatggagt

SEQ ID NO: 19640 - DNA, 20 bp, Artificial sequence
  synthetic
cagaagcaggctggaggtaa

SEQ ID NO: 19641 - DNA, 20 bp, Artificial sequence
  synthetic
ggccaacaaaaaagacctgc

SEQ ID NO: 19642 - DNA, 20 bp, Artificial sequence
  synthetic
cagagtgtgtggctgtgtgt

SEQ ID NO: 19643 - DNA, 20 bp, Artificial sequence
  synthetic
gagcaagaggtgtcggaggt

SEQ ID NO: 19644 - DNA, 20 bp, Artificial sequence
  synthetic
gaagatgtcctcttagtgct

SEQ ID NO: 19645 - DNA, 20 bp, Artificial sequence
  synthetic
aaactatgtgcagaatctaa

SEQ ID NO: 19646 - DNA, 20 bp, Artificial sequence
  synthetic
tgtccagtttgtattaaaaa

SEQ ID NO: 19647 - DNA, 20 bp, Artificial sequence
  synthetic
gtctttgggccctccagttt

SEQ ID NO: 19648 - DNA, 20 bp, Artificial sequence
  synthetic
gacccaggtcttcaagctgg

SEQ ID NO: 19649 - DNA, 20 bp, Artificial sequence
  synthetic
tgtagacagtggctgccttc

SEQ ID NO: 19650 - DNA, 20 bp, Artificial sequence
  synthetic
taatggatttctgttgtgtt

SEQ ID NO: 19651 - DNA, 20 bp, Artificial sequence
  synthetic
tgttacgggagataattgtg

SEQ ID NO: 19652 - DNA, 20 bp, Artificial sequence
  synthetic
atacaaggcagatccaacca

SEQ ID NO: 19653 - DNA, 20 bp, Artificial sequence
  synthetic
tgacagcgttcagcgacccg

SEQ ID NO: 19654 - DNA, 20 bp, Artificial sequence
  synthetic
accccggctcgtcgcaagcg

SEQ ID NO: 19655 - DNA, 20 bp, Artificial sequence
  synthetic
accccagcctcccgaaccag

SEQ ID NO: 19656 - DNA, 20 bp, Artificial sequence
  synthetic
gtgatcgcttggttatccag

SEQ ID NO: 19657 - DNA, 20 bp, Artificial sequence
  synthetic
acttcctccttaaaacagag

SEQ ID NO: 19658 - DNA, 20 bp, Artificial sequence
  synthetic
ctcaacaacatctttgtgtt

SEQ ID NO: 19659 - DNA, 20 bp, Artificial sequence
  synthetic
cccactttctccctcctcct

SEQ ID NO: 19660 - DNA, 20 bp, Artificial sequence
  synthetic
gccaaccatattggatctgc

SEQ ID NO: 19661 - DNA, 20 bp, Artificial sequence
  synthetic
tgtttaccgtagcgtataca

SEQ ID NO: 19662 - DNA, 20 bp, Artificial sequence
  synthetic
tataaaatattgttaatgcc

SEQ ID NO: 19663 - DNA, 20 bp, Artificial sequence
  synthetic
gagagaatatcccagaaccc

SEQ ID NO: 19664 - DNA, 20 bp, Artificial sequence
  synthetic
ccagatggcactctggtcac

SEQ ID NO: 19665 - DNA, 20 bp, Artificial sequence
  synthetic
taataggatttttagacact

SEQ ID NO: 19666 - DNA, 20 bp, Artificial sequence
  synthetic
gtcaatttgcctctgtgtgc

SEQ ID NO: 19667 - DNA, 20 bp, Artificial sequence
  synthetic
aacgtacctcttaaaattcg

SEQ ID NO: 19668 - DNA, 20 bp, Artificial sequence
  synthetic
ctggagaaaaatgaaggaaa

SEQ ID NO: 19669 - DNA, 20 bp, Artificial sequence
  synthetic
ggtatctttttattcattgc

SEQ ID NO: 19670 - DNA, 20 bp, Artificial sequence
  synthetic
ccagttcttcccccttcaca

SEQ ID NO: 19671 - DNA, 20 bp, Artificial sequence
  synthetic
tcgggtgggccgcctcccct

SEQ ID NO: 19672 - DNA, 20 bp, Artificial sequence
  synthetic
tgtcaaaagaaacacttgga

SEQ ID NO: 19673 - DNA, 20 bp, Artificial sequence
  synthetic
tactcaaggagctccaagaa

SEQ ID NO: 19674 - DNA, 20 bp, Artificial sequence
  synthetic
tgccaggcaactcagcaagc

SEQ ID NO: 19675 - DNA, 20 bp, Artificial sequence
  synthetic
gagaccttttgtcatcccat

SEQ ID NO: 19676 - DNA, 20 bp, Artificial sequence
  synthetic
cccacctccacctcagcatt

SEQ ID NO: 19677 - DNA, 20 bp, Artificial sequence
  synthetic
agaagagtggaaacatcttg

SEQ ID NO: 19678 - DNA, 20 bp, Artificial sequence
  synthetic
cagcagccactctaggcagc

SEQ ID NO: 19679 - DNA, 20 bp, Artificial sequence
  synthetic
aattatcctatttcagtact

SEQ ID NO: 19680 - DNA, 20 bp, Artificial sequence
  synthetic
cggaattttgaaaagcacca

SEQ ID NO: 19681 - DNA, 20 bp, Artificial sequence
  synthetic
tctgcatagaggcaatccta

SEQ ID NO: 19682 - DNA, 20 bp, Artificial sequence
  synthetic
gtgaaaacaaatacaaaaaa

SEQ ID NO: 19683 - DNA, 20 bp, Artificial sequence
  synthetic
tgtgagaatataatttgtag

SEQ ID NO: 19684 - DNA, 20 bp, Artificial sequence
  synthetic
ctgttgaaatgcagatttga

SEQ ID NO: 19685 - DNA, 20 bp, Artificial sequence
  synthetic
cgtccccggtgtgccatggt

SEQ ID NO: 19686 - DNA, 20 bp, Artificial sequence
  synthetic
agctcattcataaggggatg

SEQ ID NO: 19687 - DNA, 20 bp, Artificial sequence
  synthetic
tctagtttccttcttgtgcc

SEQ ID NO: 19688 - DNA, 20 bp, Artificial sequence
  synthetic
cacttttcctccctctcccg

SEQ ID NO: 19689 - DNA, 20 bp, Artificial sequence
  synthetic
tttggcaatgacatttcacc

SEQ ID NO: 19690 - DNA, 20 bp, Artificial sequence
  synthetic
cgtgagctcctccactgcgc

SEQ ID NO: 19691 - DNA, 20 bp, Artificial sequence
  synthetic
ggctttgacagagagccttt

SEQ ID NO: 19692 - DNA, 20 bp, Artificial sequence
  synthetic
gccaagatggagcgcacggt

SEQ ID NO: 19693 - DNA, 20 bp, Artificial sequence
  synthetic
aaagactgggagaagcacca

SEQ ID NO: 19694 - DNA, 20 bp, Artificial sequence
  synthetic
cttctccaaatacatataca

SEQ ID NO: 19695 - DNA, 20 bp, Artificial sequence
  synthetic
gaaagcacataaccaggctc

SEQ ID NO: 19696 - DNA, 20 bp, Artificial sequence
  synthetic
acccacacgtctttatctct

SEQ ID NO: 19697 - DNA, 20 bp, Artificial sequence
  synthetic
ttcctcttcctccttcccct

SEQ ID NO: 19698 - DNA, 20 bp, Artificial sequence
  synthetic
attggatagaattgaatggt

SEQ ID NO: 19699 - DNA, 20 bp, Artificial sequence
  synthetic
ccatcctccatggtgctgaa

SEQ ID NO: 19700 - DNA, 20 bp, Artificial sequence
  synthetic
ggaggagaattactaccttc

SEQ ID NO: 19701 - DNA, 20 bp, Artificial sequence
  synthetic
gtcaggttgcttggctgcct

SEQ ID NO: 19702 - DNA, 20 bp, Artificial sequence
  synthetic
tatctcctctgacacatatt

SEQ ID NO: 19703 - DNA, 20 bp, Artificial sequence
  synthetic
actctaaaagtcaaatcttc

SEQ ID NO: 19704 - DNA, 20 bp, Artificial sequence
  synthetic
aagcacaggaccccaggaac

SEQ ID NO: 19705 - DNA, 20 bp, Artificial sequence
  synthetic
ctcatttcatttgcccagcc

SEQ ID NO: 19706 - DNA, 20 bp, Artificial sequence
  synthetic
ttgtgattccaaagaatccc

SEQ ID NO: 19707 - DNA, 20 bp, Artificial sequence
  synthetic
gcttcctcaagcaaggccat

SEQ ID NO: 19708 - DNA, 20 bp, Artificial sequence
  synthetic
tgctttcatcctgtggcctc

SEQ ID NO: 19709 - DNA, 20 bp, Artificial sequence
  synthetic
tgaatgccttccacgtgatg

SEQ ID NO: 19710 - DNA, 20 bp, Artificial sequence
  synthetic
cagcgcctgtccattgcttc

SEQ ID NO: 19711 - DNA, 20 bp, Artificial sequence
  synthetic
atgacttctggcggctggtt

SEQ ID NO: 19712 - DNA, 20 bp, Artificial sequence
  synthetic
gggggcgtaaaccaggaaag

SEQ ID NO: 19713 - DNA, 20 bp, Artificial sequence
  synthetic
gtgcctctgtggtgttgcag

SEQ ID NO: 19714 - DNA, 20 bp, Artificial sequence
  synthetic
tccgcttcctggagaaactc

SEQ ID NO: 19715 - DNA, 20 bp, Artificial sequence
  synthetic
cacactcagactcaatggac

SEQ ID NO: 19716 - DNA, 20 bp, Artificial sequence
  synthetic
gccttgaccacatcactcca

SEQ ID NO: 19717 - DNA, 20 bp, Artificial sequence
  synthetic
cggaaggccaagaaggcgct

SEQ ID NO: 19718 - DNA, 20 bp, Artificial sequence
  synthetic
cattcttgtgagccaaacct

SEQ ID NO: 19719 - DNA, 20 bp, Artificial sequence
  synthetic
caagaagaagctccaaagca

SEQ ID NO: 19720 - DNA, 20 bp, Artificial sequence
  synthetic
cgcctgcagctggcattggt

SEQ ID NO: 19721 - DNA, 20 bp, Artificial sequence
  synthetic
ctcaacaactttttgcaggg

SEQ ID NO: 19722 - DNA, 20 bp, Artificial sequence
  synthetic
cccaaagcttccactcgctg

SEQ ID NO: 19723 - DNA, 20 bp, Artificial sequence
  synthetic
atcgtctttggtgtggcgct

SEQ ID NO: 19724 - DNA, 20 bp, Artificial sequence
  synthetic
ttactctttgcccgccttgg

SEQ ID NO: 19725 - DNA, 20 bp, Artificial sequence
  synthetic
aatgtagaaggtgacgctct

SEQ ID NO: 19726 - DNA, 20 bp, Artificial sequence
  synthetic
ctccaggacaggagatctgg

SEQ ID NO: 19727 - DNA, 20 bp, Artificial sequence
  synthetic
tacgtcccaccctgtcccca

SEQ ID NO: 19728 - DNA, 20 bp, Artificial sequence
  synthetic
tcccggacaccagaccaccg

SEQ ID NO: 19729 - DNA, 20 bp, Artificial sequence
  synthetic
gcgtccgggatctgcgccac

SEQ ID NO: 19730 - DNA, 20 bp, Artificial sequence
  synthetic
cggttcccgggaccaggtgc

SEQ ID NO: 19731 - DNA, 20 bp, Artificial sequence
  synthetic
gcgtctgctgcggatgatca

SEQ ID NO: 19732 - DNA, 20 bp, Artificial sequence
  synthetic
ggacggtgccgcgctcttcc

SEQ ID NO: 19733 - DNA, 20 bp, Artificial sequence
  synthetic
agtcaacctcccggtcgacc

SEQ ID NO: 19734 - DNA, 20 bp, Artificial sequence
  synthetic
gaggaatggataaatggatg

SEQ ID NO: 19735 - DNA, 20 bp, Artificial sequence
  synthetic
gatgtgtgtgtgcacgtgtg

SEQ ID NO: 19736 - DNA, 20 bp, Artificial sequence
  synthetic
gggcaacctggcgggtctga

SEQ ID NO: 19737 - DNA, 20 bp, Artificial sequence
  synthetic
ggctaaaaaaaagagcatcc

SEQ ID NO: 19738 - DNA, 20 bp, Artificial sequence
  synthetic
tgagattggcctggatgcag

SEQ ID NO: 19739 - DNA, 20 bp, Artificial sequence
  synthetic
ttcccaggccctttggcttc

SEQ ID NO: 19740 - DNA, 20 bp, Artificial sequence
  synthetic
cttgcggcgcgaaaaaggcg

SEQ ID NO: 19741 - DNA, 20 bp, Artificial sequence
  synthetic
ccccttgcccacacacccca

SEQ ID NO: 19742 - DNA, 20 bp, Artificial sequence
  synthetic
ttacccaggctggtcttcaa

SEQ ID NO: 19743 - DNA, 20 bp, Artificial sequence
  synthetic
ctaagttcacgggcctgtcc

SEQ ID NO: 19744 - DNA, 20 bp, Artificial sequence
  synthetic
agtggtggcacacgggcgcc

SEQ ID NO: 19745 - DNA, 20 bp, Artificial sequence
  synthetic
ccccgcagccaacgggccgc

SEQ ID NO: 19746 - DNA, 20 bp, Artificial sequence
  synthetic
accctgtggagatcctgcag

SEQ ID NO: 19747 - DNA, 20 bp, Artificial sequence
  synthetic
gcattctccagcatgccaag

SEQ ID NO: 19748 - DNA, 20 bp, Artificial sequence
  synthetic
aggggtaccgcaagctcatc

SEQ ID NO: 19749 - DNA, 20 bp, Artificial sequence
  synthetic
tgtacaacaacaacctgaac

SEQ ID NO: 19750 - DNA, 20 bp, Artificial sequence
  synthetic
agggcggccggcggcggccg

SEQ ID NO: 19751 - DNA, 20 bp, Artificial sequence
  synthetic
agaattccgaattggggaac

SEQ ID NO: 19752 - DNA, 20 bp, Artificial sequence
  synthetic
ggggaggcgccgggaagtcg

SEQ ID NO: 19753 - DNA, 20 bp, Artificial sequence
  synthetic
agaagctgattcccccgcag

SEQ ID NO: 19754 - DNA, 20 bp, Artificial sequence
  synthetic
ggctggtgtccctgtacaac

SEQ ID NO: 19755 - DNA, 20 bp, Artificial sequence
  synthetic
ttgacaagtgggccccctcc

SEQ ID NO: 19756 - DNA, 20 bp, Artificial sequence
  synthetic
acatcgaggagtccttttcc

SEQ ID NO: 19757 - DNA, 20 bp, Artificial sequence
  synthetic
aggagccacctctaaaggag

SEQ ID NO: 19758 - DNA, 20 bp, Artificial sequence
  synthetic
aacaagaggaggaccgctca

SEQ ID NO: 19759 - DNA, 20 bp, Artificial sequence
  synthetic
ttggagtcactgtagttaag

SEQ ID NO: 19760 - DNA, 20 bp, Artificial sequence
  synthetic
cggcggcccatgaacgcctt

SEQ ID NO: 19761 - DNA, 20 bp, Artificial sequence
  synthetic
cagcacatgcaggactaccc

SEQ ID NO: 19762 - DNA, 20 bp, Artificial sequence
  synthetic
ttctcctccccctgccagga

SEQ ID NO: 19763 - DNA, 20 bp, Artificial sequence
  synthetic
ccacgttccagcccctgcag

SEQ ID NO: 19764 - DNA, 20 bp, Artificial sequence
  synthetic
tctgtagattcaaaaggtgc

SEQ ID NO: 19765 - DNA, 20 bp, Artificial sequence
  synthetic
ttcctcaccagccaggtcct

SEQ ID NO: 19766 - DNA, 20 bp, Artificial sequence
  synthetic
ctctggcagatgagcgtgaa

SEQ ID NO: 19767 - DNA, 20 bp, Artificial sequence
  synthetic
attttgacaaactaaagaaa

SEQ ID NO: 19768 - DNA, 20 bp, Artificial sequence
  synthetic
cctgggaaagactggaaaaa

SEQ ID NO: 19769 - DNA, 20 bp, Artificial sequence
  synthetic
accttcctgcagttgaggcc

SEQ ID NO: 19770 - DNA, 20 bp, Artificial sequence
  synthetic
aatacctactggaactgctc

SEQ ID NO: 19771 - DNA, 20 bp, Artificial sequence
  synthetic
cggctgagcgcagggcccgt

SEQ ID NO: 19772 - DNA, 20 bp, Artificial sequence
  synthetic
acgagatgagcggccgcagt

SEQ ID NO: 19773 - DNA, 20 bp, Artificial sequence
  synthetic
cctccctgctgcaccagttc

SEQ ID NO: 19774 - DNA, 20 bp, Artificial sequence
  synthetic
acacgctgcacgaacaagcc

SEQ ID NO: 19775 - DNA, 20 bp, Artificial sequence
  synthetic
atgcctgtgagctctggatc

SEQ ID NO: 19776 - DNA, 20 bp, Artificial sequence
  synthetic
acagcggccacccaagtgag

SEQ ID NO: 19777 - DNA, 20 bp, Artificial sequence
  synthetic
ccaaggtcatcgagtccacc

SEQ ID NO: 19778 - DNA, 20 bp, Artificial sequence
  synthetic
tcctgtctcggctggccgag

SEQ ID NO: 19779 - DNA, 20 bp, Artificial sequence
  synthetic
caaacaccctgaccgaggct

SEQ ID NO: 19780 - DNA, 20 bp, Artificial sequence
  synthetic
ctggatggaacgagctccac

SEQ ID NO: 19781 - DNA, 20 bp, Artificial sequence
  synthetic
tccaaagccaagcccaggcc

SEQ ID NO: 19782 - DNA, 20 bp, Artificial sequence
  synthetic
gcagcagcctcagcgctgag

SEQ ID NO: 19783 - DNA, 20 bp, Artificial sequence
  synthetic
tgcggcagtccaaagtggat

SEQ ID NO: 19784 - DNA, 20 bp, Artificial sequence
  synthetic
actatgagcatgtcacgatg

SEQ ID NO: 19785 - DNA, 20 bp, Artificial sequence
  synthetic
tgcacactacatttgagcat

SEQ ID NO: 19786 - DNA, 20 bp, Artificial sequence
  synthetic
tccatcagttctcaagagac

SEQ ID NO: 19787 - DNA, 20 bp, Artificial sequence
  synthetic
aacagggatctccacggatg

SEQ ID NO: 19788 - DNA, 20 bp, Artificial sequence
  synthetic
ctacagaccaaaccatttgt

SEQ ID NO: 19789 - DNA, 20 bp, Artificial sequence
  synthetic
gagacctcaccatcctctcc

SEQ ID NO: 19790 - DNA, 20 bp, Artificial sequence
  synthetic
tggcaataagttcataccag

SEQ ID NO: 19791 - DNA, 20 bp, Artificial sequence
  synthetic
ttgttgccataatgctgtgc

SEQ ID NO: 19792 - DNA, 20 bp, Artificial sequence
  synthetic
gttgggatgcatcttctgat

SEQ ID NO: 19793 - DNA, 20 bp, Artificial sequence
  synthetic
cgtggcatgcttaggattgg

SEQ ID NO: 19794 - DNA, 20 bp, Artificial sequence
  synthetic
actctcttgcagccaacttc

SEQ ID NO: 19795 - DNA, 20 bp, Artificial sequence
  synthetic
gaattgcagaggacgtctag

SEQ ID NO: 19796 - DNA, 20 bp, Artificial sequence
  synthetic
tgccggatcacagacctgta

SEQ ID NO: 19797 - DNA, 20 bp, Artificial sequence
  synthetic
gaagtgctgctcttcaccat

SEQ ID NO: 19798 - DNA, 20 bp, Artificial sequence
  synthetic
gaacagctcgcccgcagatt

SEQ ID NO: 19799 - DNA, 20 bp, Artificial sequence
  synthetic
caggctgtggtagccgtggc

SEQ ID NO: 19800 - DNA, 20 bp, Artificial sequence
  synthetic
gcaacagacggggaaggtta

SEQ ID NO: 19801 - DNA, 20 bp, Artificial sequence
  synthetic
tggatacgggagaaggagaa

SEQ ID NO: 19802 - DNA, 20 bp, Artificial sequence
  synthetic
atcgaggagcggtataagga

SEQ ID NO: 19803 - DNA, 20 bp, Artificial sequence
  synthetic
ctggttgacaggaagaagga

SEQ ID NO: 19804 - DNA, 20 bp, Artificial sequence
  synthetic
cggaggctggtgagcgatgg

SEQ ID NO: 19805 - DNA, 20 bp, Artificial sequence
  synthetic
gctgtggtgaaggagaaact

SEQ ID NO: 19806 - DNA, 20 bp, Artificial sequence
  synthetic
ttaataaagaaaaatcagac

SEQ ID NO: 19807 - DNA, 20 bp, Artificial sequence
  synthetic
agacacaggttattccagct

SEQ ID NO: 19808 - DNA, 20 bp, Artificial sequence
  synthetic
ataggccagagcgtggacga

SEQ ID NO: 19809 - DNA, 20 bp, Artificial sequence
  synthetic
cccgagccgagcacgaaggt

SEQ ID NO: 19810 - DNA, 20 bp, Artificial sequence
  synthetic
cttgcacagatgttgcagcc

SEQ ID NO: 19811 - DNA, 20 bp, Artificial sequence
  synthetic
ttggattaatcttctgattc

SEQ ID NO: 19812 - DNA, 20 bp, Artificial sequence
  synthetic
aagagaagcaacgtgggggg

SEQ ID NO: 19813 - DNA, 20 bp, Artificial sequence
  synthetic
aacagcgggctggggcagcc

SEQ ID NO: 19814 - DNA, 20 bp, Artificial sequence
  synthetic
cagagctacagacctatggg

SEQ ID NO: 19815 - DNA, 20 bp, Artificial sequence
  synthetic
tttccccaacacctgcggca

SEQ ID NO: 19816 - DNA, 20 bp, Artificial sequence
  synthetic
cacatcagcacccttgagag

SEQ ID NO: 19817 - DNA, 20 bp, Artificial sequence
  synthetic
ctagtgctgaagaggatcca

SEQ ID NO: 19818 - DNA, 20 bp, Artificial sequence
  synthetic
cgggcatcgctgactggccg

SEQ ID NO: 19819 - DNA, 20 bp, Artificial sequence
  synthetic
cggtgtgagcggaagggcac

SEQ ID NO: 19820 - DNA, 20 bp, Artificial sequence
  synthetic
aaacagtacgttactagcct

SEQ ID NO: 19821 - DNA, 20 bp, Artificial sequence
  synthetic
ctgggggaccgaatccggga

SEQ ID NO: 19822 - DNA, 20 bp, Artificial sequence
  synthetic
ttccaggagcctcacctgca

SEQ ID NO: 19823 - DNA, 20 bp, Artificial sequence
  synthetic
ccagtgacagcgtttcctca

SEQ ID NO: 19824 - DNA, 20 bp, Artificial sequence
  synthetic
atctcaatgtcccacatgga

SEQ ID NO: 19825 - DNA, 20 bp, Artificial sequence
  synthetic
tcaggaggaaaagactaaca

SEQ ID NO: 19826 - DNA, 20 bp, Artificial sequence
  synthetic
acagagctctctgagggtga

SEQ ID NO: 19827 - DNA, 20 bp, Artificial sequence
  synthetic
gggccctgcctgctgcatct

SEQ ID NO: 19828 - DNA, 20 bp, Artificial sequence
  synthetic
gagcttgagcccaagacccg

SEQ ID NO: 19829 - DNA, 20 bp, Artificial sequence
  synthetic
gccaagcctccgctggtcag

SEQ ID NO: 19830 - DNA, 20 bp, Artificial sequence
  synthetic
aagatcttcaatgacaacag

SEQ ID NO: 19831 - DNA, 20 bp, Artificial sequence
  synthetic
caaccacttcctaccccaga

SEQ ID NO: 19832 - DNA, 20 bp, Artificial sequence
  synthetic
gtcaacgtgttgtcagcctt

SEQ ID NO: 19833 - DNA, 20 bp, Artificial sequence
  synthetic
acgcacgcacacacacatac

SEQ ID NO: 19834 - DNA, 20 bp, Artificial sequence
  synthetic
atgcaaaagtacaagggctg

SEQ ID NO: 19835 - DNA, 20 bp, Artificial sequence
  synthetic
gggctatcccgacccggcgg

SEQ ID NO: 19836 - DNA, 20 bp, Artificial sequence
  synthetic
cggcgctcggcttcctcctg

SEQ ID NO: 19837 - DNA, 20 bp, Artificial sequence
  synthetic
aggcagagtcgggggccttg

SEQ ID NO: 19838 - DNA, 20 bp, Artificial sequence
  synthetic
aggggggatgtcacacgcag

SEQ ID NO: 19839 - DNA, 20 bp, Artificial sequence
  synthetic
catttctatgtgtaatttct

SEQ ID NO: 19840 - DNA, 20 bp, Artificial sequence
  synthetic
ctcttctggagtagggggtc

SEQ ID NO: 19841 - DNA, 20 bp, Artificial sequence
  synthetic
acttgttcctggggaatgcc

SEQ ID NO: 19842 - DNA, 20 bp, Artificial sequence
  synthetic
gcaagatctggggctgcaga

SEQ ID NO: 19843 - DNA, 20 bp, Artificial sequence
  synthetic
aaagctaaagcaataacatt

SEQ ID NO: 19844 - DNA, 20 bp, Artificial sequence
  synthetic
tgacggttgaggacttcaac

SEQ ID NO: 19845 - DNA, 20 bp, Artificial sequence
  synthetic
gctgtgctgagacagctgtc

SEQ ID NO: 19846 - DNA, 20 bp, Artificial sequence
  synthetic
cactccaggacttgcagacg

SEQ ID NO: 19847 - DNA, 20 bp, Artificial sequence
  synthetic
gtctggtgggcagtgtcctc

SEQ ID NO: 19848 - DNA, 20 bp, Artificial sequence
  synthetic
ccggggacaagaaggagccg

SEQ ID NO: 19849 - DNA, 20 bp, Artificial sequence
  synthetic
cgtacgggcctagcccggcc

SEQ ID NO: 19850 - DNA, 20 bp, Artificial sequence
  synthetic
gccagtgcgcatgcgcgagt

SEQ ID NO: 19851 - DNA, 20 bp, Artificial sequence
  synthetic
cgtgacggtgggggacttcc

SEQ ID NO: 19852 - DNA, 20 bp, Artificial sequence
  synthetic
gctcagccactgactgcccc

SEQ ID NO: 19853 - DNA, 20 bp, Artificial sequence
  synthetic
tggtgaccctgggcgtctga

SEQ ID NO: 19854 - DNA, 20 bp, Artificial sequence
  synthetic
agtgcctgagagacaagtgt

SEQ ID NO: 19855 - DNA, 20 bp, Artificial sequence
  synthetic
tgccctccacctggcctgct

SEQ ID NO: 19856 - DNA, 20 bp, Artificial sequence
  synthetic
cgggagctgctggaggagat

SEQ ID NO: 19857 - DNA, 20 bp, Artificial sequence
  synthetic
acacggggcactgccgagtg

SEQ ID NO: 19858 - DNA, 20 bp, Artificial sequence
  synthetic
actctgaaccctgaagcatc

SEQ ID NO: 19859 - DNA, 20 bp, Artificial sequence
  synthetic
accaccactgcctgactgcc

SEQ ID NO: 19860 - DNA, 20 bp, Artificial sequence
  synthetic
gacacttcagatctgaggtt

SEQ ID NO: 19861 - DNA, 20 bp, Artificial sequence
  synthetic
tttccttgggccttcaaact

SEQ ID NO: 19862 - DNA, 20 bp, Artificial sequence
  synthetic
ctgcaggccaggggcctggc

SEQ ID NO: 19863 - DNA, 20 bp, Artificial sequence
  synthetic
acagtgctttccaggtggat

SEQ ID NO: 19864 - DNA, 20 bp, Artificial sequence
  synthetic
ggctccctcggccaaaggac

SEQ ID NO: 19865 - DNA, 20 bp, Artificial sequence
  synthetic
attacaccattattgagaat

SEQ ID NO: 19866 - DNA, 20 bp, Artificial sequence
  synthetic
gtacgaagatggagaagcac

SEQ ID NO: 19867 - DNA, 20 bp, Artificial sequence
  synthetic
tgaaggaaccaaatccaatt

SEQ ID NO: 19868 - DNA, 20 bp, Artificial sequence
  synthetic
aggcttgggggttttcaatg

SEQ ID NO: 19869 - DNA, 20 bp, Artificial sequence
  synthetic
ctgaaccaagatgtaaaaca

SEQ ID NO: 19870 - DNA, 20 bp, Artificial sequence
  synthetic
caccaagacagtgctgagat

SEQ ID NO: 19871 - DNA, 20 bp, Artificial sequence
  synthetic
taaaaaaaaaaaaaaaaaaa

SEQ ID NO: 19872 - DNA, 20 bp, Artificial sequence
  synthetic
cccactgcccttaaaataag

SEQ ID NO: 19873 - DNA, 20 bp, Artificial sequence
  synthetic
ttgatgctgaagctgttgtt

SEQ ID NO: 19874 - DNA, 20 bp, Artificial sequence
  synthetic
tgggtgagtcctatgtgatt

SEQ ID NO: 19875 - DNA, 20 bp, Artificial sequence
  synthetic
aaaacgagtacccttaaaat

SEQ ID NO: 19876 - DNA, 20 bp, Artificial sequence
  synthetic
ccgcgcgctgattgctgtgg

SEQ ID NO: 19877 - DNA, 20 bp, Artificial sequence
  synthetic
tttagccactgcaggtccag

SEQ ID NO: 19878 - DNA, 20 bp, Artificial sequence
  synthetic
ttctgtggtccagttttcat

SEQ ID NO: 19879 - DNA, 20 bp, Artificial sequence
  synthetic
aaatccaatttctccaccaa

SEQ ID NO: 19880 - DNA, 20 bp, Artificial sequence
  synthetic
aaacagcagtgctgcccaca

SEQ ID NO: 19881 - DNA, 20 bp, Artificial sequence
  synthetic
cacactttacagttttaata

SEQ ID NO: 19882 - DNA, 20 bp, Artificial sequence
  synthetic
gtgacttgcacgtactcccc

SEQ ID NO: 19883 - DNA, 20 bp, Artificial sequence
  synthetic
gagcgctgctcagatagcga

SEQ ID NO: 19884 - DNA, 20 bp, Artificial sequence
  synthetic
tgtaacagttcctgcatggg

SEQ ID NO: 19885 - DNA, 20 bp, Artificial sequence
  synthetic
gcatttgcacctacctcaca

SEQ ID NO: 19886 - DNA, 20 bp, Artificial sequence
  synthetic
ttttttcttttttttttttt

SEQ ID NO: 19887 - DNA, 20 bp, Artificial sequence
  synthetic
cagccaacttttgcatgttt

SEQ ID NO: 19888 - DNA, 20 bp, Artificial sequence
  synthetic
acctgccctgtgcagctgtg

SEQ ID NO: 19889 - DNA, 20 bp, Artificial sequence
  synthetic
aaaaagggtcagtctacctc

SEQ ID NO: 19890 - DNA, 20 bp, Artificial sequence
  synthetic
gtcagaagcacccaggactt

SEQ ID NO: 19891 - DNA, 20 bp, Artificial sequence
  synthetic
cttggtgaaccttagtacct

SEQ ID NO: 19892 - DNA, 20 bp, Artificial sequence
  synthetic
ttgcccaggctggagtggag

SEQ ID NO: 19893 - DNA, 20 bp, Artificial sequence
  synthetic
catcgccttgagctgcccac

SEQ ID NO: 19894 - DNA, 20 bp, Artificial sequence
  synthetic
gctgcctccgacagcgccgc

SEQ ID NO: 19895 - DNA, 20 bp, Artificial sequence
  synthetic
ctgcatcacggagcactggg

SEQ ID NO: 19896 - DNA, 20 bp, Artificial sequence
  synthetic
accctgccaggcgcacgaca

SEQ ID NO: 19897 - DNA, 20 bp, Artificial sequence
  synthetic
cgagcgggaacacaccgaag

SEQ ID NO: 19898 - DNA, 20 bp, Artificial sequence
  synthetic
gctgaccgacatcgagcaga

SEQ ID NO: 19899 - DNA, 20 bp, Artificial sequence
  synthetic
atatgaagacttcccgacct

SEQ ID NO: 19900 - DNA, 20 bp, Artificial sequence
  synthetic
gcccagccgcggcttctact

SEQ ID NO: 19901 - DNA, 20 bp, Artificial sequence
  synthetic
agatagaagacctggactcc

SEQ ID NO: 19902 - DNA, 20 bp, Artificial sequence
  synthetic
ccccagtagctctgaacaag

SEQ ID NO: 19903 - DNA, 20 bp, Artificial sequence
  synthetic
gcaggaagccactatgccag

SEQ ID NO: 19904 - DNA, 20 bp, Artificial sequence
  synthetic
agccagaagattttatctag

SEQ ID NO: 19905 - DNA, 20 bp, Artificial sequence
  synthetic
ttgcgcttagtgtcctacat

SEQ ID NO: 19906 - DNA, 20 bp, Artificial sequence
  synthetic
tagtactgtgcctctttctt

SEQ ID NO: 19907 - DNA, 20 bp, Artificial sequence
  synthetic
gaagtaaatccttgttcact

SEQ ID NO: 19908 - DNA, 20 bp, Artificial sequence
  synthetic
ggggcgtgatttgactgcat

SEQ ID NO: 19909 - DNA, 20 bp, Artificial sequence
  synthetic
cggagcgtcaggtcccgttt

SEQ ID NO: 19910 - DNA, 20 bp, Artificial sequence
  synthetic
cccggcaatgttccctcgaa

SEQ ID NO: 19911 - DNA, 20 bp, Artificial sequence
  synthetic
acaaagcctgaacctccttt

SEQ ID NO: 19912 - DNA, 20 bp, Artificial sequence
  synthetic
cccagtatctagaaaactct

SEQ ID NO: 19913 - DNA, 20 bp, Artificial sequence
  synthetic
gctaccatattctcaggcgg

SEQ ID NO: 19914 - DNA, 20 bp, Artificial sequence
  synthetic
tcttcaaacagcaatgtcct

SEQ ID NO: 19915 - DNA, 20 bp, Artificial sequence
  synthetic
tttcccgttgaaggtgctac

SEQ ID NO: 19916 - DNA, 20 bp, Artificial sequence
  synthetic
caaagaactaatagagaaaa

SEQ ID NO: 19917 - DNA, 20 bp, Artificial sequence
  synthetic
ctcaggaccaaccgcatagc

SEQ ID NO: 19918 - DNA, 20 bp, Artificial sequence
  synthetic
ggcagtggaatgattggaaa

SEQ ID NO: 19919 - DNA, 20 bp, Artificial sequence
  synthetic
gaaagagatgatctcttaca

SEQ ID NO: 19920 - DNA, 20 bp, Artificial sequence
  synthetic
tctaaggcttgtcttaagtc

SEQ ID NO: 19921 - DNA, 20 bp, Artificial sequence
  synthetic
atgatggatggctcactgcc

SEQ ID NO: 19922 - DNA, 20 bp, Artificial sequence
  synthetic
atggtcactctgtggtcatc

SEQ ID NO: 19923 - DNA, 20 bp, Artificial sequence
  synthetic
ggacaccaggccgactcaga

SEQ ID NO: 19924 - DNA, 20 bp, Artificial sequence
  synthetic
atgaagaacagaccaatgtg

SEQ ID NO: 19925 - DNA, 20 bp, Artificial sequence
  synthetic
tgggctttcacgtactgggt

SEQ ID NO: 19926 - DNA, 20 bp, Artificial sequence
  synthetic
aggctggctgctgaggttaa

SEQ ID NO: 19927 - DNA, 20 bp, Artificial sequence
  synthetic
ttggaggctatgtaggcttg

SEQ ID NO: 19928 - DNA, 20 bp, Artificial sequence
  synthetic
ttaaggtctgtttaggaagg

SEQ ID NO: 19929 - DNA, 20 bp, Artificial sequence
  synthetic
tctcagttgcagcactgagt

SEQ ID NO: 19930 - DNA, 20 bp, Artificial sequence
  synthetic
taggttgccagggctgcacg

SEQ ID NO: 19931 - DNA, 20 bp, Artificial sequence
  synthetic
ctgaaggagggcctgatgtc

SEQ ID NO: 19932 - DNA, 20 bp, Artificial sequence
  synthetic
gaccaggacatggccaacaa

SEQ ID NO: 19933 - DNA, 20 bp, Artificial sequence
  synthetic
catagttacttttggccatt

SEQ ID NO: 19934 - DNA, 20 bp, Artificial sequence
  synthetic
accaaaaagcagctggacag

SEQ ID NO: 19935 - DNA, 20 bp, Artificial sequence
  synthetic
ccaaatccaaggcgaagttt

SEQ ID NO: 19936 - DNA, 20 bp, Artificial sequence
  synthetic
caccattatttgtcatggag

SEQ ID NO: 19937 - DNA, 20 bp, Artificial sequence
  synthetic
taggcagcagagcccctgac

SEQ ID NO: 19938 - DNA, 20 bp, Artificial sequence
  synthetic
tgaaattagaacagtaggcg

SEQ ID NO: 19939 - DNA, 20 bp, Artificial sequence
  synthetic
gaagtaccttatgagccata

SEQ ID NO: 19940 - DNA, 20 bp, Artificial sequence
  synthetic
aatgtctatgcagatggtag

SEQ ID NO: 19941 - DNA, 20 bp, Artificial sequence
  synthetic
cactcatgccaagtttcaga

SEQ ID NO: 19942 - DNA, 20 bp, Artificial sequence
  synthetic
gtaccaggagaacaaacggg

SEQ ID NO: 19943 - DNA, 20 bp, Artificial sequence
  synthetic
agtgaataaactcaattgtc

SEQ ID NO: 19944 - DNA, 20 bp, Artificial sequence
  synthetic
tggcagattatgaagcacgg

SEQ ID NO: 19945 - DNA, 20 bp, Artificial sequence
  synthetic
atgctaaatggtatccaggg

SEQ ID NO: 19946 - DNA, 20 bp, Artificial sequence
  synthetic
aagctatacgaatggggttc

SEQ ID NO: 19947 - DNA, 20 bp, Artificial sequence
  synthetic
tttttatgtcttaatctaac

SEQ ID NO: 19948 - DNA, 20 bp, Artificial sequence
  synthetic
cttttcagataggcttaaca

SEQ ID NO: 19949 - DNA, 20 bp, Artificial sequence
  synthetic
tttcttttaaagttataaac

SEQ ID NO: 19950 - DNA, 20 bp, Artificial sequence
  synthetic
gaattttttataagtatgta

SEQ ID NO: 19951 - DNA, 20 bp, Artificial sequence
  synthetic
gaatagttgtttaaatattt

SEQ ID NO: 19952 - DNA, 20 bp, Artificial sequence
  synthetic
ctcaaggactgaattgtttt

SEQ ID NO: 19953 - DNA, 20 bp, Artificial sequence
  synthetic
tgtttctcatagataagata

SEQ ID NO: 19954 - DNA, 20 bp, Artificial sequence
  synthetic
gctcatgcctgtaatcccag

SEQ ID NO: 19955 - DNA, 20 bp, Artificial sequence
  synthetic
tattgtattaggtattaaag

SEQ ID NO: 19956 - DNA, 20 bp, Artificial sequence
  synthetic
cacatgcagactatcttttg

SEQ ID NO: 19957 - DNA, 20 bp, Artificial sequence
  synthetic
caaattcaacaaatcttcca

SEQ ID NO: 19958 - DNA, 20 bp, Artificial sequence
  synthetic
agtcaagtcagacttcatta

SEQ ID NO: 19959 - DNA, 20 bp, Artificial sequence
  synthetic
gattctcatatcatcttgta

SEQ ID NO: 19960 - DNA, 20 bp, Artificial sequence
  synthetic
ttggaaattataaaaatatt

SEQ ID NO: 19961 - DNA, 20 bp, Artificial sequence
  synthetic
gtttcaccatgttggccagg

SEQ ID NO: 19962 - DNA, 20 bp, Artificial sequence
  synthetic
ttgatcatttgcaaagtcaa

SEQ ID NO: 19963 - DNA, 20 bp, Artificial sequence
  synthetic
agggtagagtgggtgtagtg

SEQ ID NO: 19964 - DNA, 20 bp, Artificial sequence
  synthetic
gtttcacatgatataccctt

SEQ ID NO: 19965 - DNA, 20 bp, Artificial sequence
  synthetic
ttcatctgtgaaaggaaaat

SEQ ID NO: 19966 - DNA, 20 bp, Artificial sequence
  synthetic
ctactaaaaatacaaaatta

SEQ ID NO: 19967 - DNA, 20 bp, Artificial sequence
  synthetic
cagagtgagaccccatctct

SEQ ID NO: 19968 - DNA, 20 bp, Artificial sequence
  synthetic
gaatttcttcctcagcataa

SEQ ID NO: 19969 - DNA, 20 bp, Artificial sequence
  synthetic
tgaaaaacttcaccaagcta

SEQ ID NO: 19970 - DNA, 20 bp, Artificial sequence
  synthetic
aaaaaaagcaattattttta

SEQ ID NO: 19971 - DNA, 20 bp, Artificial sequence
  synthetic
ggagcctgaggtgggaggat

SEQ ID NO: 19972 - DNA, 20 bp, Artificial sequence
  synthetic
aatttctgacctcaagtgat

SEQ ID NO: 19973 - DNA, 20 bp, Artificial sequence
  synthetic
acatatggaggctcctgtca

SEQ ID NO: 19974 - DNA, 20 bp, Artificial sequence
  synthetic
caaaaccacatctaagagaa

SEQ ID NO: 19975 - DNA, 20 bp, Artificial sequence
  synthetic
ctgttaaaccaaaatatttt

SEQ ID NO: 19976 - DNA, 20 bp, Artificial sequence
  synthetic
gtgccagacactgttctgga

SEQ ID NO: 19977 - DNA, 20 bp, Artificial sequence
  synthetic
ctgaatgaaatggacatttt

SEQ ID NO: 19978 - DNA, 20 bp, Artificial sequence
  synthetic
tgccattttcctcaccagta

SEQ ID NO: 19979 - DNA, 20 bp, Artificial sequence
  synthetic
gttcccaatgtccttctagt

SEQ ID NO: 19980 - DNA, 20 bp, Artificial sequence
  synthetic
atgacagagtgagacttcat

SEQ ID NO: 19981 - DNA, 20 bp, Artificial sequence
  synthetic
ttacggcagcatacgacctg

SEQ ID NO: 19982 - DNA, 20 bp, Artificial sequence
  synthetic
tcattggaatggtaagagtt

SEQ ID NO: 19983 - DNA, 20 bp, Artificial sequence
  synthetic
aacggccagaatgaattcta

SEQ ID NO: 19984 - DNA, 20 bp, Artificial sequence
  synthetic
gagccgccagagcgatcccc

SEQ ID NO: 19985 - DNA, 20 bp, Artificial sequence
  synthetic
cgctcagccctacatccagc

SEQ ID NO: 19986 - DNA, 20 bp, Artificial sequence
  synthetic
catgaaccccgcgagcatgg

SEQ ID NO: 19987 - DNA, 20 bp, Artificial sequence
  synthetic
aaagaggccataccctggag

SEQ ID NO: 19988 - DNA, 20 bp, Artificial sequence
  synthetic
ccccacggtcaacatggggc

SEQ ID NO: 19989 - DNA, 20 bp, Artificial sequence
  synthetic
catgacccctgggagcagca

SEQ ID NO: 19990 - DNA, 20 bp, Artificial sequence
  synthetic
ccgcctggagcacaacctgg

SEQ ID NO: 19991 - DNA, 20 bp, Artificial sequence
  synthetic
actcctcaagaagcgcctcc

SEQ ID NO: 19992 - DNA, 20 bp, Artificial sequence
  synthetic
cgagctcctgtcttatctgg

SEQ ID NO: 19993 - DNA, 20 bp, Artificial sequence
  synthetic
taagccaagataccccataa

SEQ ID NO: 19994 - DNA, 20 bp, Artificial sequence
  synthetic
tggggaacagagagagcagg

SEQ ID NO: 19995 - DNA, 20 bp, Artificial sequence
  synthetic
agaaaccagagcccagggca

SEQ ID NO: 19996 - DNA, 20 bp, Artificial sequence
  synthetic
agcctaccctgcctgcactc

SEQ ID NO: 19997 - DNA, 20 bp, Artificial sequence
  synthetic
ccgtgagccacatggcctag

SEQ ID NO: 19998 - DNA, 20 bp, Artificial sequence
  synthetic
tgacttccagtcactgtccc

SEQ ID NO: 19999 - DNA, 20 bp, Artificial sequence
  synthetic
agatgccttccttaggagtt

SEQ ID NO: 20000 - DNA, 20 bp, Artificial sequence
  synthetic
gcaaccatctctgggctcag

SEQ ID NO: 20001 - DNA, 20 bp, Artificial sequence
  synthetic
tgcaagccacttttccatgc

SEQ ID NO: 20002 - DNA, 20 bp, Artificial sequence
  synthetic
tattttttaagaaactgcta

SEQ ID NO: 20003 - DNA, 20 bp, Artificial sequence
  synthetic
actgttatctttttgatgga

SEQ ID NO: 20004 - DNA, 20 bp, Artificial sequence
  synthetic
ctgtgccaggagctgttctt

SEQ ID NO: 20005 - DNA, 20 bp, Artificial sequence
  synthetic
ctaaagagcttagtttgccc

SEQ ID NO: 20006 - DNA, 20 bp, Artificial sequence
  synthetic
cgctccgccaatacaataga

SEQ ID NO: 20007 - DNA, 20 bp, Artificial sequence
  synthetic
gcttaggtatctgtgctgtg

SEQ ID NO: 20008 - DNA, 20 bp, Artificial sequence
  synthetic
aggcttggaaccagcacagc

SEQ ID NO: 20009 - DNA, 20 bp, Artificial sequence
  synthetic
ccaagtgctgttcaactcag

SEQ ID NO: 20010 - DNA, 20 bp, Artificial sequence
  synthetic
ggttgtgtagatgtggccgg

SEQ ID NO: 20011 - DNA, 20 bp, Artificial sequence
  synthetic
gcctttccagaccggagacg

SEQ ID NO: 20012 - DNA, 20 bp, Artificial sequence
  synthetic
cagccaaaacctgctaagtc

SEQ ID NO: 20013 - DNA, 20 bp, Artificial sequence
  synthetic
gtttcaagtgatcctcccgc

SEQ ID NO: 20014 - DNA, 20 bp, Artificial sequence
  synthetic
tgcccctccctccgggtgga

SEQ ID NO: 20015 - DNA, 20 bp, Artificial sequence
  synthetic
cggcgaggtgaaggccgacc

SEQ ID NO: 20016 - DNA, 20 bp, Artificial sequence
  synthetic
tcttagatctcgttttgagg

SEQ ID NO: 20017 - DNA, 20 bp, Artificial sequence
  synthetic
atcccccacagaagccccct

SEQ ID NO: 20018 - DNA, 20 bp, Artificial sequence
  synthetic
ccctgaggccggcccgcgtc

SEQ ID NO: 20019 - DNA, 20 bp, Artificial sequence
  synthetic
ctgacgggtgacgccagcgg

SEQ ID NO: 20020 - DNA, 20 bp, Artificial sequence
  synthetic
accttagacaaggaaagttt

SEQ ID NO: 20021 - DNA, 20 bp, Artificial sequence
  synthetic
ctggcagagcctgtagttgg

SEQ ID NO: 20022 - DNA, 20 bp, Artificial sequence
  synthetic
agttgtctctgatcacttgt

SEQ ID NO: 20023 - DNA, 20 bp, Artificial sequence
  synthetic
ccaaaaataatccggagaca

SEQ ID NO: 20024 - DNA, 20 bp, Artificial sequence
  synthetic
ccatttgaccagaacgtgtg

SEQ ID NO: 20025 - DNA, 20 bp, Artificial sequence
  synthetic
tcgacccagcttgaggtctc

SEQ ID NO: 20026 - DNA, 20 bp, Artificial sequence
  synthetic
gcgcgcggggcgcccccgcg

SEQ ID NO: 20027 - DNA, 20 bp, Artificial sequence
  synthetic
agctccggccccgccgttcc

SEQ ID NO: 20028 - DNA, 20 bp, Artificial sequence
  synthetic
ggctctgacgcggcgcccca

SEQ ID NO: 20029 - DNA, 20 bp, Artificial sequence
  synthetic
tctccagcttgcatggcctg

SEQ ID NO: 20030 - DNA, 20 bp, Artificial sequence
  synthetic
aggaaggaacgctcgagatt

SEQ ID NO: 20031 - DNA, 20 bp, Artificial sequence
  synthetic
cagagatcccggtcctccgg

SEQ ID NO: 20032 - DNA, 20 bp, Artificial sequence
  synthetic
gcgaaggtgtcgctgccaag

SEQ ID NO: 20033 - DNA, 20 bp, Artificial sequence
  synthetic
cgggcactgccccaggtctt

SEQ ID NO: 20034 - DNA, 20 bp, Artificial sequence
  synthetic
agattttggagcggagcgtt

SEQ ID NO: 20035 - DNA, 20 bp, Artificial sequence
  synthetic
tgctcgcgttcgcaagctcc

SEQ ID NO: 20036 - DNA, 20 bp, Artificial sequence
  synthetic
ccggggctgaggctggggct

SEQ ID NO: 20037 - DNA, 20 bp, Artificial sequence
  synthetic
cccgagcatgagcagagatc

SEQ ID NO: 20038 - DNA, 20 bp, Artificial sequence
  synthetic
cccggcttcagcggcaccgc

SEQ ID NO: 20039 - DNA, 20 bp, Artificial sequence
  synthetic
tggcaaagacacgctggctg

SEQ ID NO: 20040 - DNA, 20 bp, Artificial sequence
  synthetic
aaagaatggagaattattga

SEQ ID NO: 20041 - DNA, 20 bp, Artificial sequence
  synthetic
gctgacaccgacccaacgtc

SEQ ID NO: 20042 - DNA, 20 bp, Artificial sequence
  synthetic
aagtgtaattctggaccaat

SEQ ID NO: 20043 - DNA, 20 bp, Artificial sequence
  synthetic
agccgtagtcttggcccacg

SEQ ID NO: 20044 - DNA, 20 bp, Artificial sequence
  synthetic
gtagctcggcagccctgcca

SEQ ID NO: 20045 - DNA, 20 bp, Artificial sequence
  synthetic
aaccctacagcttggggcct

SEQ ID NO: 20046 - DNA, 20 bp, Artificial sequence
  synthetic
caggcgactgaagacgatgg

SEQ ID NO: 20047 - DNA, 20 bp, Artificial sequence
  synthetic
ggggctgtttttcaactcct

SEQ ID NO: 20048 - DNA, 20 bp, Artificial sequence
  synthetic
gtggacacaattctcacctg

SEQ ID NO: 20049 - DNA, 20 bp, Artificial sequence
  synthetic
ggagctctggaggctgggct

SEQ ID NO: 20050 - DNA, 20 bp, Artificial sequence
  synthetic
acaatgaaagtcgctgaaga

SEQ ID NO: 20051 - DNA, 20 bp, Artificial sequence
  synthetic
ggcaccaagagagtggacgc

SEQ ID NO: 20052 - DNA, 20 bp, Artificial sequence
  synthetic
tccaaggaggtggctgtgca

SEQ ID NO: 20053 - DNA, 20 bp, Artificial sequence
  synthetic
ggtggagccgcctcggcgtt

SEQ ID NO: 20054 - DNA, 20 bp, Artificial sequence
  synthetic
caaagatcaactcccactga

SEQ ID NO: 20055 - DNA, 20 bp, Artificial sequence
  synthetic
gcagaaagggacggagaaca

SEQ ID NO: 20056 - DNA, 20 bp, Artificial sequence
  synthetic
ctggtaaatccacaggaatt

SEQ ID NO: 20057 - DNA, 20 bp, Artificial sequence
  synthetic
tgtactttgacgacaagaaa

SEQ ID NO: 20058 - DNA, 20 bp, Artificial sequence
  synthetic
gcttcagtggccaaagatct

SEQ ID NO: 20059 - DNA, 20 bp, Artificial sequence
  synthetic
agagtgatggctgttttagt

SEQ ID NO: 20060 - DNA, 20 bp, Artificial sequence
  synthetic
aaaccccgagtgctataccg

SEQ ID NO: 20061 - DNA, 20 bp, Artificial sequence
  synthetic
gactgacccaccatgacacc

SEQ ID NO: 20062 - DNA, 20 bp, Artificial sequence
  synthetic
cataaactgtcagaggcagc

SEQ ID NO: 20063 - DNA, 20 bp, Artificial sequence
  synthetic
ccgctcccaaactgtacctg

SEQ ID NO: 20064 - DNA, 20 bp, Artificial sequence
  synthetic
ggtacggggagctcgcaaat

SEQ ID NO: 20065 - DNA, 20 bp, Artificial sequence
  synthetic
gtatcagttctccgtcaact

SEQ ID NO: 20066 - DNA, 20 bp, Artificial sequence
  synthetic
agcccttgtctcgggaccgc

SEQ ID NO: 20067 - DNA, 20 bp, Artificial sequence
  synthetic
aagggaggaaggagtcccag

SEQ ID NO: 20068 - DNA, 20 bp, Artificial sequence
  synthetic
gtgtattcctgggacgatgc

SEQ ID NO: 20069 - DNA, 20 bp, Artificial sequence
  synthetic
cgggcgcaccgcggccccca

SEQ ID NO: 20070 - DNA, 20 bp, Artificial sequence
  synthetic
acagcaacttttctaagacc

SEQ ID NO: 20071 - DNA, 20 bp, Artificial sequence
  synthetic
tccaagatgtccacgccctg

SEQ ID NO: 20072 - DNA, 20 bp, Artificial sequence
  synthetic
gcgagccggagaccgagccc

SEQ ID NO: 20073 - DNA, 20 bp, Artificial sequence
  synthetic
acctgatttgtgaacctatc

SEQ ID NO: 20074 - DNA, 20 bp, Artificial sequence
  synthetic
agtttcgatgctgccggcgc

SEQ ID NO: 20075 - DNA, 20 bp, Artificial sequence
  synthetic
acccttaccggcacccggcc

SEQ ID NO: 20076 - DNA, 20 bp, Artificial sequence
  synthetic
cgcttccattgtcagaatgg

SEQ ID NO: 20077 - DNA, 20 bp, Artificial sequence
  synthetic
actggtgctgactgcaacca

SEQ ID NO: 20078 - DNA, 20 bp, Artificial sequence
  synthetic
gggctgtttggaaagaccca

SEQ ID NO: 20079 - DNA, 20 bp, Artificial sequence
  synthetic
attgccagtacctgcctcca

SEQ ID NO: 20080 - DNA, 20 bp, Artificial sequence
  synthetic
gtcggagcccgggcgggcga

SEQ ID NO: 20081 - DNA, 20 bp, Artificial sequence
  synthetic
tcggattgctcaaggaccca

SEQ ID NO: 20082 - DNA, 20 bp, Artificial sequence
  synthetic
agaccacccagcccagccaa

SEQ ID NO: 20083 - DNA, 20 bp, Artificial sequence
  synthetic
cggggccctggaagctccta

SEQ ID NO: 20084 - DNA, 20 bp, Artificial sequence
  synthetic
aagatcctgatcctcctgct

SEQ ID NO: 20085 - DNA, 20 bp, Artificial sequence
  synthetic
ccccttcatgggactcccaa

SEQ ID NO: 20086 - DNA, 20 bp, Artificial sequence
  synthetic
ggttgctgacaccctgtgcc

SEQ ID NO: 20087 - DNA, 20 bp, Artificial sequence
  synthetic
tctagccggaacctgggggc

SEQ ID NO: 20088 - DNA, 20 bp, Artificial sequence
  synthetic
cggggcgaccctgcagtggc

SEQ ID NO: 20089 - DNA, 20 bp, Artificial sequence
  synthetic
tcctgctcccccccacaccg

SEQ ID NO: 20090 - DNA, 20 bp, Artificial sequence
  synthetic
ttcgcctagcgcgtgctcag

SEQ ID NO: 20091 - DNA, 20 bp, Artificial sequence
  synthetic
gagcctggggaaactattat

SEQ ID NO: 20092 - DNA, 20 bp, Artificial sequence
  synthetic
accgatcccagggctgtggt

SEQ ID NO: 20093 - DNA, 20 bp, Artificial sequence
  synthetic
aacgtagagaaatcctttca

SEQ ID NO: 20094 - DNA, 20 bp, Artificial sequence
  synthetic
gtggggccgctgccggctcc

SEQ ID NO: 20095 - DNA, 20 bp, Artificial sequence
  synthetic
actgcctctgcctccaagct

SEQ ID NO: 20096 - DNA, 20 bp, Artificial sequence
  synthetic
tggtggccctcctggtggcc

SEQ ID NO: 20097 - DNA, 20 bp, Artificial sequence
  synthetic
cccgggagatcggggctggg

SEQ ID NO: 20098 - DNA, 20 bp, Artificial sequence
  synthetic
agaaaagcaggtggaaggag

SEQ ID NO: 20099 - DNA, 20 bp, Artificial sequence
  synthetic
aggaagcggatgccgtgggg

SEQ ID NO: 20100 - DNA, 20 bp, Artificial sequence
  synthetic
gtggacagctcacctagcgg

SEQ ID NO: 20101 - DNA, 20 bp, Artificial sequence
  synthetic
gcacgcaccgcgccaggcca

SEQ ID NO: 20102 - DNA, 20 bp, Artificial sequence
  synthetic
atccattccccctcagatct

SEQ ID NO: 20103 - DNA, 20 bp, Artificial sequence
  synthetic
gggcttggcgcggcggccag

SEQ ID NO: 20104 - DNA, 20 bp, Artificial sequence
  synthetic
tcccctccgggttttcacac

SEQ ID NO: 20105 - DNA, 20 bp, Artificial sequence
  synthetic
gagagcgtctaccccgaact

SEQ ID NO: 20106 - DNA, 20 bp, Artificial sequence
  synthetic
ccgccgccgccgccgcctcc

SEQ ID NO: 20107 - DNA, 20 bp, Artificial sequence
  synthetic
tcccgtctctccgtctcgac

SEQ ID NO: 20108 - DNA, 20 bp, Artificial sequence
  synthetic
ggcgccgcccgcctgctgcc

SEQ ID NO: 20109 - DNA, 20 bp, Artificial sequence
  synthetic
ggcagggaagctgagggccc

SEQ ID NO: 20110 - DNA, 20 bp, Artificial sequence
  synthetic
ctgggtgagtagccgggaac

SEQ ID NO: 20111 - DNA, 20 bp, Artificial sequence
  synthetic
agggccccaacccagaacga

SEQ ID NO: 20112 - DNA, 20 bp, Artificial sequence
  synthetic
attggaaatatgctacagat

SEQ ID NO: 20113 - DNA, 20 bp, Artificial sequence
  synthetic
gttttcaaaggagcattctt

SEQ ID NO: 20114 - DNA, 20 bp, Artificial sequence
  synthetic
ttcacctgtggattcgtcag

SEQ ID NO: 20115 - DNA, 20 bp, Artificial sequence
  synthetic
gattttggaagaaacgaatt

SEQ ID NO: 20116 - DNA, 20 bp, Artificial sequence
  synthetic
cacagagaatgctctgcacc

SEQ ID NO: 20117 - DNA, 20 bp, Artificial sequence
  synthetic
cgaagaaggtgagcgcagtg

SEQ ID NO: 20118 - DNA, 20 bp, Artificial sequence
  synthetic
gaggcgcagggaacctggag

SEQ ID NO: 20119 - DNA, 20 bp, Artificial sequence
  synthetic
catctcagtcctgacatcgc

SEQ ID NO: 20120 - DNA, 20 bp, Artificial sequence
  synthetic
acagagatcaatgcattttc

SEQ ID NO: 20121 - DNA, 20 bp, Artificial sequence
  synthetic
aggcactgcgggttttgcag

SEQ ID NO: 20122 - DNA, 20 bp, Artificial sequence
  synthetic
ccacatgcttccattgcttg

SEQ ID NO: 20123 - DNA, 20 bp, Artificial sequence
  synthetic
ctcccaggccgatacagtgc

SEQ ID NO: 20124 - DNA, 20 bp, Artificial sequence
  synthetic
ggttctccagcttcttgtcc

SEQ ID NO: 20125 - DNA, 20 bp, Artificial sequence
  synthetic
gtcgcgaggacttctaccgc

SEQ ID NO: 20126 - DNA, 20 bp, Artificial sequence
  synthetic
cacgtcgggagggtccgggc

SEQ ID NO: 20127 - DNA, 20 bp, Artificial sequence
  synthetic
gggtccccgagggcgctgcg

SEQ ID NO: 20128 - DNA, 20 bp, Artificial sequence
  synthetic
attccaagataaataggatt

SEQ ID NO: 20129 - DNA, 20 bp, Artificial sequence
  synthetic
caggctgccacacacgcact

SEQ ID NO: 20130 - DNA, 20 bp, Artificial sequence
  synthetic
gagccagagattcgagccgg

SEQ ID NO: 20131 - DNA, 20 bp, Artificial sequence
  synthetic
tacacgtggatgtgaaatga

SEQ ID NO: 20132 - DNA, 20 bp, Artificial sequence
  synthetic
aggagctccaggcccgtcgg

SEQ ID NO: 20133 - DNA, 20 bp, Artificial sequence
  synthetic
caccccctattttactgcag

SEQ ID NO: 20134 - DNA, 20 bp, Artificial sequence
  synthetic
gccccaactgctcttcccgc

SEQ ID NO: 20135 - DNA, 20 bp, Artificial sequence
  synthetic
gcccctcccacgagcccaag

SEQ ID NO: 20136 - DNA, 20 bp, Artificial sequence
  synthetic
agccagcagcagccggcggg

SEQ ID NO: 20137 - DNA, 20 bp, Artificial sequence
  synthetic
ggcagaagtacaagcgcagg

SEQ ID NO: 20138 - DNA, 20 bp, Artificial sequence
  synthetic
agtgaacaaaactttaatgt

SEQ ID NO: 20139 - DNA, 20 bp, Artificial sequence
  synthetic
taacctgctgcagttctgac

SEQ ID NO: 20140 - DNA, 20 bp, Artificial sequence
  synthetic
ccggtggcttcctcacctcc

SEQ ID NO: 20141 - DNA, 20 bp, Artificial sequence
  synthetic
atgagctgctccagtacatc

SEQ ID NO: 20142 - DNA, 20 bp, Artificial sequence
  synthetic
ttcttccggggttggtggcg

SEQ ID NO: 20143 - DNA, 20 bp, Artificial sequence
  synthetic
gacttcccttcccaaggact

SEQ ID NO: 20144 - DNA, 20 bp, Artificial sequence
  synthetic
gaactggggcctgggggatg

SEQ ID NO: 20145 - DNA, 20 bp, Artificial sequence
  synthetic
ggacgagcttgggcttagcg

SEQ ID NO: 20146 - DNA, 20 bp, Artificial sequence
  synthetic
aaagatggacaaacagagat

SEQ ID NO: 20147 - DNA, 20 bp, Artificial sequence
  synthetic
gctccagctgctttccaaaa

SEQ ID NO: 20148 - DNA, 20 bp, Artificial sequence
  synthetic
ctgcctggagtggagctgag

SEQ ID NO: 20149 - DNA, 20 bp, Artificial sequence
  synthetic
aggaaggaggaaacctggaa

SEQ ID NO: 20150 - DNA, 20 bp, Artificial sequence
  synthetic
agatgtggagccttgtcacc

SEQ ID NO: 20151 - DNA, 20 bp, Artificial sequence
  synthetic
ccgagacagctgcgcgggcg

SEQ ID NO: 20152 - DNA, 20 bp, Artificial sequence
  synthetic
aattctttctctgggtcatc

SEQ ID NO: 20153 - DNA, 20 bp, Artificial sequence
  synthetic
agaggggtgtcctgaaggtc

SEQ ID NO: 20154 - DNA, 20 bp, Artificial sequence
  synthetic
tccgagttgtcggaggaagg

SEQ ID NO: 20155 - DNA, 20 bp, Artificial sequence
  synthetic
gccagggcgcgcgtgcgcgg

SEQ ID NO: 20156 - DNA, 20 bp, Artificial sequence
  synthetic
ggccctcgccccctcctccc

SEQ ID NO: 20157 - DNA, 20 bp, Artificial sequence
  synthetic
tcgcatcgagcagtttccag

SEQ ID NO: 20158 - DNA, 20 bp, Artificial sequence
  synthetic
gcatccctaaaagcttcggc

SEQ ID NO: 20159 - DNA, 20 bp, Artificial sequence
  synthetic
atcagtcactcagccagggt

SEQ ID NO: 20160 - DNA, 20 bp, Artificial sequence
  synthetic
caagctgcgcgcccacgagc

SEQ ID NO: 20161 - DNA, 20 bp, Artificial sequence
  synthetic
ccggtgcacggcggctggcg

SEQ ID NO: 20162 - DNA, 20 bp, Artificial sequence
  synthetic
ggatggagctgaactttggg

SEQ ID NO: 20163 - DNA, 20 bp, Artificial sequence
  synthetic
caggattccttctggaactg

SEQ ID NO: 20164 - DNA, 20 bp, Artificial sequence
  synthetic
ctgccgccgccgaagctgga

SEQ ID NO: 20165 - DNA, 20 bp, Artificial sequence
  synthetic
aggctcgcgctctgcctgct

SEQ ID NO: 20166 - DNA, 20 bp, Artificial sequence
  synthetic
tatgaaaaggcctagtaagt

SEQ ID NO: 20167 - DNA, 20 bp, Artificial sequence
  synthetic
ggaaaggaacctcctccctg

SEQ ID NO: 20168 - DNA, 20 bp, Artificial sequence
  synthetic
aactcttgtttccaagctta

SEQ ID NO: 20169 - DNA, 20 bp, Artificial sequence
  synthetic
ggcagaattccttcctttag

SEQ ID NO: 20170 - DNA, 20 bp, Artificial sequence
  synthetic
aaacttggctcagcccactc

SEQ ID NO: 20171 - DNA, 20 bp, Artificial sequence
  synthetic
ggtctgtgatttcgaggcag

SEQ ID NO: 20172 - DNA, 20 bp, Artificial sequence
  synthetic
gaagcaagcaagcaaggaag

SEQ ID NO: 20173 - DNA, 20 bp, Artificial sequence
  synthetic
tgactattggtgttcctgtt

SEQ ID NO: 20174 - DNA, 20 bp, Artificial sequence
  synthetic
agcagccgctgtctccagtg

SEQ ID NO: 20175 - DNA, 20 bp, Artificial sequence
  synthetic
tggcatagtgagtttggagt

SEQ ID NO: 20176 - DNA, 20 bp, Artificial sequence
  synthetic
atttccgaagctcctgctca

SEQ ID NO: 20177 - DNA, 20 bp, Artificial sequence
  synthetic
ccagacttgaagccacacag

SEQ ID NO: 20178 - DNA, 20 bp, Artificial sequence
  synthetic
gagctgcctgacagtgacaa

SEQ ID NO: 20179 - DNA, 20 bp, Artificial sequence
  synthetic
tatgcctggataaggaggat

SEQ ID NO: 20180 - DNA, 20 bp, Artificial sequence
  synthetic
gctgagaagagggtgcagaa

SEQ ID NO: 20181 - DNA, 20 bp, Artificial sequence
  synthetic
gagaccgagccaaactcctg

SEQ ID NO: 20182 - DNA, 20 bp, Artificial sequence
  synthetic
acaatctctggacaaaattt

SEQ ID NO: 20183 - DNA, 20 bp, Artificial sequence
  synthetic
ccaattataccccgttggag

SEQ ID NO: 20184 - DNA, 20 bp, Artificial sequence
  synthetic
tcgctgggactcggaagtgc

SEQ ID NO: 20185 - DNA, 20 bp, Artificial sequence
  synthetic
gtgcgcacccactcgtaact

SEQ ID NO: 20186 - DNA, 20 bp, Artificial sequence
  synthetic
tgagagagggtcttagcagg

SEQ ID NO: 20187 - DNA, 20 bp, Artificial sequence
  synthetic
cgtcttgggtttggctccca

SEQ ID NO: 20188 - DNA, 20 bp, Artificial sequence
  synthetic
ttaaacgcgtagcattcctg

SEQ ID NO: 20189 - DNA, 20 bp, Artificial sequence
  synthetic
agtgctcccagtaaccttcc

SEQ ID NO: 20190 - DNA, 20 bp, Artificial sequence
  synthetic
ccgcggcgtggaggcaggga

SEQ ID NO: 20191 - DNA, 20 bp, Artificial sequence
  synthetic
tgggagggcggagggcgggg

SEQ ID NO: 20192 - DNA, 20 bp, Artificial sequence
  synthetic
aggagctggcctatcactac

SEQ ID NO: 20193 - DNA, 20 bp, Artificial sequence
  synthetic
cagataatgagaggaaatgc

SEQ ID NO: 20194 - DNA, 20 bp, Artificial sequence
  synthetic
gcatgcactgctgagcccga

SEQ ID NO: 20195 - DNA, 20 bp, Artificial sequence
  synthetic
ctctccgatgactttgccca

SEQ ID NO: 20196 - DNA, 20 bp, Artificial sequence
  synthetic
aggccctgccacccaccttc

SEQ ID NO: 20197 - DNA, 20 bp, Artificial sequence
  synthetic
cccatcccggctgcttttgc

SEQ ID NO: 20198 - DNA, 20 bp, Artificial sequence
  synthetic
cttcaagcccagcgagcatg

SEQ ID NO: 20199 - DNA, 20 bp, Artificial sequence
  synthetic
gccgaagcaggagccggcgg

SEQ ID NO: 20200 - DNA, 20 bp, Artificial sequence
  synthetic
tgtctgagcagtggaatgtg

SEQ ID NO: 20201 - DNA, 20 bp, Artificial sequence
  synthetic
atggaagaagttagctgtag

SEQ ID NO: 20202 - DNA, 20 bp, Artificial sequence
  synthetic
cagagctcagcttggtcccg

SEQ ID NO: 20203 - DNA, 20 bp, Artificial sequence
  synthetic
ggaggaggagccgccgccac

SEQ ID NO: 20204 - DNA, 20 bp, Artificial sequence
  synthetic
tcctcaaagcttctcgccat

SEQ ID NO: 20205 - DNA, 20 bp, Artificial sequence
  synthetic
ggctccgtccgctccctgga

SEQ ID NO: 20206 - DNA, 20 bp, Artificial sequence
  synthetic
tctttatatcctgacactat

SEQ ID NO: 20207 - DNA, 20 bp, Artificial sequence
  synthetic
ctttgcagcagatgtgtgac

SEQ ID NO: 20208 - DNA, 20 bp, Artificial sequence
  synthetic
cgctcccgtgcagacccgtg

SEQ ID NO: 20209 - DNA, 20 bp, Artificial sequence
  synthetic
agcggttattgagcattcgc

SEQ ID NO: 20210 - DNA, 20 bp, Artificial sequence
  synthetic
aagttctgagccccacaggt

SEQ ID NO: 20211 - DNA, 20 bp, Artificial sequence
  synthetic
atccccatagtgctgggtta

SEQ ID NO: 20212 - DNA, 20 bp, Artificial sequence
  synthetic
cccccacaggcagagctgac

SEQ ID NO: 20213 - DNA, 20 bp, Artificial sequence
  synthetic
cccacggaagccagttccaa

SEQ ID NO: 20214 - DNA, 20 bp, Artificial sequence
  synthetic
gttctctccatcgccttgtc

SEQ ID NO: 20215 - DNA, 20 bp, Artificial sequence
  synthetic
gcaaaaaaccgaatcttcag

SEQ ID NO: 20216 - DNA, 20 bp, Artificial sequence
  synthetic
acaagattattgatggcgcc

SEQ ID NO: 20217 - DNA, 20 bp, Artificial sequence
  synthetic
ccaggctggagtgcagtggt

SEQ ID NO: 20218 - DNA, 20 bp, Artificial sequence
  synthetic
tgcggggtgagaggccaggg

SEQ ID NO: 20219 - DNA, 20 bp, Artificial sequence
  synthetic
aggagggaggacagaggcca

SEQ ID NO: 20220 - DNA, 20 bp, Artificial sequence
  synthetic
aacaagtcaactaaggggtt

SEQ ID NO: 20221 - DNA, 20 bp, Artificial sequence
  synthetic
gtaggtttgctgtggaacgt

SEQ ID NO: 20222 - DNA, 20 bp, Artificial sequence
  synthetic
gtggcccagcctgctgagaa

SEQ ID NO: 20223 - DNA, 20 bp, Artificial sequence
  synthetic
acaggtgaaaattctggatc

SEQ ID NO: 20224 - DNA, 20 bp, Artificial sequence
  synthetic
ttcgtcagctgacaaagaca

SEQ ID NO: 20225 - DNA, 20 bp, Artificial sequence
  synthetic
ggaaggagacatcgaagcag

SEQ ID NO: 20226 - DNA, 20 bp, Artificial sequence
  synthetic
caggggacagggagagcaag

SEQ ID NO: 20227 - DNA, 20 bp, Artificial sequence
  synthetic
cacaggggcccccatgtagt

SEQ ID NO: 20228 - DNA, 20 bp, Artificial sequence
  synthetic
atccaggagtacaactcgaa

SEQ ID NO: 20229 - DNA, 20 bp, Artificial sequence
  synthetic
acctggaagagcggaagaag

SEQ ID NO: 20230 - DNA, 20 bp, Artificial sequence
  synthetic
actcctggcctcaagtgatc

SEQ ID NO: 20231 - DNA, 20 bp, Artificial sequence
  synthetic
ttggaagctggctcaagtac

SEQ ID NO: 20232 - DNA, 20 bp, Artificial sequence
  synthetic
tcaccacctgaaccacgggc

SEQ ID NO: 20233 - DNA, 20 bp, Artificial sequence
  synthetic
gccaggaggcgcctgagatt

SEQ ID NO: 20234 - DNA, 20 bp, Artificial sequence
  synthetic
atccagcacatgcacattga

SEQ ID NO: 20235 - DNA, 20 bp, Artificial sequence
  synthetic
tgctctcagccaaccgcctc

SEQ ID NO: 20236 - DNA, 20 bp, Artificial sequence
  synthetic
gccaggccacccgggactac

SEQ ID NO: 20237 - DNA, 20 bp, Artificial sequence
  synthetic
gaagaaaggtgcatggctgc

SEQ ID NO: 20238 - DNA, 20 bp, Artificial sequence
  synthetic
tgcaatcgcatctttgtaat

SEQ ID NO: 20239 - DNA, 20 bp, Artificial sequence
  synthetic
gagccaggagtccggggtcg

SEQ ID NO: 20240 - DNA, 20 bp, Artificial sequence
  synthetic
agaaaaggactctctggaac

SEQ ID NO: 20241 - DNA, 20 bp, Artificial sequence
  synthetic
gcggcggcggcatcagtcga

SEQ ID NO: 20242 - DNA, 20 bp, Artificial sequence
  synthetic
caggaggcttccgaccccac

SEQ ID NO: 20243 - DNA, 20 bp, Artificial sequence
  synthetic
cccaggctggagtgcagtgg

SEQ ID NO: 20244 - DNA, 20 bp, Artificial sequence
  synthetic
cctaggctggagtgcattgg

SEQ ID NO: 20245 - DNA, 20 bp, Artificial sequence
  synthetic
cgtcagtgcgcgctggcgca

SEQ ID NO: 20246 - DNA, 20 bp, Artificial sequence
  synthetic
cgcgcggcaggcgcggccat

SEQ ID NO: 20247 - DNA, 20 bp, Artificial sequence
  synthetic
gcaggccaggggcactgtga

SEQ ID NO: 20248 - DNA, 20 bp, Artificial sequence
  synthetic
ggggaccctcagccttgggg

SEQ ID NO: 20249 - DNA, 20 bp, Artificial sequence
  synthetic
tcctccttaccccgcctccc

SEQ ID NO: 20250 - DNA, 20 bp, Artificial sequence
  synthetic
gagaggcatgggcacgtggc

SEQ ID NO: 20251 - DNA, 20 bp, Artificial sequence
  synthetic
ggtggtgaggcaggctcgcc

SEQ ID NO: 20252 - DNA, 20 bp, Artificial sequence
  synthetic
cccgagcggcagccccaacc

SEQ ID NO: 20253 - DNA, 20 bp, Artificial sequence
  synthetic
ccgtcggccgcggtgaatcc

SEQ ID NO: 20254 - DNA, 20 bp, Artificial sequence
  synthetic
ctctggaggaagactggagc

SEQ ID NO: 20255 - DNA, 20 bp, Artificial sequence
  synthetic
gacagattgtccgggcaaac

SEQ ID NO: 20256 - DNA, 20 bp, Artificial sequence
  synthetic
agacacacacactcttggag

SEQ ID NO: 20257 - DNA, 20 bp, Artificial sequence
  synthetic
gaatcacatttcagcatgag

SEQ ID NO: 20258 - DNA, 20 bp, Artificial sequence
  synthetic
ggctggagcttccgggccct

SEQ ID NO: 20259 - DNA, 20 bp, Artificial sequence
  synthetic
tccatcgtgtgggaagaacg

SEQ ID NO: 20260 - DNA, 20 bp, Artificial sequence
  synthetic
cacccttctcccctcagaga

SEQ ID NO: 20261 - DNA, 20 bp, Artificial sequence
  synthetic
aagctcccggcgtctgcacc

SEQ ID NO: 20262 - DNA, 20 bp, Artificial sequence
  synthetic
gggggagggcgtcgcgggca

SEQ ID NO: 20263 - DNA, 20 bp, Artificial sequence
  synthetic
gggccgctggaccccgttgc

SEQ ID NO: 20264 - DNA, 20 bp, Artificial sequence
  synthetic
cccatctcgggcagaggctg

SEQ ID NO: 20265 - DNA, 20 bp, Artificial sequence
  synthetic
tgggctcagtaaggtcctcc

SEQ ID NO: 20266 - DNA, 20 bp, Artificial sequence
  synthetic
cgccgggcactgctgatgct

SEQ ID NO: 20267 - DNA, 20 bp, Artificial sequence
  synthetic
ataaagggggaagactttaa

SEQ ID NO: 20268 - DNA, 20 bp, Artificial sequence
  synthetic
tttaaaacagtttttgttaa

SEQ ID NO: 20269 - DNA, 20 bp, Artificial sequence
  synthetic
ccggttgtcttcctgtcggt

SEQ ID NO: 20270 - DNA, 20 bp, Artificial sequence
  synthetic
ctcatgtgccggcaccgggc

SEQ ID NO: 20271 - DNA, 20 bp, Artificial sequence
  synthetic
gttggctcgccgctctttgc

SEQ ID NO: 20272 - DNA, 20 bp, Artificial sequence
  synthetic
atcgatggacgcattcagaa

SEQ ID NO: 20273 - DNA, 20 bp, Artificial sequence
  synthetic
atccctccagagcattcaaa

SEQ ID NO: 20274 - DNA, 20 bp, Artificial sequence
  synthetic
tgagtggatgtgattggcga

SEQ ID NO: 20275 - DNA, 20 bp, Artificial sequence
  synthetic
aggcaccgtgatgtggagtc

SEQ ID NO: 20276 - DNA, 20 bp, Artificial sequence
  synthetic
cacggggctgcgtggaaaga

SEQ ID NO: 20277 - DNA, 20 bp, Artificial sequence
  synthetic
ctgggaggtctcctcccacc

SEQ ID NO: 20278 - DNA, 20 bp, Artificial sequence
  synthetic
gagtcctcgcgtgaaataag

SEQ ID NO: 20279 - DNA, 20 bp, Artificial sequence
  synthetic
gtaaattaccataaagcctc

SEQ ID NO: 20280 - DNA, 20 bp, Artificial sequence
  synthetic
ccatcctctgggtgaggagc

SEQ ID NO: 20281 - DNA, 20 bp, Artificial sequence
  synthetic
gcacggatgctgagcagaga

SEQ ID NO: 20282 - DNA, 20 bp, Artificial sequence
  synthetic
tcgttgtggctccttgggct

SEQ ID NO: 20283 - DNA, 20 bp, Artificial sequence
  synthetic
ccagggcctggagacccgtg

SEQ ID NO: 20284 - DNA, 20 bp, Artificial sequence
  synthetic
agagagattccctgctctcc

SEQ ID NO: 20285 - DNA, 20 bp, Artificial sequence
  synthetic
ggagctgcaaaagctgggga

SEQ ID NO: 20286 - DNA, 20 bp, Artificial sequence
  synthetic
gcctcatgcctctgacaacc

SEQ ID NO: 20287 - DNA, 20 bp, Artificial sequence
  synthetic
cgatcgcccagggccccgga

SEQ ID NO: 20288 - DNA, 20 bp, Artificial sequence
  synthetic
gcgagaagcagtcgggtttg

SEQ ID NO: 20289 - DNA, 20 bp, Artificial sequence
  synthetic
gctgcctctcccgtggtctg

SEQ ID NO: 20290 - DNA, 20 bp, Artificial sequence
  synthetic
cgtttcctgggtggctcccc

SEQ ID NO: 20291 - DNA, 20 bp, Artificial sequence
  synthetic
gtccacaatggaaggcttct

SEQ ID NO: 20292 - DNA, 20 bp, Artificial sequence
  synthetic
cggagagcgtagcgcggcct

SEQ ID NO: 20293 - DNA, 20 bp, Artificial sequence
  synthetic
gatgtaaatggaccaaaagt

SEQ ID NO: 20294 - DNA, 20 bp, Artificial sequence
  synthetic
acccaggcttcacacatttg

SEQ ID NO: 20295 - DNA, 20 bp, Artificial sequence
  synthetic
aacttgacaactttcctttc

SEQ ID NO: 20296 - DNA, 20 bp, Artificial sequence
  synthetic
ggggaccatgcagcggagcc

SEQ ID NO: 20297 - DNA, 20 bp, Artificial sequence
  synthetic
tcaccaacagatgaagacag

SEQ ID NO: 20298 - DNA, 20 bp, Artificial sequence
  synthetic
ctgcctttctcctcccgttg

SEQ ID NO: 20299 - DNA, 20 bp, Artificial sequence
  synthetic
tatgtaagaaggatggggca

SEQ ID NO: 20300 - DNA, 20 bp, Artificial sequence
  synthetic
ggcaagggtccacccagcca

SEQ ID NO: 20301 - DNA, 20 bp, Artificial sequence
  synthetic
aactccaattgctccagttc

SEQ ID NO: 20302 - DNA, 20 bp, Artificial sequence
  synthetic
gaagtaaaatagaaagaaga

SEQ ID NO: 20303 - DNA, 20 bp, Artificial sequence
  synthetic
tgctgcccttctgaggcctg

SEQ ID NO: 20304 - DNA, 20 bp, Artificial sequence
  synthetic
cggggccggaagacaggtgc

SEQ ID NO: 20305 - DNA, 20 bp, Artificial sequence
  synthetic
ccgcccccagacacgccggg

SEQ ID NO: 20306 - DNA, 20 bp, Artificial sequence
  synthetic
ggcggcgatggcggtcgggg

SEQ ID NO: 20307 - DNA, 20 bp, Artificial sequence
  synthetic
tcgccgtcttccagcgcaag

SEQ ID NO: 20308 - DNA, 20 bp, Artificial sequence
  synthetic
actgggcaaggcggtggtgg

SEQ ID NO: 20309 - DNA, 20 bp, Artificial sequence
  synthetic
acccgagttacctgtagtca

SEQ ID NO: 20310 - DNA, 20 bp, Artificial sequence
  synthetic
taaagaagcagccccgccct

SEQ ID NO: 20311 - DNA, 20 bp, Artificial sequence
  synthetic
gccccaactgcaccatccct

SEQ ID NO: 20312 - DNA, 20 bp, Artificial sequence
  synthetic
agggtccccgtggccccgag

SEQ ID NO: 20313 - DNA, 20 bp, Artificial sequence
  synthetic
acaaaagaaagaacgtcttc

SEQ ID NO: 20314 - DNA, 20 bp, Artificial sequence
  synthetic
ggcctgacctcagttgttcc

SEQ ID NO: 20315 - DNA, 20 bp, Artificial sequence
  synthetic
cgggaccgggggggatagat

SEQ ID NO: 20316 - DNA, 20 bp, Artificial sequence
  synthetic
tcacttctcgccggagtgtg

SEQ ID NO: 20317 - DNA, 20 bp, Artificial sequence
  synthetic
ttgggccctctgctcctctg

SEQ ID NO: 20318 - DNA, 20 bp, Artificial sequence
  synthetic
tgcccgggtcaccagtcggg

SEQ ID NO: 20319 - DNA, 20 bp, Artificial sequence
  synthetic
tgggctgggaacccgcggtg

SEQ ID NO: 20320 - DNA, 20 bp, Artificial sequence
  synthetic
tggctcggagactcctgcct

SEQ ID NO: 20321 - DNA, 20 bp, Artificial sequence
  synthetic
gtgcttccactgataacata

SEQ ID NO: 20322 - DNA, 20 bp, Artificial sequence
  synthetic
attacaggcctttgagccca

SEQ ID NO: 20323 - DNA, 20 bp, Artificial sequence
  synthetic
ctgttgctttgtaaaaatgc

SEQ ID NO: 20324 - DNA, 20 bp, Artificial sequence
  synthetic
gaactgcccagggaccatcc

SEQ ID NO: 20325 - DNA, 20 bp, Artificial sequence
  synthetic
cgctcttgttgcccaggctg

SEQ ID NO: 20326 - DNA, 20 bp, Artificial sequence
  synthetic
ccggcgactgcagcttcccc

SEQ ID NO: 20327 - DNA, 20 bp, Artificial sequence
  synthetic
ggagtttcttggtcacagga

SEQ ID NO: 20328 - DNA, 20 bp, Artificial sequence
  synthetic
ccaaggtggagaaaccagga

SEQ ID NO: 20329 - DNA, 20 bp, Artificial sequence
  synthetic
ggaatggccaaatatcaaga

SEQ ID NO: 20330 - DNA, 20 bp, Artificial sequence
  synthetic
ggtttctttcactacttatc

SEQ ID NO: 20331 - DNA, 20 bp, Artificial sequence
  synthetic
aggggtgaggcggtgtctcc

SEQ ID NO: 20332 - DNA, 20 bp, Artificial sequence
  synthetic
agaacactaccgttcaagag

SEQ ID NO: 20333 - DNA, 20 bp, Artificial sequence
  synthetic
tgtcccatgacgctctggga

SEQ ID NO: 20334 - DNA, 20 bp, Artificial sequence
  synthetic
tttccttaccaatcggctgc

SEQ ID NO: 20335 - DNA, 20 bp, Artificial sequence
  synthetic
cgtccgttccctaagcagac

SEQ ID NO: 20336 - DNA, 20 bp, Artificial sequence
  synthetic
ggctagtgcaaggatcagat

SEQ ID NO: 20337 - DNA, 20 bp, Artificial sequence
  synthetic
aacctggatctggagccggg

SEQ ID NO: 20338 - DNA, 20 bp, Artificial sequence
  synthetic
ccaggccccgcagcccatgg

SEQ ID NO: 20339 - DNA, 20 bp, Artificial sequence
  synthetic
cccggagcctctccctgggc

SEQ ID NO: 20340 - DNA, 20 bp, Artificial sequence
  synthetic
gtgggtcgctgatttcttgg

SEQ ID NO: 20341 - DNA, 20 bp, Artificial sequence
  synthetic
ctgcaccctccacctcccgc

SEQ ID NO: 20342 - DNA, 20 bp, Artificial sequence
  synthetic
gtacggcttgcggcttaagc

SEQ ID NO: 20343 - DNA, 20 bp, Artificial sequence
  synthetic
catgtctgtgttctggctcc

SEQ ID NO: 20344 - DNA, 20 bp, Artificial sequence
  synthetic
cctgcatcctcctctgctca

SEQ ID NO: 20345 - DNA, 20 bp, Artificial sequence
  synthetic
atggcggcgctggcagcagc

SEQ ID NO: 20346 - DNA, 20 bp, Artificial sequence
  synthetic
ttccctcaccaggaacccag

SEQ ID NO: 20347 - DNA, 20 bp, Artificial sequence
  synthetic
atgagatgaagtgagtttcc

SEQ ID NO: 20348 - DNA, 20 bp, Artificial sequence
  synthetic
catcttcacctccacaatcg

SEQ ID NO: 20349 - DNA, 20 bp, Artificial sequence
  synthetic
agtcgggggagtcgtaaaca

SEQ ID NO: 20350 - DNA, 20 bp, Artificial sequence
  synthetic
gaggaggtgagcgccaggtc

SEQ ID NO: 20351 - DNA, 20 bp, Artificial sequence
  synthetic
acaaccaccgccacctccta

SEQ ID NO: 20352 - DNA, 20 bp, Artificial sequence
  synthetic
agagttcagagagggggtgt

SEQ ID NO: 20353 - DNA, 20 bp, Artificial sequence
  synthetic
tcttgctgagcacattgaaa

SEQ ID NO: 20354 - DNA, 20 bp, Artificial sequence
  synthetic
gcggccctgcgcccccagcc

SEQ ID NO: 20355 - DNA, 20 bp, Artificial sequence
  synthetic
ctctggctacactgaaaggc

SEQ ID NO: 20356 - DNA, 20 bp, Artificial sequence
  synthetic
gaagataaatgttactcctc

SEQ ID NO: 20357 - DNA, 20 bp, Artificial sequence
  synthetic
cgcgatgggcctcttggaac

SEQ ID NO: 20358 - DNA, 20 bp, Artificial sequence
  synthetic
cccgccgatcaggttccttt

SEQ ID NO: 20359 - DNA, 20 bp, Artificial sequence
  synthetic
acggaggcttcgcgggaaga

SEQ ID NO: 20360 - DNA, 20 bp, Artificial sequence
  synthetic
ctctctctgccaccatttcg

SEQ ID NO: 20361 - DNA, 20 bp, Artificial sequence
  synthetic
tagggcgtggtgcttgctcc

SEQ ID NO: 20362 - DNA, 20 bp, Artificial sequence
  synthetic
tcattatacctctttatcca

SEQ ID NO: 20363 - DNA, 20 bp, Artificial sequence
  synthetic
gctgaactccctgaggtctc

SEQ ID NO: 20364 - DNA, 20 bp, Artificial sequence
  synthetic
agatccacttcttcctagcc

SEQ ID NO: 20365 - DNA, 20 bp, Artificial sequence
  synthetic
ccgttgcccggccctctccc

SEQ ID NO: 20366 - DNA, 20 bp, Artificial sequence
  synthetic
tccgccgcccgccccgaccc

SEQ ID NO: 20367 - DNA, 20 bp, Artificial sequence
  synthetic
cagggcaagctccccgtctc

SEQ ID NO: 20368 - DNA, 20 bp, Artificial sequence
  synthetic
tggccgctgcacaagaacct

SEQ ID NO: 20369 - DNA, 20 bp, Artificial sequence
  synthetic
aggcattgaggaactcaatc

SEQ ID NO: 20370 - DNA, 20 bp, Artificial sequence
  synthetic
aaatcgatcctcctaccttg

SEQ ID NO: 20371 - DNA, 20 bp, Artificial sequence
  synthetic
tcttgcttcaggaaggtgaa

SEQ ID NO: 20372 - DNA, 20 bp, Artificial sequence
  synthetic
ccttgggaacatgggagagg

SEQ ID NO: 20373 - DNA, 20 bp, Artificial sequence
  synthetic
aaaaaaaaggattcaatagt

SEQ ID NO: 20374 - DNA, 20 bp, Artificial sequence
  synthetic
tgtaagtaaaccagagcgaa

SEQ ID NO: 20375 - DNA, 20 bp, Artificial sequence
  synthetic
acgcggtggcttagacgcgc

SEQ ID NO: 20376 - DNA, 20 bp, Artificial sequence
  synthetic
atcactcctgaagatcttct

SEQ ID NO: 20377 - DNA, 20 bp, Artificial sequence
  synthetic
ccgtgtatgcctcccacaag

SEQ ID NO: 20378 - DNA, 20 bp, Artificial sequence
  synthetic
ccctcagagtgctcccttca

SEQ ID NO: 20379 - DNA, 20 bp, Artificial sequence
  synthetic
ccctttgcccatccttcctt

SEQ ID NO: 20380 - DNA, 20 bp, Artificial sequence
  synthetic
cattttcaatagaaacgaag

SEQ ID NO: 20381 - DNA, 20 bp, Artificial sequence
  synthetic
ggctggaatatagtggcaca

SEQ ID NO: 20382 - DNA, 20 bp, Artificial sequence
  synthetic
cactaagccgtagcggcagc

SEQ ID NO: 20383 - DNA, 20 bp, Artificial sequence
  synthetic
gtccctgcagacggcttccc

SEQ ID NO: 20384 - DNA, 20 bp, Artificial sequence
  synthetic
atagaaggcagaacaacaac

SEQ ID NO: 20385 - DNA, 20 bp, Artificial sequence
  synthetic
tgaggagctgtccgtgtgca

SEQ ID NO: 20386 - DNA, 20 bp, Artificial sequence
  synthetic
caaggctcccaccccgcctg

SEQ ID NO: 20387 - DNA, 20 bp, Artificial sequence
  synthetic
tcaagaaccagggtctgtca

SEQ ID NO: 20388 - DNA, 20 bp, Artificial sequence
  synthetic
tcagcctgcagacagcctat

SEQ ID NO: 20389 - DNA, 20 bp, Artificial sequence
  synthetic
gaccgcagtcgagtctgcag

SEQ ID NO: 20390 - DNA, 20 bp, Artificial sequence
  synthetic
tacagattgtggagagctgc

SEQ ID NO: 20391 - DNA, 20 bp, Artificial sequence
  synthetic
ggaggaaaggaaaagacaga

SEQ ID NO: 20392 - DNA, 20 bp, Artificial sequence
  synthetic
cgggaagggcgcggggcgga

SEQ ID NO: 20393 - DNA, 20 bp, Artificial sequence
  synthetic
acggccctgctcatcacatg

SEQ ID NO: 20394 - DNA, 20 bp, Artificial sequence
  synthetic
ggtctgaagacggatggagt

SEQ ID NO: 20395 - DNA, 20 bp, Artificial sequence
  synthetic
ttaagtgtatcgagctgata

SEQ ID NO: 20396 - DNA, 20 bp, Artificial sequence
  synthetic
gacgcgagcgcggggcgggt

SEQ ID NO: 20397 - DNA, 20 bp, Artificial sequence
  synthetic
cctaggagtgctacgggggg

SEQ ID NO: 20398 - DNA, 20 bp, Artificial sequence
  synthetic
cggagcccaggccgggagca

SEQ ID NO: 20399 - DNA, 20 bp, Artificial sequence
  synthetic
cctggcttccctgcgctgca

SEQ ID NO: 20400 - DNA, 20 bp, Artificial sequence
  synthetic
tcaatgacaggagccagcct

SEQ ID NO: 20401 - DNA, 20 bp, Artificial sequence
  synthetic
tgcggagcctctcccgctcg

SEQ ID NO: 20402 - DNA, 20 bp, Artificial sequence
  synthetic
tgtccttccgaacgcacact

SEQ ID NO: 20403 - DNA, 20 bp, Artificial sequence
  synthetic
cctctgaggttttccattta

SEQ ID NO: 20404 - DNA, 20 bp, Artificial sequence
  synthetic
gcctgaaaggcagctctcag

SEQ ID NO: 20405 - DNA, 20 bp, Artificial sequence
  synthetic
gtagagatgacttctacccg

SEQ ID NO: 20406 - DNA, 20 bp, Artificial sequence
  synthetic
accgtccctgtgttccccac

SEQ ID NO: 20407 - DNA, 20 bp, Artificial sequence
  synthetic
cccagctgggaggctgtggc

SEQ ID NO: 20408 - DNA, 20 bp, Artificial sequence
  synthetic
gagtgttgttctacctgcgc

SEQ ID NO: 20409 - DNA, 20 bp, Artificial sequence
  synthetic
cggctggcaagaagaggatg

SEQ ID NO: 20410 - DNA, 20 bp, Artificial sequence
  synthetic
agctcttctgcctggaacac

SEQ ID NO: 20411 - DNA, 20 bp, Artificial sequence
  synthetic
atggcatcgaccccagcggc

SEQ ID NO: 20412 - DNA, 20 bp, Artificial sequence
  synthetic
cagagttggaggtggtggcg

SEQ ID NO: 20413 - DNA, 20 bp, Artificial sequence
  synthetic
cctcaaactagccaatgaga

SEQ ID NO: 20414 - DNA, 20 bp, Artificial sequence
  synthetic
cgacgctcctcgggaagcca

SEQ ID NO: 20415 - DNA, 20 bp, Artificial sequence
  synthetic
cagaaaacagctgaaacgga

SEQ ID NO: 20416 - DNA, 20 bp, Artificial sequence
  synthetic
cccacccaccgcccccactg

SEQ ID NO: 20417 - DNA, 20 bp, Artificial sequence
  synthetic
atccagaggagtggaaggct

SEQ ID NO: 20418 - DNA, 20 bp, Artificial sequence
  synthetic
gctgttgtttccagcaagac

SEQ ID NO: 20419 - DNA, 20 bp, Artificial sequence
  synthetic
acacatttcctgaaggagtt

SEQ ID NO: 20420 - DNA, 20 bp, Artificial sequence
  synthetic
taggagggagcccgccgggg

SEQ ID NO: 20421 - DNA, 20 bp, Artificial sequence
  synthetic
ctcggaagggtctttgttcc

SEQ ID NO: 20422 - DNA, 20 bp, Artificial sequence
  synthetic
aggaggagaagcggcggcgc

SEQ ID NO: 20423 - DNA, 20 bp, Artificial sequence
  synthetic
ggggccggcggtggcggagc

SEQ ID NO: 20424 - DNA, 20 bp, Artificial sequence
  synthetic
tgttttcttgcataaaattc

SEQ ID NO: 20425 - DNA, 20 bp, Artificial sequence
  synthetic
tggtttcatagccttctccc

SEQ ID NO: 20426 - DNA, 20 bp, Artificial sequence
  synthetic
ccgacgaggagctgaaccag

SEQ ID NO: 20427 - DNA, 20 bp, Artificial sequence
  synthetic
ctgctaatgagacttgttga

SEQ ID NO: 20428 - DNA, 20 bp, Artificial sequence
  synthetic
cggcggcggcggcggtggag

SEQ ID NO: 20429 - DNA, 20 bp, Artificial sequence
  synthetic
cgcctgcacgtacgtagcct

SEQ ID NO: 20430 - DNA, 20 bp, Artificial sequence
  synthetic
tgaaccagttattaggggcg

SEQ ID NO: 20431 - DNA, 20 bp, Artificial sequence
  synthetic
accgggagatccagaagtga

SEQ ID NO: 20432 - DNA, 20 bp, Artificial sequence
  synthetic
ctcctggtctgcaacctctc

SEQ ID NO: 20433 - DNA, 20 bp, Artificial sequence
  synthetic
atttggacacacagagagat

SEQ ID NO: 20434 - DNA, 20 bp, Artificial sequence
  synthetic
gctagggagtgggactggca

SEQ ID NO: 20435 - DNA, 20 bp, Artificial sequence
  synthetic
gggtccagagagagggtcta

SEQ ID NO: 20436 - DNA, 20 bp, Artificial sequence
  synthetic
ttgacaaactgctgacagct

SEQ ID NO: 20437 - DNA, 20 bp, Artificial sequence
  synthetic
cccagtgctccataaaggat

SEQ ID NO: 20438 - DNA, 20 bp, Artificial sequence
  synthetic
ccatgtgttgctgagagatg

SEQ ID NO: 20439 - DNA, 20 bp, Artificial sequence
  synthetic
catgagttgctcctgacggc

SEQ ID NO: 20440 - DNA, 20 bp, Artificial sequence
  synthetic
caggaattcgaacgtttcgt

SEQ ID NO: 20441 - DNA, 20 bp, Artificial sequence
  synthetic
acgacatacaagatttttgc

SEQ ID NO: 20442 - DNA, 20 bp, Artificial sequence
  synthetic
agagaaaatttatgacattg

SEQ ID NO: 20443 - DNA, 20 bp, Artificial sequence
  synthetic
tcacggaggaggagaggaaa

SEQ ID NO: 20444 - DNA, 20 bp, Artificial sequence
  synthetic
tctacaagtccatctttgtc

SEQ ID NO: 20445 - DNA, 20 bp, Artificial sequence
  synthetic
gcaatgcctctccttgtttg

SEQ ID NO: 20446 - DNA, 20 bp, Artificial sequence
  synthetic
gcaaatgaaggggaaacaac

SEQ ID NO: 20447 - DNA, 20 bp, Artificial sequence
  synthetic
gtatgttgagtctaaaaagg

SEQ ID NO: 20448 - DNA, 20 bp, Artificial sequence
  synthetic
tggacaaaacaggacatgtt

SEQ ID NO: 20449 - DNA, 20 bp, Artificial sequence
  synthetic
gcagaggaagacaagaagaa

SEQ ID NO: 20450 - DNA, 20 bp, Artificial sequence
  synthetic
gagaaagaaagatctatgct

SEQ ID NO: 20451 - DNA, 20 bp, Artificial sequence
  synthetic
agccacgctattcaaagaca

SEQ ID NO: 20452 - DNA, 20 bp, Artificial sequence
  synthetic
agaacaatcaacctgtggag

SEQ ID NO: 20453 - DNA, 20 bp, Artificial sequence
  synthetic
agatctggacgatatgattg

SEQ ID NO: 20454 - DNA, 20 bp, Artificial sequence
  synthetic
aggaagaaagagggaagaca

SEQ ID NO: 20455 - DNA, 20 bp, Artificial sequence
  synthetic
gcctacatttaaaactgcaa

SEQ ID NO: 20456 - DNA, 20 bp, Artificial sequence
  synthetic
attgctggaaatcatcacca

SEQ ID NO: 20457 - DNA, 20 bp, Artificial sequence
  synthetic
ggtagcataaaaaaacaata

SEQ ID NO: 20458 - DNA, 20 bp, Artificial sequence
  synthetic
acgtggatagaatcacctaa

SEQ ID NO: 20459 - DNA, 20 bp, Artificial sequence
  synthetic
caaattcctccggaaacagg

SEQ ID NO: 20460 - DNA, 20 bp, Artificial sequence
  synthetic
gcagctggggccggacctgg

SEQ ID NO: 20461 - DNA, 20 bp, Artificial sequence
  synthetic
cgctgcgcaacagcatcgga

SEQ ID NO: 20462 - DNA, 20 bp, Artificial sequence
  synthetic
actgggtgcgcgactcggtt

SEQ ID NO: 20463 - DNA, 20 bp, Artificial sequence
  synthetic
gtcgccgccagaggagctgc

SEQ ID NO: 20464 - DNA, 20 bp, Artificial sequence
  synthetic
tgtggtgagctgtttgattc

SEQ ID NO: 20465 - DNA, 20 bp, Artificial sequence
  synthetic
gcgacggcgacggggacgac

SEQ ID NO: 20466 - DNA, 20 bp, Artificial sequence
  synthetic
cctcttcccgactggccatt

SEQ ID NO: 20467 - DNA, 20 bp, Artificial sequence
  synthetic
caacaaagcccgccaagagt

SEQ ID NO: 20468 - DNA, 20 bp, Artificial sequence
  synthetic
ttcccaactttgacgcggtg

SEQ ID NO: 20469 - DNA, 20 bp, Artificial sequence
  synthetic
gtttgtacctattgtcagct

SEQ ID NO: 20470 - DNA, 20 bp, Artificial sequence
  synthetic
gggatatgctccaggcgggc

SEQ ID NO: 20471 - DNA, 20 bp, Artificial sequence
  synthetic
atctgcagcctcgtcactgt

SEQ ID NO: 20472 - DNA, 20 bp, Artificial sequence
  synthetic
agatgccatgaaccacccta

SEQ ID NO: 20473 - DNA, 20 bp, Artificial sequence
  synthetic
gcgctggtccgtgcagacct

SEQ ID NO: 20474 - DNA, 20 bp, Artificial sequence
  synthetic
tacggtcacgccggcatggc

SEQ ID NO: 20475 - DNA, 20 bp, Artificial sequence
  synthetic
cgagtggtgttttttaatag

SEQ ID NO: 20476 - DNA, 20 bp, Artificial sequence
  synthetic
cgcgagccttcgtctcagag

SEQ ID NO: 20477 - DNA, 20 bp, Artificial sequence
  synthetic
acggggacacggacagcctt

SEQ ID NO: 20478 - DNA, 20 bp, Artificial sequence
  synthetic
gcgagtagagttttctcctc

SEQ ID NO: 20479 - DNA, 20 bp, Artificial sequence
  synthetic
aacgccacaacataaagaag

SEQ ID NO: 20480 - DNA, 20 bp, Artificial sequence
  synthetic
ggggttggggttattctctg

SEQ ID NO: 20481 - DNA, 20 bp, Artificial sequence
  synthetic
atttgcatttattgtcagct

SEQ ID NO: 20482 - DNA, 20 bp, Artificial sequence
  synthetic
ccacccaactttccccgcgc

SEQ ID NO: 20483 - DNA, 20 bp, Artificial sequence
  synthetic
cctcctgttcctgtccatcc

SEQ ID NO: 20484 - DNA, 20 bp, Artificial sequence
  synthetic
tgtgcaacatcttacaaatg

SEQ ID NO: 20485 - DNA, 20 bp, Artificial sequence
  synthetic
tcttcattttgaggttttgg

SEQ ID NO: 20486 - DNA, 20 bp, Artificial sequence
  synthetic
ttacgtcattttttagtcct

SEQ ID NO: 20487 - DNA, 20 bp, Artificial sequence
  synthetic
ggggtcttatgtagttttgt

SEQ ID NO: 20488 - DNA, 20 bp, Artificial sequence
  synthetic
tatgatctggaattggaaga

SEQ ID NO: 20489 - DNA, 20 bp, Artificial sequence
  synthetic
gcaacccgttcgctcatctg

SEQ ID NO: 20490 - DNA, 20 bp, Artificial sequence
  synthetic
gcgaccgagcgtgcgttcgt

SEQ ID NO: 20491 - DNA, 20 bp, Artificial sequence
  synthetic
tagtcgcgccgcgcgttctt

SEQ ID NO: 20492 - DNA, 20 bp, Artificial sequence
  synthetic
gtgtttatttaatgtgacgt

SEQ ID NO: 20493 - DNA, 20 bp, Artificial sequence
  synthetic
cagcaaattgactcccgccg

SEQ ID NO: 20494 - DNA, 20 bp, Artificial sequence
  synthetic
agaatggactctgacgctcc

SEQ ID NO: 20495 - DNA, 20 bp, Artificial sequence
  synthetic
agaggagaaaggaagaggtc

SEQ ID NO: 20496 - DNA, 20 bp, Artificial sequence
  synthetic
ctgcggtctggccttggaag

SEQ ID NO: 20497 - DNA, 20 bp, Artificial sequence
  synthetic
ggaactctccagttcgtgga

SEQ ID NO: 20498 - DNA, 20 bp, Artificial sequence
  synthetic
agtgcggattaccatcgaag

SEQ ID NO: 20499 - DNA, 20 bp, Artificial sequence
  synthetic
aaagagaaaatgccttaacc

SEQ ID NO: 20500 - DNA, 20 bp, Artificial sequence
  synthetic
tctaagatcttttttttttt

SEQ ID NO: 20501 - DNA, 20 bp, Artificial sequence
  synthetic
gtgtagcatagtctgcctgg

SEQ ID NO: 20502 - DNA, 20 bp, Artificial sequence
  synthetic
ataccgcaatcaaaatgttg

SEQ ID NO: 20503 - DNA, 20 bp, Artificial sequence
  synthetic
cagcacctcacttccctctt

SEQ ID NO: 20504 - DNA, 20 bp, Artificial sequence
  synthetic
aagcagtttggtgataatat

SEQ ID NO: 20505 - DNA, 20 bp, Artificial sequence
  synthetic
aggttttacgagggtcgagc

SEQ ID NO: 20506 - DNA, 20 bp, Artificial sequence
  synthetic
tggagcggagttcggttcca

SEQ ID NO: 20507 - DNA, 20 bp, Artificial sequence
  synthetic
gcctgttgctgcatcacgct

SEQ ID NO: 20508 - DNA, 20 bp, Artificial sequence
  synthetic
gtactagacacagataacaa

SEQ ID NO: 20509 - DNA, 20 bp, Artificial sequence
  synthetic
tcctgtgtttttacgtaggt

SEQ ID NO: 20510 - DNA, 20 bp, Artificial sequence
  synthetic
agaagagttttctccttcgc

SEQ ID NO: 20511 - DNA, 20 bp, Artificial sequence
  synthetic
aataggtgaccggaggtcgg

SEQ ID NO: 20512 - DNA, 20 bp, Artificial sequence
  synthetic
gatagggtccttgcgagggg

SEQ ID NO: 20513 - DNA, 20 bp, Artificial sequence
  synthetic
aaagaggttaaaacattaca

SEQ ID NO: 20514 - DNA, 20 bp, Artificial sequence
  synthetic
cgcctccgggtaagggacgc

SEQ ID NO: 20515 - DNA, 20 bp, Artificial sequence
  synthetic
aactcgtaagcggggcaacc

SEQ ID NO: 20516 - DNA, 20 bp, Artificial sequence
  synthetic
tggatccaccactctcgact

SEQ ID NO: 20517 - DNA, 20 bp, Artificial sequence
  synthetic
ccagtgtcttccgtttgtac

SEQ ID NO: 20518 - DNA, 20 bp, Artificial sequence
  synthetic
gaaagtggtgaaccgaaaac

SEQ ID NO: 20519 - DNA, 20 bp, Artificial sequence
  synthetic
ggaagggcaagttaattgta

SEQ ID NO: 20520 - DNA, 20 bp, Artificial sequence
  synthetic
acaggttttcccatttcctt

SEQ ID NO: 20521 - DNA, 20 bp, Artificial sequence
  synthetic
ttttgttgtcagtgtaagtc

SEQ ID NO: 20522 - DNA, 20 bp, Artificial sequence
  synthetic
ctccttaacttattgaaatt

SEQ ID NO: 20523 - DNA, 20 bp, Artificial sequence
  synthetic
aagaatgccctggaggcaag

SEQ ID NO: 20524 - DNA, 20 bp, Artificial sequence
  synthetic
cagcagcaggaacgcgggag

SEQ ID NO: 20525 - DNA, 20 bp, Artificial sequence
  synthetic
atttacatttccaaatccat

SEQ ID NO: 20526 - DNA, 20 bp, Artificial sequence
  synthetic
tttcctgccttttatataca

SEQ ID NO: 20527 - DNA, 20 bp, Artificial sequence
  synthetic
gggaacaccctttagtcctg

SEQ ID NO: 20528 - DNA, 20 bp, Artificial sequence
  synthetic
tgttgctgtggatgtgacag

SEQ ID NO: 20529 - DNA, 20 bp, Artificial sequence
  synthetic
ctgaggtactcaggggcatt

SEQ ID NO: 20530 - DNA, 20 bp, Artificial sequence
  synthetic
tactcaggggcatttaggtt

SEQ ID NO: 20531 - DNA, 20 bp, Artificial sequence
  synthetic
cgggccgaggtaccaaaggc

SEQ ID NO: 20532 - DNA, 20 bp, Artificial sequence
  synthetic
attggccagacaaggggagg

SEQ ID NO: 20533 - DNA, 20 bp, Artificial sequence
  synthetic
ccgccagctgattcgcctct

SEQ ID NO: 20534 - DNA, 20 bp, Artificial sequence
  synthetic
ggaaagtactaccccaaggg

SEQ ID NO: 20535 - DNA, 20 bp, Artificial sequence
  synthetic
cgaccactcatacaaccccc

SEQ ID NO: 20536 - DNA, 20 bp, Artificial sequence
  synthetic
gcccacggcaagtaccgcgg

SEQ ID NO: 20537 - DNA, 20 bp, Artificial sequence
  synthetic
ctatgaaaactgggcaataa

SEQ ID NO: 20538 - DNA, 20 bp, Artificial sequence
  synthetic
taatggatggaaatttcgag

SEQ ID NO: 20539 - DNA, 20 bp, Artificial sequence
  synthetic
taaccttaaaaattctccag

SEQ ID NO: 20540 - DNA, 20 bp, Artificial sequence
  synthetic
aattatgacagtaaccatga

SEQ ID NO: 20541 - DNA, 20 bp, Artificial sequence
  synthetic
gacgacgataagtcggcttt

SEQ ID NO: 20542 - DNA, 20 bp, Artificial sequence
  synthetic
aatgggcaaacccgagttct

SEQ ID NO: 20543 - DNA, 20 bp, Artificial sequence
  synthetic
agcagtttctttcgcctttc

SEQ ID NO: 20544 - DNA, 20 bp, Artificial sequence
  synthetic
ctcagtgcacttgtcatttc

SEQ ID NO: 20545 - DNA, 20 bp, Artificial sequence
  synthetic
tatatagaagaagaaatacc

SEQ ID NO: 20546 - DNA, 20 bp, Artificial sequence
  synthetic
tcaaaactcaccgccgagtc

SEQ ID NO: 20547 - DNA, 20 bp, Artificial sequence
  synthetic
ccatatcgttctttttgggt

SEQ ID NO: 20548 - DNA, 20 bp, Artificial sequence
  synthetic
cgtgtagcatttcaataaaa

SEQ ID NO: 20549 - DNA, 20 bp, Artificial sequence
  synthetic
tatgtcgaatgcgctgtaaa

SEQ ID NO: 20550 - DNA, 20 bp, Artificial sequence
  synthetic
tgcgacaaaaaaataaacgc

SEQ ID NO: 20551 - DNA, 20 bp, Artificial sequence
  synthetic
aaaaatccaaacaagcaaat

SEQ ID NO: 20552 - DNA, 20 bp, Artificial sequence
  synthetic
gtgtgggatttgccagactt

SEQ ID NO: 20553 - DNA, 20 bp, Artificial sequence
  synthetic
tgccttaatgtatgcaccct

SEQ ID NO: 20554 - DNA, 20 bp, Artificial sequence
  synthetic
aatgtcaccacgggtaaact

SEQ ID NO: 20555 - DNA, 20 bp, Artificial sequence
  synthetic
ataacacaggacatcgccgg

SEQ ID NO: 20556 - DNA, 20 bp, Artificial sequence
  synthetic
ccaacccgctgccccaccca

SEQ ID NO: 20557 - DNA, 20 bp, Artificial sequence
  synthetic
tctctctacatttctccgcc

SEQ ID NO: 20558 - DNA, 20 bp, Artificial sequence
  synthetic
taaatttcaagtttttcacc

SEQ ID NO: 20559 - DNA, 20 bp, Artificial sequence
  synthetic
tcagtctgttccacactacg

SEQ ID NO: 20560 - DNA, 20 bp, Artificial sequence
  synthetic
tttccgtgtcacggcgcgcg

SEQ ID NO: 20561 - DNA, 20 bp, Artificial sequence
  synthetic
gaggagtgcgtaatcgcaag

SEQ ID NO: 20562 - DNA, 20 bp, Artificial sequence
  synthetic
tgtccaacattcgcaggaaa

SEQ ID NO: 20563 - DNA, 20 bp, Artificial sequence
  synthetic
gtttttagtggcgcttcgag

SEQ ID NO: 20564 - DNA, 20 bp, Artificial sequence
  synthetic
cgcaaacgggatcgactgcg

SEQ ID NO: 20565 - DNA, 20 bp, Artificial sequence
  synthetic
tttaatagtcctttttttac

SEQ ID NO: 20566 - DNA, 20 bp, Artificial sequence
  synthetic
cggagagctgccgagctgag

SEQ ID NO: 20567 - DNA, 20 bp, Artificial sequence
  synthetic
cagattttttggaagaaatt

SEQ ID NO: 20568 - DNA, 20 bp, Artificial sequence
  synthetic
aaatcaatcggtgatggagt

SEQ ID NO: 20569 - DNA, 20 bp, Artificial sequence
  synthetic
atgcaaagacttgcagatga

SEQ ID NO: 20570 - DNA, 20 bp, Artificial sequence
  synthetic
aaggaacatacactctcgta

SEQ ID NO: 20571 - DNA, 20 bp, Artificial sequence
  synthetic
caatataaaataaccaacta

SEQ ID NO: 20572 - DNA, 20 bp, Artificial sequence
  synthetic
cggctagtaatgattctggg

SEQ ID NO: 20573 - DNA, 20 bp, Artificial sequence
  synthetic
taagcccgtgaatgttttct

SEQ ID NO: 20574 - DNA, 20 bp, Artificial sequence
  synthetic
gcttgtttcacacggttctg

SEQ ID NO: 20575 - DNA, 20 bp, Artificial sequence
  synthetic
tatctgtcaaggttgtcaga

SEQ ID NO: 20576 - DNA, 20 bp, Artificial sequence
  synthetic
ggttgcgattgtcagcatct

SEQ ID NO: 20577 - DNA, 20 bp, Artificial sequence
  synthetic
gctcatacaaaagttcaaga

SEQ ID NO: 20578 - DNA, 20 bp, Artificial sequence
  synthetic
aggatcaggtatagaggtta

SEQ ID NO: 20579 - DNA, 20 bp, Artificial sequence
  synthetic
cgaaacggatgagccgatga

SEQ ID NO: 20580 - DNA, 20 bp, Artificial sequence
  synthetic
agggcatttaaagccaaatt

SEQ ID NO: 20581 - DNA, 20 bp, Artificial sequence
  synthetic
gagctcgtttgtctctgtag

SEQ ID NO: 20582 - DNA, 20 bp, Artificial sequence
  synthetic
tagccagggcattcacaatc

SEQ ID NO: 20583 - DNA, 20 bp, Artificial sequence
  synthetic
tcaaagaatagcagaaccct

SEQ ID NO: 20584 - DNA, 20 bp, Artificial sequence
  synthetic
tttgtggaacgttgttcccg

SEQ ID NO: 20585 - DNA, 20 bp, Artificial sequence
  synthetic
tgatcccgccctcgtctgtt

SEQ ID NO: 20586 - DNA, 20 bp, Artificial sequence
  synthetic
attgtgagaacagcgcataa

SEQ ID NO: 20587 - DNA, 20 bp, Artificial sequence
  synthetic
tttaggtaaaatttcggtcg

SEQ ID NO: 20588 - DNA, 20 bp, Artificial sequence
  synthetic
acaaaaaaatacacacataa

SEQ ID NO: 20589 - DNA, 20 bp, Artificial sequence
  synthetic
tggagggatataggggtgtg

SEQ ID NO: 20590 - DNA, 20 bp, Artificial sequence
  synthetic
aaatatgcggtcgagggggg

SEQ ID NO: 20591 - DNA, 20 bp, Artificial sequence
  synthetic
cgagagcgtttggaaaactc

SEQ ID NO: 20592 - DNA, 20 bp, Artificial sequence
  synthetic
ggtctgccgtgtttggatat

SEQ ID NO: 20593 - DNA, 20 bp, Artificial sequence
  synthetic
ccattttacccaagtagcct

SEQ ID NO: 20594 - DNA, 20 bp, Artificial sequence
  synthetic
agcgtcgagtcggttttaag

SEQ ID NO: 20595 - DNA, 20 bp, Artificial sequence
  synthetic
atacaatggtttggctcgtg

SEQ ID NO: 20596 - DNA, 20 bp, Artificial sequence
  synthetic
ccccattacaacaaggataa

SEQ ID NO: 20597 - DNA, 20 bp, Artificial sequence
  synthetic
cgaattgcgtggttttaagt

SEQ ID NO: 20598 - DNA, 20 bp, Artificial sequence
  synthetic
gaacgtttcctagccacacc

SEQ ID NO: 20599 - DNA, 20 bp, Artificial sequence
  synthetic
ttaacaaaacccgcgccttt

SEQ ID NO: 20600 - DNA, 20 bp, Artificial sequence
  synthetic
ttacatatgattactttttc

SEQ ID NO: 20601 - DNA, 20 bp, Artificial sequence
  synthetic
gctgtgaaacctttcacaag

SEQ ID NO: 20602 - DNA, 20 bp, Artificial sequence
  synthetic
aagatacaggcaactgcaaa

SEQ ID NO: 20603 - DNA, 20 bp, Artificial sequence
  synthetic
ctgttgttgctagtattttc

SEQ ID NO: 20604 - DNA, 20 bp, Artificial sequence
  synthetic
aaccgtgtgatactacatcg

SEQ ID NO: 20605 - DNA, 20 bp, Artificial sequence
  synthetic
atgcttaatacatggggaaa

SEQ ID NO: 20606 - DNA, 20 bp, Artificial sequence
  synthetic
cagggcggctccttgggggt

SEQ ID NO: 20607 - DNA, 20 bp, Artificial sequence
  synthetic
tttaatttattaataaaaat

SEQ ID NO: 20608 - DNA, 20 bp, Artificial sequence
  synthetic
ctgttccgcatttaaaggtt

SEQ ID NO: 20609 - DNA, 20 bp, Artificial sequence
  synthetic
gcctccacaccgtgagtatt

SEQ ID NO: 20610 - DNA, 20 bp, Artificial sequence
  synthetic
gtaccggtttatattcacgc

SEQ ID NO: 20611 - DNA, 20 bp, Artificial sequence
  synthetic
ggttgtttttccaattccat

SEQ ID NO: 20612 - DNA, 20 bp, Artificial sequence
  synthetic
ctttttgagtacatcgtaaa

SEQ ID NO: 20613 - DNA, 20 bp, Artificial sequence
  synthetic
agttccgtcccagaagataa

SEQ ID NO: 20614 - DNA, 20 bp, Artificial sequence
  synthetic
tcacgggacggcaagttcga

SEQ ID NO: 20615 - DNA, 20 bp, Artificial sequence
  synthetic
caccccaagcccgcgtctcg

SEQ ID NO: 20616 - DNA, 20 bp, Artificial sequence
  synthetic
tatttataattaccgccccc

SEQ ID NO: 20617 - DNA, 20 bp, Artificial sequence
  synthetic
cttcctcttccgcgataatt

SEQ ID NO: 20618 - DNA, 20 bp, Artificial sequence
  synthetic
gcctgacatgaccaaagtga

SEQ ID NO: 20619 - DNA, 20 bp, Artificial sequence
  synthetic
cgtacatatttctttttttt

SEQ ID NO: 20620 - DNA, 20 bp, Artificial sequence
  synthetic
accagaatctcttcatatgt

SEQ ID NO: 20621 - DNA, 20 bp, Artificial sequence
  synthetic
caatgacatttaacatcaat

SEQ ID NO: 20622 - DNA, 20 bp, Artificial sequence
  synthetic
aaagacacaggaaacaacgc

SEQ ID NO: 20623 - DNA, 20 bp, Artificial sequence
  synthetic
ccaattgcagttccaggcta

SEQ ID NO: 20624 - DNA, 20 bp, Artificial sequence
  synthetic
tactggacgcatagacggcg

SEQ ID NO: 20625 - DNA, 20 bp, Artificial sequence
  synthetic
cgtacggcgagactttttca

SEQ ID NO: 20626 - DNA, 20 bp, Artificial sequence
  synthetic
aacggggcggtaaattttga

SEQ ID NO: 20627 - DNA, 20 bp, Artificial sequence
  synthetic
cgcagaaattagcgatcaca

SEQ ID NO: 20628 - DNA, 20 bp, Artificial sequence
  synthetic
tcgccattgtcccgtgttcc

SEQ ID NO: 20629 - DNA, 20 bp, Artificial sequence
  synthetic
tggtgtacgtgttaactatg

SEQ ID NO: 20630 - DNA, 20 bp, Artificial sequence
  synthetic
ggtggtaactacctgctgta

SEQ ID NO: 20631 - DNA, 20 bp, Artificial sequence
  synthetic
acacacacacagtatataag

SEQ ID NO: 20632 - DNA, 20 bp, Artificial sequence
  synthetic
ggcgtcacctaaatctaaaa

SEQ ID NO: 20633 - DNA, 20 bp, Artificial sequence
  synthetic
ggtcggggcgctttttttgt

SEQ ID NO: 20634 - DNA, 20 bp, Artificial sequence
  synthetic
tgtttcgcgcacacgcagaa

SEQ ID NO: 20635 - DNA, 20 bp, Artificial sequence
  synthetic
tgaattgcaggaaatagatt

SEQ ID NO: 20636 - DNA, 20 bp, Artificial sequence
  synthetic
aaaaaacgcaaacgtgttta

SEQ ID NO: 20637 - DNA, 20 bp, Artificial sequence
  synthetic
gtgcatagaattggcgggat

SEQ ID NO: 20638 - DNA, 20 bp, Artificial sequence
  synthetic
agagagtcagtgtccatttt

SEQ ID NO: 20639 - DNA, 20 bp, Artificial sequence
  synthetic
ggtcaacagtcaccttgacc

SEQ ID NO: 20640 - DNA, 20 bp, Artificial sequence
  synthetic
atcatacgatttgtatgcgt

SEQ ID NO: 20641 - DNA, 20 bp, Artificial sequence
  synthetic
cacgcctgtgtcgagcagaa

SEQ ID NO: 20642 - DNA, 20 bp, Artificial sequence
  synthetic
aacggttcaaccgaaaacgg

SEQ ID NO: 20643 - DNA, 20 bp, Artificial sequence
  synthetic
aacagtttttagatgttgta

SEQ ID NO: 20644 - DNA, 20 bp, Artificial sequence
  synthetic
tactgtcccgcattgtatat

SEQ ID NO: 20645 - DNA, 20 bp, Artificial sequence
  synthetic
agagtaaaccgttttttata

SEQ ID NO: 20646 - DNA, 20 bp, Artificial sequence
  synthetic
aagctaaattgtacgtggaa

SEQ ID NO: 20647 - DNA, 20 bp, Artificial sequence
  synthetic
gtattttgcacgtaaacgcc

SEQ ID NO: 20648 - DNA, 20 bp, Artificial sequence
  synthetic
acactaaacatagtgtgtcc

SEQ ID NO: 20649 - DNA, 20 bp, Artificial sequence
  synthetic
agaagtaagcctataaaata

SEQ ID NO: 20650 - DNA, 20 bp, Artificial sequence
  synthetic
ttcccctcctacccccacat

SEQ ID NO: 20651 - DNA, 20 bp, Artificial sequence
  synthetic
ggattttgagttacatccta

SEQ ID NO: 20652 - DNA, 20 bp, Artificial sequence
  synthetic
ttcctgtgcctattgcgaga

SEQ ID NO: 20653 - DNA, 20 bp, Artificial sequence
  synthetic
atctttgaacatcgtgtgcc

SEQ ID NO: 20654 - DNA, 20 bp, Artificial sequence
  synthetic
agggaggagagcgaaggagg

SEQ ID NO: 20655 - DNA, 20 bp, Artificial sequence
  synthetic
caatcagtcacaaacttaca

SEQ ID NO: 20656 - DNA, 20 bp, Artificial sequence
  synthetic
ggtcttggttttctcttttt

SEQ ID NO: 20657 - DNA, 20 bp, Artificial sequence
  synthetic
acaaccacgccgacgcggag

SEQ ID NO: 20658 - DNA, 20 bp, Artificial sequence
  synthetic
ggttgaggaacctgttaaga

SEQ ID NO: 20659 - DNA, 20 bp, Artificial sequence
  synthetic
gaaccggaaaggcgggccag

SEQ ID NO: 20660 - DNA, 20 bp, Artificial sequence
  synthetic
acgcagggtctccattttga

SEQ ID NO: 20661 - DNA, 20 bp, Artificial sequence
  synthetic
ccaattctgatgcgccggtg

SEQ ID NO: 20662 - DNA, 20 bp, Artificial sequence
  synthetic
tgagcagtccaccccaggcg

SEQ ID NO: 20663 - DNA, 20 bp, Artificial sequence
  synthetic
gtataggtctctacatcgta

SEQ ID NO: 20664 - DNA, 20 bp, Artificial sequence
  synthetic
cagatatgctcttgcatagg

SEQ ID NO: 20665 - DNA, 20 bp, Artificial sequence
  synthetic
gcgtaccactgtggccaggc

SEQ ID NO: 20666 - DNA, 20 bp, Artificial sequence
  synthetic
cgagacgggtctttggagcg

SEQ ID NO: 20667 - DNA, 20 bp, Artificial sequence
  synthetic
cccgacgaccaccccaggca

SEQ ID NO: 20668 - DNA, 20 bp, Artificial sequence
  synthetic
aaacaaaaaattgaaaagtg

SEQ ID NO: 20669 - DNA, 20 bp, Artificial sequence
  synthetic
tctgttggtacccgttagga

SEQ ID NO: 20670 - DNA, 20 bp, Artificial sequence
  synthetic
tggaggaaagccaattggct

SEQ ID NO: 20671 - DNA, 20 bp, Artificial sequence
  synthetic
tcggcgccctctagcggcca

SEQ ID NO: 20672 - DNA, 20 bp, Artificial sequence
  synthetic
gacccaccccctcggcggcg

SEQ ID NO: 20673 - DNA, 20 bp, Artificial sequence
  synthetic
cccggccctagtcgaagcct

SEQ ID NO: 20674 - DNA, 20 bp, Artificial sequence
  synthetic
atgcccaaagaacgacggtc

SEQ ID NO: 20675 - DNA, 20 bp, Artificial sequence
  synthetic
ctactgctattgagcaggct

SEQ ID NO: 20676 - DNA, 20 bp, Artificial sequence
  synthetic
tcaatcctgtgtcgggtgga

SEQ ID NO: 20677 - DNA, 20 bp, Artificial sequence
  synthetic
ggtggaatgaataacatgtc

SEQ ID NO: 20678 - DNA, 20 bp, Artificial sequence
  synthetic
cgaacagggacctgagaggg

SEQ ID NO: 20679 - DNA, 20 bp, Artificial sequence
  synthetic
aagtcttctggaggtgttcc

SEQ ID NO: 20680 - DNA, 20 bp, Artificial sequence
  synthetic
gtaattagggaagcacagat

SEQ ID NO: 20681 - DNA, 20 bp, Artificial sequence
  synthetic
cctggatctccagatacgga

SEQ ID NO: 20682 - DNA, 20 bp, Artificial sequence
  synthetic
ggacgaagactgagtttccc

SEQ ID NO: 20683 - DNA, 20 bp, Artificial sequence
  synthetic
gtccgccgccgctcaaggcg

SEQ ID NO: 20684 - DNA, 20 bp, Artificial sequence
  synthetic
taccaccctagcattctcgt

SEQ ID NO: 20685 - DNA, 20 bp, Artificial sequence
  synthetic
gttgattcccatcatcgccg

SEQ ID NO: 20686 - DNA, 20 bp, Artificial sequence
  synthetic
cgtacgccgttctcggccgg

SEQ ID NO: 20687 - DNA, 20 bp, Artificial sequence
  synthetic
ctccacttgctcattttcct

SEQ ID NO: 20688 - DNA, 20 bp, Artificial sequence
  synthetic
ctaaacacccgcgctttttt

SEQ ID NO: 20689 - DNA, 20 bp, Artificial sequence
  synthetic
tgtggacggctacgactgaa

SEQ ID NO: 20690 - DNA, 20 bp, Artificial sequence
  synthetic
ctccttccccttactactta

SEQ ID NO: 20691 - DNA, 20 bp, Artificial sequence
  synthetic
actgccatctgcagcattgc

SEQ ID NO: 20692 - DNA, 20 bp, Artificial sequence
  synthetic
gcagcgcgctccatcagtta

SEQ ID NO: 20693 - DNA, 20 bp, Artificial sequence
  synthetic
agacggggttgaagtcgtct

SEQ ID NO: 20694 - DNA, 20 bp, Artificial sequence
  synthetic
acagtgggtatgcttttacg

SEQ ID NO: 20695 - DNA, 20 bp, Artificial sequence
  synthetic
cttcgtgacttgcactttgg

SEQ ID NO: 20696 - DNA, 20 bp, Artificial sequence
  synthetic
ctgtttccatcacgctttcg

SEQ ID NO: 20697 - DNA, 20 bp, Artificial sequence
  synthetic
ccagctttttccttataaaa

SEQ ID NO: 20698 - DNA, 20 bp, Artificial sequence
  synthetic
tgaggtaatctatgatgagg

SEQ ID NO: 20699 - DNA, 20 bp, Artificial sequence
  synthetic
gggtaccatagcgaggaacc

SEQ ID NO: 20700 - DNA, 20 bp, Artificial sequence
  synthetic
gacccccagacacggagagg

SEQ ID NO: 20701 - DNA, 20 bp, Artificial sequence
  synthetic
gatgacgaagaccagtacga

SEQ ID NO: 20702 - DNA, 20 bp, Artificial sequence
  synthetic
attccacttattgctgcggc

SEQ ID NO: 20703 - DNA, 20 bp, Artificial sequence
  synthetic
ggcgggtaacgctaccacct

SEQ ID NO: 20704 - DNA, 20 bp, Artificial sequence
  synthetic
gtgcgtcttggggtatgagt

SEQ ID NO: 20705 - DNA, 20 bp, Artificial sequence
  synthetic
cctgtggctccagatccatc

SEQ ID NO: 20706 - DNA, 20 bp, Artificial sequence
  synthetic
gttcttcttcgctttcggaa

SEQ ID NO: 20707 - DNA, 20 bp, Artificial sequence
  synthetic
atacccaactttgacgcagt

SEQ ID NO: 20708 - DNA, 20 bp, Artificial sequence
  synthetic
tgtcagaataacagttgaaa

SEQ ID NO: 20709 - DNA, 20 bp, Artificial sequence
  synthetic
aggaataattggcttcagca

SEQ ID NO: 20710 - DNA, 20 bp, Artificial sequence
  synthetic
gaagaagtaaaagggggtgt

SEQ ID NO: 20711 - DNA, 20 bp, Artificial sequence
  synthetic
tctgtttcttcagcatactg

SEQ ID NO: 20712 - DNA, 20 bp, Artificial sequence
  synthetic
gcgagagtggttgtactttg

SEQ ID NO: 20713 - DNA, 20 bp, Artificial sequence
  synthetic
ctgttgttgaacatttggaa

SEQ ID NO: 20714 - DNA, 20 bp, Artificial sequence
  synthetic
tcattccgacgtgttttgcg

SEQ ID NO: 20715 - DNA, 20 bp, Artificial sequence
  synthetic
ttaccctgtcttgcctgcgg

SEQ ID NO: 20716 - DNA, 20 bp, Artificial sequence
  synthetic
gctaaaggccacgctacaga

SEQ ID NO: 20717 - DNA, 20 bp, Artificial sequence
  synthetic
tagggtggcgccgctgccat

SEQ ID NO: 20718 - DNA, 20 bp, Artificial sequence
  synthetic
cagaggcccactgtattgct

SEQ ID NO: 20719 - DNA, 20 bp, Artificial sequence
  synthetic
tgtgtttcaagtattgccat

SEQ ID NO: 20720 - DNA, 20 bp, Artificial sequence
  synthetic
gagacacataaggagagttc

SEQ ID NO: 20721 - DNA, 20 bp, Artificial sequence
  synthetic
gacggctccccccggtggat

SEQ ID NO: 20722 - DNA, 20 bp, Artificial sequence
  synthetic
tatgccacgatccagtggtt

SEQ ID NO: 20723 - DNA, 20 bp, Artificial sequence
  synthetic
cctaatttgtgcccacgctg

SEQ ID NO: 20724 - DNA, 20 bp, Artificial sequence
  synthetic
ccggtttcgggaaactgggt

SEQ ID NO: 20725 - DNA, 20 bp, Artificial sequence
  synthetic
gcgcccaacgtggggctcga

SEQ ID NO: 20726 - DNA, 20 bp, Artificial sequence
  synthetic
ccagcgtttttggggagaac

SEQ ID NO: 20727 - DNA, 20 bp, Artificial sequence
  synthetic
cacacagccgccagccaacc

SEQ ID NO: 20728 - DNA, 20 bp, Artificial sequence
  synthetic
gccgaggaccagaacaacat

SEQ ID NO: 20729 - DNA, 20 bp, Artificial sequence
  synthetic
aacgatatcggtagttaatt

SEQ ID NO: 20730 - DNA, 20 bp, Artificial sequence
  synthetic
tagacatcagaattaagaaa

SEQ ID NO: 20731 - DNA, 20 bp, Artificial sequence
  synthetic
gtcttcatcccctctcctgc

SEQ ID NO: 20732 - DNA, 20 bp, Artificial sequence
  synthetic
gagcatttcaaaggtctgca

SEQ ID NO: 20733 - DNA, 20 bp, Artificial sequence
  synthetic
acactccttatgaccctgag

SEQ ID NO: 20734 - DNA, 20 bp, Artificial sequence
  synthetic
gtaaaagcggcgacaacccc

SEQ ID NO: 20735 - DNA, 20 bp, Artificial sequence
  synthetic
ttctgtgttgtctctgtctg

SEQ ID NO: 20736 - DNA, 20 bp, Artificial sequence
  synthetic
cacgtgaaggctgccgaccc

SEQ ID NO: 20737 - DNA, 20 bp, Artificial sequence
  synthetic
tctggcggcagcctaccaag

SEQ ID NO: 20738 - DNA, 20 bp, Artificial sequence
  synthetic
tccatcgagccagtgtagag

SEQ ID NO: 20739 - DNA, 20 bp, Artificial sequence
  synthetic
atttctactattttgtgttc

SEQ ID NO: 20740 - DNA, 20 bp, Artificial sequence
  synthetic
gcagtctcgcctacagagaa

SEQ ID NO: 20741 - DNA, 20 bp, Artificial sequence
  synthetic
tataggtgttggagccctgc

SEQ ID NO: 20742 - DNA, 20 bp, Artificial sequence
  synthetic
cttgcaaaatggcgttactg

SEQ ID NO: 20743 - DNA, 20 bp, Artificial sequence
  synthetic
tttgtcatttgtctggttcg

SEQ ID NO: 20744 - DNA, 20 bp, Artificial sequence
  synthetic
aaggcgctgctgggggacag

SEQ ID NO: 20745 - DNA, 20 bp, Artificial sequence
  synthetic
aaggcagcgctagtaagaaa

SEQ ID NO: 20746 - DNA, 20 bp, Artificial sequence
  synthetic
ccttggtctatacaggattg

SEQ ID NO: 20747 - DNA, 20 bp, Artificial sequence
  synthetic
caggtagctggcgtctttta

SEQ ID NO: 20748 - DNA, 20 bp, Artificial sequence
  synthetic
tggctccctgagcgactaat

SEQ ID NO: 20749 - DNA, 20 bp, Artificial sequence
  synthetic
ccaaaaggctcgccctgagg

SEQ ID NO: 20750 - DNA, 20 bp, Artificial sequence
  synthetic
gtaaccggttccctgcacgg

SEQ ID NO: 20751 - DNA, 20 bp, Artificial sequence
  synthetic
gttcgttcctcatttcgacg

SEQ ID NO: 20752 - DNA, 20 bp, Artificial sequence
  synthetic
gacgtggtccagattaagtt

SEQ ID NO: 20753 - DNA, 20 bp, Artificial sequence
  synthetic
atatagtaaaaataaagtat

SEQ ID NO: 20754 - DNA, 20 bp, Artificial sequence
  synthetic
tttgttgcaagtgtgactct

SEQ ID NO: 20755 - DNA, 20 bp, Artificial sequence
  synthetic
tgctgacgatgcgaaaagat

SEQ ID NO: 20756 - DNA, 20 bp, Artificial sequence
  synthetic
acaaacaccacccccgcgac

SEQ ID NO: 20757 - DNA, 20 bp, Artificial sequence
  synthetic
gaggaacgcctggaagggaa

SEQ ID NO: 20758 - DNA, 20 bp, Artificial sequence
  synthetic
cggagatctgcagctcctgt

SEQ ID NO: 20759 - DNA, 20 bp, Artificial sequence
  synthetic
catgactcacagggaggagc

SEQ ID NO: 20760 - DNA, 20 bp, Artificial sequence
  synthetic
aaagactcctaggtaagtaa

SEQ ID NO: 20761 - DNA, 20 bp, Artificial sequence
  synthetic
ctggggctattgctgggttt

SEQ ID NO: 20762 - DNA, 20 bp, Artificial sequence
  synthetic
gatgtcctaaagtcaacatg

SEQ ID NO: 20763 - DNA, 20 bp, Artificial sequence
  synthetic
tcacaatcatctcgtgtttc

SEQ ID NO: 20764 - DNA, 20 bp, Artificial sequence
  synthetic
tcagaagaacaactggcaac

SEQ ID NO: 20765 - DNA, 20 bp, Artificial sequence
  synthetic
tattgcaaaaaatgctgtta

SEQ ID NO: 20766 - DNA, 20 bp, Artificial sequence
  synthetic
cctgaccctcctcatattca

SEQ ID NO: 20767 - DNA, 20 bp, Artificial sequence
  synthetic
tcaggtagggtgagagccta

SEQ ID NO: 20768 - DNA, 20 bp, Artificial sequence
  synthetic
tatgtggtagcctgtacgga

SEQ ID NO: 20769 - DNA, 20 bp, Artificial sequence
  synthetic
ttctttttctatttttgttt

SEQ ID NO: 20770 - DNA, 20 bp, Artificial sequence
  synthetic
aaaatatcagggtactggag

SEQ ID NO: 20771 - DNA, 20 bp, Artificial sequence
  synthetic
aaatgtaacaattccctttg

SEQ ID NO: 20772 - DNA, 20 bp, Artificial sequence
  synthetic
atatgtgcccctgtcacctg

SEQ ID NO: 20773 - DNA, 20 bp, Artificial sequence
  synthetic
cttctcccgacatcgtcgcc

SEQ ID NO: 20774 - DNA, 20 bp, Artificial sequence
  synthetic
tactaggcacattgaagctc

SEQ ID NO: 20775 - DNA, 20 bp, Artificial sequence
  synthetic
tactgtaatggtaattgcta

SEQ ID NO: 20776 - DNA, 20 bp, Artificial sequence
  synthetic
acaatgttgtatgtgtaata

SEQ ID NO: 20777 - DNA, 20 bp, Artificial sequence
  synthetic
gtctccgccctttattagta

SEQ ID NO: 20778 - DNA, 20 bp, Artificial sequence
  synthetic
ggttgtacacagtgtggacg

SEQ ID NO: 20779 - DNA, 20 bp, Artificial sequence
  synthetic
acactgggcattgtgtgtcc

SEQ ID NO: 20780 - DNA, 20 bp, Artificial sequence
  synthetic
ttttaccccaactgtacctg

SEQ ID NO: 20781 - DNA, 20 bp, Artificial sequence
  synthetic
aataggtttaggaccgaaaa

SEQ ID NO: 20782 - DNA, 20 bp, Artificial sequence
  synthetic
cgaaaacggtacatataaaa

SEQ ID NO: 20783 - DNA, 20 bp, Artificial sequence
  synthetic
aacatagtgtgtgtagcaga

SEQ ID NO: 20784 - DNA, 20 bp, Artificial sequence
  synthetic
gacatggtccagattagatt

SEQ ID NO: 20785 - DNA, 20 bp, Artificial sequence
  synthetic
cataaccacatttacactat

SEQ ID NO: 20786 - DNA, 20 bp, Artificial sequence
  synthetic
ataaatcacagtttttttgt

SEQ ID NO: 20787 - DNA, 20 bp, Artificial sequence
  synthetic
ttttttgaaacgtaggcgtc

SEQ ID NO: 20788 - DNA, 20 bp, Artificial sequence
  synthetic
ctgacatgctggagacacac

SEQ ID NO: 20789 - DNA, 20 bp, Artificial sequence
  synthetic
cagtgttgtaggtgtgagtc

SEQ ID NO: 20790 - DNA, 20 bp, Artificial sequence
  synthetic
agggtccgaccgaaaacggt

SEQ ID NO: 20791 - DNA, 20 bp, Artificial sequence
  synthetic
tcctgcaggtacaccatatt

SEQ ID NO: 20792 - DNA, 20 bp, Artificial sequence
  synthetic
tgcatactatttcagaaaac

SEQ ID NO: 20793 - DNA, 20 bp, Artificial sequence
  synthetic
cattgtgtattttgtcactg

SEQ ID NO: 20794 - DNA, 20 bp, Artificial sequence
  synthetic
ggcattgctactaacccata

SEQ ID NO: 20795 - DNA, 20 bp, Artificial sequence
  synthetic
cgtagctggctgtggttgcg

SEQ ID NO: 20796 - DNA, 20 bp, Artificial sequence
  synthetic
cgttgcctttcagtacagtc

SEQ ID NO: 20797 - DNA, 20 bp, Artificial sequence
  synthetic
gaatatattctcatatcact

SEQ ID NO: 20798 - DNA, 20 bp, Artificial sequence
  synthetic
tgcccataatccaatgggtt

SEQ ID NO: 20799 - DNA, 20 bp, Artificial sequence
  synthetic
ctcctcgcttcggtctcccc

SEQ ID NO: 20800 - DNA, 20 bp, Artificial sequence
  synthetic
cttagtctgtaagttttggg

SEQ ID NO: 20801 - DNA, 20 bp, Artificial sequence
  synthetic
cgtaaattaatggtgtctac

SEQ ID NO: 20802 - DNA, 20 bp, Artificial sequence
  synthetic
cagcgaaccgattttcgatt

SEQ ID NO: 20803 - DNA, 20 bp, Artificial sequence
  synthetic
tgcacagagcatcagcaaat

SEQ ID NO: 20804 - DNA, 20 bp, Artificial sequence
  synthetic
ggatttatatgggaatattc

SEQ ID NO: 20805 - DNA, 20 bp, Artificial sequence
  synthetic
aagatgttgttcccgtcgtg

SEQ ID NO: 20806 - DNA, 20 bp, Artificial sequence
  synthetic
aacaaaaatgcaaacaagga

SEQ ID NO: 20807 - DNA, 20 bp, Artificial sequence
  synthetic
cttattttccgtatacaact

SEQ ID NO: 20808 - DNA, 20 bp, Artificial sequence
  synthetic
cactaatcctcgcatccgca

SEQ ID NO: 20809 - DNA, 20 bp, Artificial sequence
  synthetic
gccccgcttgtttctacact

SEQ ID NO: 20810 - DNA, 20 bp, Artificial sequence
  synthetic
tcgacatcgcgggcggcaaa

SEQ ID NO: 20811 - DNA, 20 bp, Artificial sequence
  synthetic
gttccggcttctgtattgca

SEQ ID NO: 20812 - DNA, 20 bp, Artificial sequence
  synthetic
gtttgctttggatccgttgt

SEQ ID NO: 20813 - DNA, 20 bp, Artificial sequence
  synthetic
tcattttgtgtaattggtat

SEQ ID NO: 20814 - DNA, 20 bp, Artificial sequence
  synthetic
aaaataaccaactacatggt

SEQ ID NO: 20815 - DNA, 20 bp, Artificial sequence
  synthetic
tcggggttagtcgattaata

SEQ ID NO: 20816 - DNA, 20 bp, Artificial sequence
  synthetic
cgatagatatatattttctc

SEQ ID NO: 20817 - DNA, 20 bp, Artificial sequence
  synthetic
acaggagagtataaagcagt

SEQ ID NO: 20818 - DNA, 20 bp, Artificial sequence
  synthetic
cgatgctccggtctatgact

SEQ ID NO: 20819 - DNA, 20 bp, Artificial sequence
  synthetic
gacttctacataggatacta

SEQ ID NO: 20820 - DNA, 20 bp, Artificial sequence
  synthetic
agaatgtaaaagaggcagag

SEQ ID NO: 20821 - DNA, 20 bp, Artificial sequence
  synthetic
agaatgtgtgactaaaatag

SEQ ID NO: 20822 - DNA, 20 bp, Artificial sequence
  synthetic
cctaacagtcgtagtatcct

SEQ ID NO: 20823 - DNA, 20 bp, Artificial sequence
  synthetic
ttgttttccatttttaattt

SEQ ID NO: 20824 - DNA, 20 bp, Artificial sequence
  synthetic
cagtatttaaaaagggagat

SEQ ID NO: 20825 - DNA, 20 bp, Artificial sequence
  synthetic
tcctaatgtgcagtcaggtg

SEQ ID NO: 20826 - DNA, 20 bp, Artificial sequence
  synthetic
tcagaaggtacctaaccaag

SEQ ID NO: 20827 - DNA, 20 bp, Artificial sequence
  synthetic
gaaagttaactggtaagttt

SEQ ID NO: 20828 - DNA, 20 bp, Artificial sequence
  synthetic
tagcagcggttggtttgaaa

SEQ ID NO: 20829 - DNA, 20 bp, Artificial sequence
  synthetic
agagctttgtttattttgtc

SEQ ID NO: 20830 - DNA, 20 bp, Artificial sequence
  synthetic
tgaaatcgcaattcgctgtg

SEQ ID NO: 20831 - DNA, 20 bp, Artificial sequence
  synthetic
tacgtgtaagcattgtcatt

SEQ ID NO: 20832 - DNA, 20 bp, Artificial sequence
  synthetic
cgaaatgggattgttattaa

SEQ ID NO: 20833 - DNA, 20 bp, Artificial sequence
  synthetic
acatttggaacattaaactc

SEQ ID NO: 20834 - DNA, 20 bp, Artificial sequence
  synthetic
tctctttctgtacgctgttt

SEQ ID NO: 20835 - DNA, 20 bp, Artificial sequence
  synthetic
taggcgacgcaaacgaaaac

SEQ ID NO: 20836 - DNA, 20 bp, Artificial sequence
  synthetic
agaagtgttcctgacctgtt

SEQ ID NO: 20837 - DNA, 20 bp, Artificial sequence
  synthetic
tgtgcaatctggtgaattta

SEQ ID NO: 20838 - DNA, 20 bp, Artificial sequence
  synthetic
ccagccaagcatgagctcat

SEQ ID NO: 20839 - DNA, 20 bp, Artificial sequence
  synthetic
actgggatcataaagtttca

SEQ ID NO: 20840 - DNA, 20 bp, Artificial sequence
  synthetic
cacgccgctcacgtaaaggc

SEQ ID NO: 20841 - DNA, 20 bp, Artificial sequence
  synthetic
tggagagggactccaagtcc

SEQ ID NO: 20842 - DNA, 20 bp, Artificial sequence
  synthetic
aaagcgcaaaggaaaaatgc

SEQ ID NO: 20843 - DNA, 20 bp, Artificial sequence
  synthetic
ataattgatcattttgaagc

SEQ ID NO: 20844 - DNA, 20 bp, Artificial sequence
  synthetic
caatctgaaaacctacaaag

SEQ ID NO: 20845 - DNA, 20 bp, Artificial sequence
  synthetic
ccattccgaagcgagttttc

SEQ ID NO: 20846 - DNA, 20 bp, Artificial sequence
  synthetic
ggcaacattaataaaaagcc

SEQ ID NO: 20847 - DNA, 20 bp, Artificial sequence
  synthetic
taggaactcatcaacattga

SEQ ID NO: 20848 - DNA, 20 bp, Artificial sequence
  synthetic
acttttcgtcttagaaacaa

SEQ ID NO: 20849 - DNA, 20 bp, Artificial sequence
  synthetic
cctgcgcgcgcgggaactgt

SEQ ID NO: 20850 - DNA, 20 bp, Artificial sequence
  synthetic
actcacccttccatctcttc

SEQ ID NO: 20851 - DNA, 20 bp, Artificial sequence
  synthetic
caaatacaaccacaaccaaa

SEQ ID NO: 20852 - DNA, 20 bp, Artificial sequence
  synthetic
tcataccaggattttttgga

SEQ ID NO: 20853 - DNA, 20 bp, Artificial sequence
  synthetic
aacctagtcacaactgctgt

SEQ ID NO: 20854 - DNA, 20 bp, Artificial sequence
  synthetic
aatttcttcggggtatgtat

SEQ ID NO: 20855 - DNA, 20 bp, Artificial sequence
  synthetic
atgttcgatatgggggtacg

SEQ ID NO: 20856 - DNA, 20 bp, Artificial sequence
  synthetic
aagattgttggaaagggatt

SEQ ID NO: 20857 - DNA, 20 bp, Artificial sequence
  synthetic
tactatgcatgtatttcagt

SEQ ID NO: 20858 - DNA, 20 bp, Artificial sequence
  synthetic
taatattctttgtggttttt

SEQ ID NO: 20859 - DNA, 20 bp, Artificial sequence
  synthetic
gttctgagttcatagaaaag

SEQ ID NO: 20860 - DNA, 20 bp, Artificial sequence
  synthetic
atttcaggtttcaaaattaa

SEQ ID NO: 20861 - DNA, 20 bp, Artificial sequence
  synthetic
aatataaaaggccgtttatg

SEQ ID NO: 20862 - DNA, 20 bp, Artificial sequence
  synthetic
ttcactagggttcttacata

SEQ ID NO: 20863 - DNA, 20 bp, Artificial sequence
  synthetic
atggaatattcaaaccattt

SEQ ID NO: 20864 - DNA, 20 bp, Artificial sequence
  synthetic
gtacgatttgctcgacaacg

SEQ ID NO: 20865 - DNA, 20 bp, Artificial sequence
  synthetic
tttccctacgaacaaataca

SEQ ID NO: 20866 - DNA, 20 bp, Artificial sequence
  synthetic
ccttacacaagaaaaaacgt

SEQ ID NO: 20867 - DNA, 20 bp, Artificial sequence
  synthetic
tttacgttttattgtagaaa

SEQ ID NO: 20868 - DNA, 20 bp, Artificial sequence
  synthetic
tgatccccgcttgctaattg

SEQ ID NO: 20869 - DNA, 20 bp, Artificial sequence
  synthetic
gactcgcctcttgatcgggc

SEQ ID NO: 20870 - DNA, 20 bp, Artificial sequence
  synthetic
aagcgtcaaccccggggaga

SEQ ID NO: 20871 - DNA, 20 bp, Artificial sequence
  synthetic
cgtaggacgatcggctgaag

SEQ ID NO: 20872 - DNA, 20 bp, Artificial sequence
  synthetic
acaaccatttataccgccaa

SEQ ID NO: 20873 - DNA, 20 bp, Artificial sequence
  synthetic
aacactaaatcaacacatca

SEQ ID NO: 20874 - DNA, 20 bp, Artificial sequence
  synthetic
gacaaaaggaaaatataaaa

SEQ ID NO: 20875 - DNA, 20 bp, Artificial sequence
  synthetic
ccggttcctaccccccgctc

SEQ ID NO: 20876 - DNA, 20 bp, Artificial sequence
  synthetic
tccgtctgcggggagggcgt

SEQ ID NO: 20877 - DNA, 20 bp, Artificial sequence
  synthetic
ggcgattcccttcgcgaggg

SEQ ID NO: 20878 - DNA, 20 bp, Artificial sequence
  synthetic
caggccctcgctgctctccc

SEQ ID NO: 20879 - DNA, 20 bp, Artificial sequence
  synthetic
gcaccacccagcggcccagt

SEQ ID NO: 20880 - DNA, 20 bp, Artificial sequence
  synthetic
gggtggggtgggggaaagcc

SEQ ID NO: 20881 - DNA, 20 bp, Artificial sequence
  synthetic
ctgcgccggctttcccccac

SEQ ID NO: 20882 - DNA, 20 bp, Artificial sequence
  synthetic
ttgggacgtgccagcatttc

SEQ ID NO: 20883 - DNA, 20 bp, Artificial sequence
  synthetic
ccaggaactcacggcagacg

SEQ ID NO: 20884 - DNA, 20 bp, Artificial sequence
  synthetic
cacggggacctcggttgggc

SEQ ID NO: 20885 - DNA, 20 bp, Artificial sequence
  synthetic
gcgatgacgtcattagcgag

SEQ ID NO: 20886 - DNA, 20 bp, Artificial sequence
  synthetic
tgcgcacgccagccgggacg

SEQ ID NO: 20887 - DNA, 20 bp, Artificial sequence
  synthetic
cgtggacgggacaccggtgt

SEQ ID NO: 20888 - DNA, 20 bp, Artificial sequence
  synthetic
ggcccgtcgctcggggtgct

SEQ ID NO: 20889 - DNA, 20 bp, Artificial sequence
  synthetic
ttgcgaacgactagtcgccg

SEQ ID NO: 20890 - DNA, 20 bp, Artificial sequence
  synthetic
ctacccccacccaaccagcg

SEQ ID NO: 20891 - DNA, 20 bp, Artificial sequence
  synthetic
gttggaccccgtgcatggac

SEQ ID NO: 20892 - DNA, 20 bp, Artificial sequence
  synthetic
catcattctcgaggcggctc

SEQ ID NO: 20893 - DNA, 20 bp, Artificial sequence
  synthetic
ctggggccgcgctcgttcga

SEQ ID NO: 20894 - DNA, 20 bp, Artificial sequence
  synthetic
cggctacacccccgcgcacc

SEQ ID NO: 20895 - DNA, 20 bp, Artificial sequence
  synthetic
acacagaggccagcaccagg

SEQ ID NO: 20896 - DNA, 20 bp, Artificial sequence
  synthetic
ccgcattcgcaccccggcac

SEQ ID NO: 20897 - DNA, 20 bp, Artificial sequence
  synthetic
gtcggtgtcgctgccgcccg

SEQ ID NO: 20898 - DNA, 20 bp, Artificial sequence
  synthetic
ccacgccccttccggcaccg

SEQ ID NO: 20899 - DNA, 20 bp, Artificial sequence
  synthetic
tgctgctgagccctgccccg

SEQ ID NO: 20900 - DNA, 20 bp, Artificial sequence
  synthetic
gtcgggttgccccttggggt

SEQ ID NO: 20901 - DNA, 20 bp, Artificial sequence
  synthetic
ttcccgagctcggcttgatg

SEQ ID NO: 20902 - DNA, 20 bp, Artificial sequence
  synthetic
tgtgtgtagaacccgcgcgg

SEQ ID NO: 20903 - DNA, 20 bp, Artificial sequence
  synthetic
cagcactactttcggttttg

SEQ ID NO: 20904 - DNA, 20 bp, Artificial sequence
  synthetic
ccaccccactattccccccc

SEQ ID NO: 20905 - DNA, 20 bp, Artificial sequence
  synthetic
tcaccccaccccatcctttg

SEQ ID NO: 20906 - DNA, 20 bp, Artificial sequence
  synthetic
agcgtgggcagctccggatc

SEQ ID NO: 20907 - DNA, 20 bp, Artificial sequence
  synthetic
acagcccctgggtgtcgacc

SEQ ID NO: 20908 - DNA, 20 bp, Artificial sequence
  synthetic
ccccccccaaaccttaacta

SEQ ID NO: 20909 - DNA, 20 bp, Artificial sequence
  synthetic
catctacaccttcaagacgt

SEQ ID NO: 20910 - DNA, 20 bp, Artificial sequence
  synthetic
tacataacagtagggggtgg

SEQ ID NO: 20911 - DNA, 20 bp, Artificial sequence
  synthetic
acgcgataccgggtgtgtgg

SEQ ID NO: 20912 - DNA, 20 bp, Artificial sequence
  synthetic
tcgacagattgttggcgact

SEQ ID NO: 20913 - DNA, 20 bp, Artificial sequence
  synthetic
ccgctgtttccgttcatcgc

SEQ ID NO: 20914 - DNA, 20 bp, Artificial sequence
  synthetic
agcgctccgatcggggtcag

SEQ ID NO: 20915 - DNA, 20 bp, Artificial sequence
  synthetic
tatacagctctgtagagaga

SEQ ID NO: 20916 - DNA, 20 bp, Artificial sequence
  synthetic
ggtcccccggcccccctaac

SEQ ID NO: 20917 - DNA, 20 bp, Artificial sequence
  synthetic
ttttatgcgggaacaagggg

SEQ ID NO: 20918 - DNA, 20 bp, Artificial sequence
  synthetic
taggttgggaggtggcacaa

SEQ ID NO: 20919 - DNA, 20 bp, Artificial sequence
  synthetic
tccggaagagagcgccccgc

SEQ ID NO: 20920 - DNA, 20 bp, Artificial sequence
  synthetic
gcctgccaacaccacgtcaa

SEQ ID NO: 20921 - DNA, 20 bp, Artificial sequence
  synthetic
ggtgagtacgccaaaaattt

SEQ ID NO: 20922 - DNA, 20 bp, Artificial sequence
  synthetic
tgacataaaagtagtgccaa

SEQ ID NO: 20923 - DNA, 20 bp, Artificial sequence
  synthetic
gttagccctaggtgtgaata

SEQ ID NO: 20924 - DNA, 20 bp, Artificial sequence
  synthetic
aagataaagccacctttgcc

SEQ ID NO: 20925 - DNA, 20 bp, Artificial sequence
  synthetic
gccagtagatcctagactag

SEQ ID NO: 20926 - DNA, 20 bp, Artificial sequence
  synthetic
catacctagaagaataagac

SEQ ID NO: 20927 - DNA, 20 bp, Artificial sequence
  synthetic
cattgttcatcagatctagt

SEQ ID NO: 20928 - DNA, 20 bp, Artificial sequence
  synthetic
ttcaaaattttctacaacat

SEQ ID NO: 20929 - DNA, 20 bp, Artificial sequence
  synthetic
ccggccccgtcgctcccgtc

SEQ ID NO: 20930 - DNA, 20 bp, Artificial sequence
  synthetic
ccaggcctaattgtccgcgc

SEQ ID NO: 20931 - DNA, 20 bp, Artificial sequence
  synthetic
ggttcagttgcacgactccg

SEQ ID NO: 20932 - DNA, 20 bp, Artificial sequence
  synthetic
catcgcgcccgccctcctcg

SEQ ID NO: 20933 - DNA, 20 bp, Artificial sequence
  synthetic
tcctgccccattgcgtccgc

SEQ ID NO: 20934 - DNA, 20 bp, Artificial sequence
  synthetic
agagaagccatcgcgggcgg

SEQ ID NO: 20935 - DNA, 20 bp, Artificial sequence
  synthetic
catttcctcgtggcgaaccg

SEQ ID NO: 20936 - DNA, 20 bp, Artificial sequence
  synthetic
gacagcaaccgcctgcacac

SEQ ID NO: 20937 - DNA, 20 bp, Artificial sequence
  synthetic
tgtgcagccgtgttccaacc

SEQ ID NO: 20938 - DNA, 20 bp, Artificial sequence
  synthetic
acaaaatccgccggggtgcc

SEQ ID NO: 20939 - DNA, 20 bp, Artificial sequence
  synthetic
tttaaagcggtggcggcggg

SEQ ID NO: 20940 - DNA, 20 bp, Artificial sequence
  synthetic
agttccgcgtcgacggcggg

SEQ ID NO: 20941 - DNA, 20 bp, Artificial sequence
  synthetic
aaatctgcaagtgccccaaa

SEQ ID NO: 20942 - DNA, 20 bp, Artificial sequence
  synthetic
cgcgcttcgccccagcgccg

SEQ ID NO: 20943 - DNA, 20 bp, Artificial sequence
  synthetic
gttggcacaaaaagaccccg

SEQ ID NO: 20944 - DNA, 20 bp, Artificial sequence
  synthetic
aaatacatgcccgggaccca

SEQ ID NO: 20945 - DNA, 20 bp, Artificial sequence
  synthetic
tggctatccggagaaacagc

SEQ ID NO: 20946 - DNA, 20 bp, Artificial sequence
  synthetic
cgatcatcagttatccttaa

SEQ ID NO: 20947 - DNA, 20 bp, Artificial sequence
  synthetic
ttcaggaagccggggagagg

SEQ ID NO: 20948 - DNA, 20 bp, Artificial sequence
  synthetic
ttgttgggctcccattttac

SEQ ID NO: 20949 - DNA, 20 bp, Artificial sequence
  synthetic
tgtgggattgcgtggtatgt

SEQ ID NO: 20950 - DNA, 20 bp, Artificial sequence
  synthetic
cttgggtgtggcacatcgaa

SEQ ID NO: 20951 - DNA, 20 bp, Artificial sequence
  synthetic
cacccgagtctctgggcgga

SEQ ID NO: 20952 - DNA, 20 bp, Artificial sequence
  synthetic
cggcggcgaccgttgcgtgg

SEQ ID NO: 20953 - DNA, 20 bp, Artificial sequence
  synthetic
ggcagcatgggacccacaga

SEQ ID NO: 20954 - DNA, 20 bp, Artificial sequence
  synthetic
ctcggcactcggagcgagac

SEQ ID NO: 20955 - DNA, 20 bp, Artificial sequence
  synthetic
agcaaggcgtccattctccc

SEQ ID NO: 20956 - DNA, 20 bp, Artificial sequence
  synthetic
atccagcgaagcagccgcct

SEQ ID NO: 20957 - DNA, 20 bp, Artificial sequence
  synthetic
cgagcttaagcctctcctgg

SEQ ID NO: 20958 - DNA, 20 bp, Artificial sequence
  synthetic
cacccggcggcgcgctcaac

SEQ ID NO: 20959 - DNA, 20 bp, Artificial sequence
  synthetic
acgcgagactatcagagcac

SEQ ID NO: 20960 - DNA, 20 bp, Artificial sequence
  synthetic
cgtgatcggggtacttcgcc

SEQ ID NO: 20961 - DNA, 20 bp, Artificial sequence
  synthetic
ggttttgtcgcaaggtgtcg

SEQ ID NO: 20962 - DNA, 20 bp, Artificial sequence
  synthetic
actcgggggacccgcatcgc

SEQ ID NO: 20963 - DNA, 20 bp, Artificial sequence
  synthetic
tttgggtccgggcccgtcgt

SEQ ID NO: 20964 - DNA, 20 bp, Artificial sequence
  synthetic
ctccccgggccaatatcgct

SEQ ID NO: 20965 - DNA, 20 bp, Artificial sequence
  synthetic
tatcaaaacactcgcctccg

SEQ ID NO: 20966 - DNA, 20 bp, Artificial sequence
  synthetic
aagcgaccctttgcggtttc

SEQ ID NO: 20967 - DNA, 20 bp, Artificial sequence
  synthetic
cgcacgaggacgagtccgcg

SEQ ID NO: 20968 - DNA, 20 bp, Artificial sequence
  synthetic
acatccaccgtagggggcct

SEQ ID NO: 20969 - DNA, 20 bp, Artificial sequence
  synthetic
caatacgcccgcgtttcttc

SEQ ID NO: 20970 - DNA, 20 bp, Artificial sequence
  synthetic
agccctgccatagccacggg

SEQ ID NO: 20971 - DNA, 20 bp, Artificial sequence
  synthetic
gcgtgaaactcccgcacctc

SEQ ID NO: 20972 - DNA, 20 bp, Artificial sequence
  synthetic
gccagacgcgggtccgctgt

SEQ ID NO: 20973 - DNA, 20 bp, Artificial sequence
  synthetic
ccggcggttggcgtgaacgc

SEQ ID NO: 20974 - DNA, 20 bp, Artificial sequence
  synthetic
caaccccggtctccaaccct

SEQ ID NO: 20975 - DNA, 20 bp, Artificial sequence
  synthetic
cgtcgtgccgggattacctc

SEQ ID NO: 20976 - DNA, 20 bp, Artificial sequence
  synthetic
gagcctcgttaagagccagg

SEQ ID NO: 20977 - DNA, 20 bp, Artificial sequence
  synthetic
ccctttggtgggtttacgcg

SEQ ID NO: 20978 - DNA, 20 bp, Artificial sequence
  synthetic
gccctcccgaccgacacccc

SEQ ID NO: 20979 - DNA, 20 bp, Artificial sequence
  synthetic
ctcgcaacgcctgcgggggt

SEQ ID NO: 20980 - DNA, 20 bp, Artificial sequence
  synthetic
tctcgtcgttggtctacgct

SEQ ID NO: 20981 - DNA, 20 bp, Artificial sequence
  synthetic
ctgctctcgcctactcttct

SEQ ID NO: 20982 - DNA, 20 bp, Artificial sequence
  synthetic
gccgacgtcccctctcgagc

SEQ ID NO: 20983 - DNA, 20 bp, Artificial sequence
  synthetic
aggcccgccgccactgtcgt

SEQ ID NO: 20984 - DNA, 20 bp, Artificial sequence
  synthetic
ctaacggattattgtcctct

SEQ ID NO: 20985 - DNA, 20 bp, Artificial sequence
  synthetic
ccaaccacgccttagttagg

SEQ ID NO: 20986 - DNA, 20 bp, Artificial sequence
  synthetic
cctggctgccatcaaaaccc

SEQ ID NO: 20987 - DNA, 20 bp, Artificial sequence
  synthetic
accgaagcccacctcgtcac

SEQ ID NO: 20988 - DNA, 20 bp, Artificial sequence
  synthetic
ctatcccgcccaccgctggg

SEQ ID NO: 20989 - DNA, 20 bp, Artificial sequence
  synthetic
ggagcaaaacgcctccccct

SEQ ID NO: 20990 - DNA, 20 bp, Artificial sequence
  synthetic
acctaccaacggaacgtctg

SEQ ID NO: 20991 - DNA, 20 bp, Artificial sequence
  synthetic
tacaaactccctggtcttac

SEQ ID NO: 20992 - DNA, 20 bp, Artificial sequence
  synthetic
aacaagtgggggctcgtccg

SEQ ID NO: 20993 - DNA, 20 bp, Artificial sequence
  synthetic
ttctgtgttgtctctgtttg

SEQ ID NO: 20994 - DNA, 20 bp, Artificial sequence
  synthetic
caacctcgtcacggagaatc

SEQ ID NO: 20995 - DNA, 20 bp, Artificial sequence
  synthetic
tacttccggtattaagccct

SEQ ID NO: 20996 - DNA, 20 bp, Artificial sequence
  synthetic
actaaagattggagaaggtc

SEQ ID NO: 20997 - DNA, 20 bp, Artificial sequence
  synthetic
aaggctcttgcttactatcc

SEQ ID NO: 20998 - DNA, 20 bp, Artificial sequence
  synthetic
cagccggggtcccgcccccg

SEQ ID NO: 20999 - DNA, 20 bp, Artificial sequence
  synthetic
ccacagtgtgagattaacat

SEQ ID NO: 21000 - DNA, 20 bp, Artificial sequence
  synthetic
tcgttgtgggcatcgttgga

SEQ ID NO: 21001 - DNA, 20 bp, Artificial sequence
  synthetic
gggataatacttatcatttt

SEQ ID NO: 21002 - DNA, 20 bp, Artificial sequence
  synthetic
agcaagggagaaacacgtgg

SEQ ID NO: 21003 - DNA, 20 bp, Artificial sequence
  synthetic
tagggatggccgaaaggcag

SEQ ID NO: 21004 - DNA, 20 bp, Artificial sequence
  synthetic
tactattgagttcgcccgct

SEQ ID NO: 21005 - DNA, 20 bp, Artificial sequence
  synthetic
cattcactttgcagtttgtt

SEQ ID NO: 21006 - DNA, 20 bp, Artificial sequence
  synthetic
acgagtgaggtcgacgtcat

SEQ ID NO: 21007 - DNA, 20 bp, Artificial sequence
  synthetic
acaagcctccccccaggccc

SEQ ID NO: 21008 - DNA, 20 bp, Artificial sequence
  synthetic
atcctcctctctacaccaac

SEQ ID NO: 21009 - DNA, 20 bp, Artificial sequence
  synthetic
attaaggcctaagtggagga

SEQ ID NO: 21010 - DNA, 20 bp, Artificial sequence
  synthetic
gaaatctgtgagtattgaca

SEQ ID NO: 21011 - DNA, 20 bp, Artificial sequence
  synthetic
tacgtcacaggagagcatac

SEQ ID NO: 21012 - DNA, 20 bp, Artificial sequence
  synthetic
agacacctagggatggaaga

SEQ ID NO: 21013 - DNA, 20 bp, Artificial sequence
  synthetic
taccgtaacaatccctcacc

SEQ ID NO: 21014 - DNA, 20 bp, Artificial sequence
  synthetic
ttctggaaagcctctgtgtc

SEQ ID NO: 21015 - DNA, 20 bp, Artificial sequence
  synthetic
acagtgacaattggtcttgg

SEQ ID NO: 21016 - DNA, 20 bp, Artificial sequence
  synthetic
attaaacagtgtctcaggtt

SEQ ID NO: 21017 - DNA, 20 bp, Artificial sequence
  synthetic
agacaatcattcagccccgt

SEQ ID NO: 21018 - DNA, 20 bp, Artificial sequence
  synthetic
ctgaaagtggtcaggattga

SEQ ID NO: 21019 - DNA, 20 bp, Artificial sequence
  synthetic
taattgtctacgggtagttt

SEQ ID NO: 21020 - DNA, 20 bp, Artificial sequence
  synthetic
gtcctcctgaccacccccac

SEQ ID NO: 21021 - DNA, 20 bp, Artificial sequence
  synthetic
accaatcaagacctctcgga

SEQ ID NO: 21022 - DNA, 20 bp, Artificial sequence
  synthetic
ctggccggcgaccatacctg

SEQ ID NO: 21023 - DNA, 20 bp, Artificial sequence
  synthetic
cctcggattgtggacaggag

SEQ ID NO: 21024 - DNA, 20 bp, Artificial sequence
  synthetic
gctagcagtgaaaatgctaa

SEQ ID NO: 21025 - DNA, 20 bp, Artificial sequence
  synthetic
ggggctagctcgggtccaca

SEQ ID NO: 21026 - DNA, 20 bp, Artificial sequence
  synthetic
aaacctactggtcctgttat

SEQ ID NO: 21027 - DNA, 20 bp, Artificial sequence
  synthetic
tgctataagcacaactttcc

SEQ ID NO: 21028 - DNA, 20 bp, Artificial sequence
  synthetic
atcgagttgctaggcaataa

SEQ ID NO: 21029 - DNA, 20 bp, Artificial sequence
  synthetic
atgcccacggcacatcttaa

SEQ ID NO: 21030 - DNA, 20 bp, Artificial sequence
  synthetic
gaggacgtatcggaaactct

SEQ ID NO: 21031 - DNA, 20 bp, Artificial sequence
  synthetic
cgagcaggatctccattttg

SEQ ID NO: 21032 - DNA, 20 bp, Artificial sequence
  synthetic
cctcacctttcattgtcgat

SEQ ID NO: 21033 - DNA, 20 bp, Artificial sequence
  synthetic
acatcataagaagcgccata

SEQ ID NO: 21034 - DNA, 20 bp, Artificial sequence
  synthetic
cacagaaccccagctgctat

SEQ ID NO: 21035 - DNA, 20 bp, Artificial sequence
  synthetic
agcgaccgaacggaccatat

SEQ ID NO: 21036 - DNA, 20 bp, Artificial sequence
  synthetic
ggcatagttgttatcgttct

SEQ ID NO: 21037 - DNA, 20 bp, Artificial sequence
  synthetic
acacaattgcctacctgctt

SEQ ID NO: 21038 - DNA, 20 bp, Artificial sequence
  synthetic
ctcgaagcttattgtcttca

SEQ ID NO: 21039 - DNA, 20 bp, Artificial sequence
  synthetic
agattaagccgacagtgagc

SEQ ID NO: 21040 - DNA, 20 bp, Artificial sequence
  synthetic
taaccaaaataaactccact

SEQ ID NO: 21041 - DNA, 20 bp, Artificial sequence
  synthetic
gggaaagaagcctttttatt

SEQ ID NO: 21042 - DNA, 20 bp, Artificial sequence
  synthetic
gtgtggaagcaaagttctgt

SEQ ID NO: 21043 - DNA, 20 bp, Artificial sequence
  synthetic
acaaacacttttggtcttgg

SEQ ID NO: 21044 - DNA, 20 bp, Artificial sequence
  synthetic
tactatatgtgtctcctata

SEQ ID NO: 21045 - DNA, 20 bp, Artificial sequence
  synthetic
ttctccagttacggagcgag

SEQ ID NO: 21046 - DNA, 20 bp, Artificial sequence
  synthetic
atgggcgcggacctgcactg

SEQ ID NO: 21047 - DNA, 20 bp, Artificial sequence
  synthetic
gagggcgagtacctggaaga

SEQ ID NO: 21048 - DNA, 20 bp, Artificial sequence
  synthetic
gtggtggtggtaacccgttc

SEQ ID NO: 21049 - DNA, 20 bp, Artificial sequence
  synthetic
ggccatggcgaccagcgtgc

SEQ ID NO: 21050 - DNA, 20 bp, Artificial sequence
  synthetic
aggtgatgtcagtatttata

SEQ ID NO: 21051 - DNA, 20 bp, Artificial sequence
  synthetic
agatgttcacttcgcgatgt

SEQ ID NO: 21052 - DNA, 20 bp, Artificial sequence
  synthetic
ctaccacccgagcattacca

SEQ ID NO: 21053 - DNA, 20 bp, Artificial sequence
  synthetic
gaatggactctgacgctcct

SEQ ID NO: 21054 - DNA, 20 bp, Artificial sequence
  synthetic
gagtgtgaagcgccgccgct

SEQ ID NO: 21055 - DNA, 20 bp, Artificial sequence
  synthetic
tgtccagaaggaggagtgaa

SEQ ID NO: 21056 - DNA, 20 bp, Artificial sequence
  synthetic
tcagccggtaacgccaccac

SEQ ID NO: 21057 - DNA, 20 bp, Artificial sequence
  synthetic
ttcctccgcggccggccatt

SEQ ID NO: 21058 - DNA, 20 bp, Artificial sequence
  synthetic
cagcgcacgcttgaggacgc

SEQ ID NO: 21059 - DNA, 20 bp, Artificial sequence
  synthetic
tcccgaacttcgatgccatc

SEQ ID NO: 21060 - DNA, 20 bp, Artificial sequence
  synthetic
agtgcggatcgtcgtcgaag

SEQ ID NO: 21061 - DNA, 20 bp, Artificial sequence
  synthetic
cgtcggtgtgctttgtgggt

SEQ ID NO: 21062 - DNA, 20 bp, Artificial sequence
  synthetic
ttcatcttctgccgccgcat

SEQ ID NO: 21063 - DNA, 20 bp, Artificial sequence
  synthetic
ggtctaaggaatcttctctt

SEQ ID NO: 21064 - DNA, 20 bp, Artificial sequence
  synthetic
taccgcgaccaaagagtggc

SEQ ID NO: 21065 - DNA, 20 bp, Artificial sequence
  synthetic
ggaatccatctgaagagacg

SEQ ID NO: 21066 - DNA, 20 bp, Artificial sequence
  synthetic
catcatccacccgcgcgcgc

SEQ ID NO: 21067 - DNA, 20 bp, Artificial sequence
  synthetic
tgtcaaattcctcctgtccc

SEQ ID NO: 21068 - DNA, 20 bp, Artificial sequence
  synthetic
gacctgcattttgaagtgtt

SEQ ID NO: 21069 - DNA, 20 bp, Artificial sequence
  synthetic
aggggcagaatgattaaaat

SEQ ID NO: 21070 - DNA, 20 bp, Artificial sequence
  synthetic
aaaaatttcggagaagatat

SEQ ID NO: 21071 - DNA, 20 bp, Artificial sequence
  synthetic
cgtgttggcgggtattttta

SEQ ID NO: 21072 - DNA, 20 bp, Artificial sequence
  synthetic
agctcagctttttctctgac

SEQ ID NO: 21073 - DNA, 20 bp, Artificial sequence
  synthetic
acggggacacggacagcctc

SEQ ID NO: 21074 - DNA, 20 bp, Artificial sequence
  synthetic
agggcgagctcaacgagccg

SEQ ID NO: 21075 - DNA, 20 bp, Artificial sequence
  synthetic
gtgtaggtttccacatcgta

SEQ ID NO: 21076 - DNA, 20 bp, Artificial sequence
  synthetic
ggtggaagccatctctggat

SEQ ID NO: 21077 - DNA, 20 bp, Artificial sequence
  synthetic
gagattacccagctcggagt

SEQ ID NO: 21078 - DNA, 20 bp, Artificial sequence
  synthetic
tccgggatcgatcacctctc

SEQ ID NO: 21079 - DNA, 20 bp, Artificial sequence
  synthetic
gatcattctctatctctatt

SEQ ID NO: 21080 - DNA, 20 bp, Artificial sequence
  synthetic
agacagatcccaaaatcata

SEQ ID NO: 21081 - DNA, 20 bp, Artificial sequence
  synthetic
actaaacgttccacaataaa

SEQ ID NO: 21082 - DNA, 20 bp, Artificial sequence
  synthetic
cagtggatacctcagcatcc

SEQ ID NO: 21083 - DNA, 20 bp, Artificial sequence
  synthetic
tcctgaagccgaaggagagg

SEQ ID NO: 21084 - DNA, 20 bp, Artificial sequence
  synthetic
gtacattgtagcatacatac

SEQ ID NO: 21085 - DNA, 20 bp, Artificial sequence
  synthetic
ccagtcgttttgacagttgg

SEQ ID NO: 21086 - DNA, 20 bp, Artificial sequence
  synthetic
cccaaaggagaccacctcag

SEQ ID NO: 21087 - DNA, 20 bp, Artificial sequence
  synthetic
gaggcccacgaataggctag

SEQ ID NO: 21088 - DNA, 20 bp, Artificial sequence
  synthetic
tgtgttgagaaaaagacagc

SEQ ID NO: 21089 - DNA, 20 bp, Artificial sequence
  synthetic
cgtgaacgtgttgagaaaaa

SEQ ID NO: 21090 - DNA, 20 bp, Artificial sequence
  synthetic
aactagtctatgaccagacg

SEQ ID NO: 21091 - DNA, 20 bp, Artificial sequence
  synthetic
agtatgaaagctactctcag

SEQ ID NO: 21092 - DNA, 20 bp, Artificial sequence
  synthetic
gatctggggtatcacattcc

SEQ ID NO: 21093 - DNA, 20 bp, Artificial sequence
  synthetic
taagcgactatggatctgat

SEQ ID NO: 21094 - DNA, 20 bp, Artificial sequence
  synthetic
ccccccacagggatgtgggg

SEQ ID NO: 21095 - DNA, 20 bp, Artificial sequence
  synthetic
ggaacctttgtggctcctct

SEQ ID NO: 21096 - DNA, 20 bp, Artificial sequence
  synthetic
aggggcctatattttcctgc

SEQ ID NO: 21097 - DNA, 20 bp, Artificial sequence
  synthetic
tttgtactaggaggctgtag

SEQ ID NO: 21098 - DNA, 20 bp, Artificial sequence
  synthetic
tgcagttaatcattacttca

SEQ ID NO: 21099 - DNA, 20 bp, Artificial sequence
  synthetic
tggggtggagccctcaggct

SEQ ID NO: 21100 - DNA, 20 bp, Artificial sequence
  synthetic
gaagaatgtcctgaaggcaa

SEQ ID NO: 21101 - DNA, 20 bp, Artificial sequence
  synthetic
aagcagcagcagaaacgcgg

SEQ ID NO: 21102 - DNA, 20 bp, Artificial sequence
  synthetic
tcgacgcggggtcaaaaact

SEQ ID NO: 21103 - DNA, 20 bp, Artificial sequence
  synthetic
ttgcatatccctaggcacct

SEQ ID NO: 21104 - DNA, 20 bp, Artificial sequence
  synthetic
gtcgcggctggccgcctgta

SEQ ID NO: 21105 - DNA, 20 bp, Artificial sequence
  synthetic
tacctttcctaatgcatttc

SEQ ID NO: 21106 - DNA, 20 bp, Artificial sequence
  synthetic
tggccatgtggaccatgcag

SEQ ID NO: 21107 - DNA, 20 bp, Artificial sequence
  synthetic
tgggaacactggcacctggg

SEQ ID NO: 21108 - DNA, 20 bp, Artificial sequence
  synthetic
gggtttgtgggtgtcataca

SEQ ID NO: 21109 - DNA, 20 bp, Artificial sequence
  synthetic
tttgtatttttcattttttt

SEQ ID NO: 21110 - DNA, 20 bp, Artificial sequence
  synthetic
aggtttgctacctaaaaaac

SEQ ID NO: 21111 - DNA, 20 bp, Artificial sequence
  synthetic
gtggtaacaagttgttgtag

SEQ ID NO: 21112 - DNA, 20 bp, Artificial sequence
  synthetic
agttgaaaccttggtttccg

SEQ ID NO: 21113 - DNA, 20 bp, Artificial sequence
  synthetic
gacagtcaaaatgattatga

SEQ ID NO: 21114 - DNA, 20 bp, Artificial sequence
  synthetic
ctcaagaaaagaaactgggc

SEQ ID NO: 21115 - DNA, 20 bp, Artificial sequence
  synthetic
ccaataatatcgtacatctt

SEQ ID NO: 21116 - DNA, 20 bp, Artificial sequence
  synthetic
attaaggcgacaacgagccg

SEQ ID NO: 21117 - DNA, 20 bp, Artificial sequence
  synthetic
gagattgtaggtagaaagga

SEQ ID NO: 21118 - DNA, 20 bp, Artificial sequence
  synthetic
aagatggatcctgtatctgt

SEQ ID NO: 21119 - DNA, 20 bp, Artificial sequence
  synthetic
gtttaagagttgacaaggtc

SEQ ID NO: 21120 - DNA, 20 bp, Artificial sequence
  synthetic
gcaagcgtatagttcgggat

SEQ ID NO: 21121 - DNA, 20 bp, Artificial sequence
  synthetic
ttgtaaaaaatgtgcttacc

SEQ ID NO: 21122 - DNA, 20 bp, Artificial sequence
  synthetic
aaaatgaaacagggtttcaa

SEQ ID NO: 21123 - DNA, 20 bp, Artificial sequence
  synthetic
tactactttagttcaatatg

SEQ ID NO: 21124 - DNA, 20 bp, Artificial sequence
  synthetic
tgtctttaattgcctcttgt

SEQ ID NO: 21125 - DNA, 20 bp, Artificial sequence
  synthetic
tccgaatgtcctattttgat

SEQ ID NO: 21126 - DNA, 20 bp, Artificial sequence
  synthetic
aagctcctttggttgttcgc

SEQ ID NO: 21127 - DNA, 20 bp, Artificial sequence
  synthetic
gaaatcacagagtatcattt

SEQ ID NO: 21128 - DNA, 20 bp, Artificial sequence
  synthetic
tgtggagatctaggacacat

SEQ ID NO: 21129 - DNA, 20 bp, Artificial sequence
  synthetic
agctatgcaaagtatagata

SEQ ID NO: 21130 - DNA, 20 bp, Artificial sequence
  synthetic
tgagtttgtaaataagtttc

SEQ ID NO: 21131 - DNA, 20 bp, Artificial sequence
  synthetic
tgagggacatttggactatc

SEQ ID NO: 21132 - DNA, 20 bp, Artificial sequence
  synthetic
agagttagaggagcttggaa

SEQ ID NO: 21133 - DNA, 20 bp, Artificial sequence
  synthetic
ctacaagatagtttcctcgt

SEQ ID NO: 21134 - DNA, 20 bp, Artificial sequence
  synthetic
ttattaacctctatatttct

SEQ ID NO: 21135 - DNA, 20 bp, Artificial sequence
  synthetic
tggcgtcgcaaggcaccaaa

SEQ ID NO: 21136 - DNA, 20 bp, Artificial sequence
  synthetic
tctaaccgaggtcgaaacgt

SEQ ID NO: 21137 - DNA, 20 bp, Artificial sequence
  synthetic
caacctggccatcgggctgc

SEQ ID NO: 21138 - DNA, 20 bp, Artificial sequence
  synthetic
gcaggtggcgcccaacgtgg

SEQ ID NO: 21139 - DNA, 20 bp, Artificial sequence
  synthetic
agtaaaatgggtgtctattt

SEQ ID NO: 21140 - DNA, 20 bp, Artificial sequence
  synthetic
ggtaaacagcatcaaggtat

SEQ ID NO: 21141 - DNA, 20 bp, Artificial sequence
  synthetic
caatctgtggtatggaccag

SEQ ID NO: 21142 - DNA, 20 bp, Artificial sequence
  synthetic
gctaaccaatttaatttggt

SEQ ID NO: 21143 - DNA, 20 bp, Artificial sequence
  synthetic
ctaaccaatttaatttggtg

SEQ ID NO: 21144 - DNA, 20 bp, Artificial sequence
  synthetic
tgagtaaaattttaaacaca

SEQ ID NO: 21145 - DNA, 20 bp, Artificial sequence
  synthetic
cagtaaatgaaataaaaagc

SEQ ID NO: 21146 - DNA, 20 bp, Artificial sequence
  synthetic
agacttgctgctagaagaac

SEQ ID NO: 21147 - DNA, 20 bp, Artificial sequence
  synthetic
atacacatcctggcagttca

SEQ ID NO: 21148 - DNA, 20 bp, Artificial sequence
  synthetic
gaagttatatacactgagcc

SEQ ID NO: 21149 - DNA, 20 bp, Artificial sequence
  synthetic
gtggataatgttactaggct

SEQ ID NO: 21150 - DNA, 20 bp, Artificial sequence
  synthetic
aaaccaccagtccttgatgt

SEQ ID NO: 21151 - DNA, 20 bp, Artificial sequence
  synthetic
ttgacaggataagcgatact

SEQ ID NO: 21152 - DNA, 20 bp, Artificial sequence
  synthetic
aataatggtcgttttggtgg

SEQ ID NO: 21153 - DNA, 20 bp, Artificial sequence
  synthetic
aagtgttgtattttctgtgt

SEQ ID NO: 21154 - DNA, 20 bp, Artificial sequence
  synthetic
gatctgtctgctgagggtag

SEQ ID NO: 21155 - DNA, 20 bp, Artificial sequence
  synthetic
cgcgagacctggtgtttgac

SEQ ID NO: 21156 - DNA, 20 bp, Artificial sequence
  synthetic
gagtcgattcggtcggttaa

SEQ ID NO: 21157 - DNA, 20 bp, Artificial sequence
  synthetic
cgggagactaggtcgtcttg

SEQ ID NO: 21158 - DNA, 20 bp, Artificial sequence
  synthetic
aaccaaaccacaaggcagac

SEQ ID NO: 21159 - DNA, 20 bp, Artificial sequence
  synthetic
aaccaccacctggatcacgc

SEQ ID NO: 21160 - DNA, 20 bp, Artificial sequence
  synthetic
agtctggagcgtagtgccta

SEQ ID NO: 21161 - DNA, 20 bp, Artificial sequence
  synthetic
cgacttgtgtaccgattctg

SEQ ID NO: 21162 - DNA, 20 bp, Artificial sequence
  synthetic
tcggagagggtatattcgtt

SEQ ID NO: 21163 - DNA, 20 bp, Artificial sequence
  synthetic
cctcttcgtccccgtcgcct

SEQ ID NO: 21164 - DNA, 20 bp, Artificial sequence
  synthetic
gacacgcaacttttggccgc

SEQ ID NO: 21165 - DNA, 20 bp, Artificial sequence
  synthetic
gttcacctttgcgcatcccc

SEQ ID NO: 21166 - DNA, 20 bp, Artificial sequence
  synthetic
acactcaataatccgcggtt

SEQ ID NO: 21167 - DNA, 20 bp, Artificial sequence
  synthetic
accgcaggttagcggcgagt

SEQ ID NO: 21168 - DNA, 20 bp, Artificial sequence
  synthetic
gttcgtctccgcttctcctc

SEQ ID NO: 21169 - DNA, 20 bp, Artificial sequence
  synthetic
gctgctttccccgagctccg

SEQ ID NO: 21170 - DNA, 20 bp, Artificial sequence
  synthetic
gccacatcgggcctgtgttc

SEQ ID NO: 21171 - DNA, 20 bp, Artificial sequence
  synthetic
gacggcagttctgaacccac

SEQ ID NO: 21172 - DNA, 20 bp, Artificial sequence
  synthetic
cgcccgtcccacaagccacg

SEQ ID NO: 21173 - DNA, 20 bp, Artificial sequence
  synthetic
gtggagtgcgtcaacgacat

SEQ ID NO: 21174 - DNA, 20 bp, Artificial sequence
  synthetic
ccactatcagtgcaatattt

SEQ ID NO: 21175 - DNA, 20 bp, Artificial sequence
  synthetic
tcatctggtagcgcttgcgg

SEQ ID NO: 21176 - DNA, 20 bp, Artificial sequence
  synthetic
aggaccttgacggtgactgc

SEQ ID NO: 21177 - DNA, 20 bp, Artificial sequence
  synthetic
ttccactgcgaccacatccc

SEQ ID NO: 21178 - DNA, 20 bp, Artificial sequence
  synthetic
ttagaccgttggagtcgcga

SEQ ID NO: 21179 - DNA, 20 bp, Artificial sequence
  synthetic
ccgcgcgcccccatcgcctc

SEQ ID NO: 21180 - DNA, 20 bp, Artificial sequence
  synthetic
gccgatgacgacaggctcgc

SEQ ID NO: 21181 - DNA, 20 bp, Artificial sequence
  synthetic
ctatcaacgtcttgtcgcta

SEQ ID NO: 21182 - DNA, 20 bp, Artificial sequence
  synthetic
agtctgaaacggggtgggag

SEQ ID NO: 21183 - DNA, 20 bp, Artificial sequence
  synthetic
ggcagacgaggagcggcgcg

SEQ ID NO: 21184 - DNA, 20 bp, Artificial sequence
  synthetic
gcacgcgcgtgccgccggcc

SEQ ID NO: 21185 - DNA, 20 bp, Artificial sequence
  synthetic
tgcacactccgtagagcagc

SEQ ID NO: 21186 - DNA, 20 bp, Artificial sequence
  synthetic
cctgggacgcgcagttgggc

SEQ ID NO: 21187 - DNA, 20 bp, Artificial sequence
  synthetic
gggtgttgctaggcgggctg

SEQ ID NO: 21188 - DNA, 20 bp, Artificial sequence
  synthetic
gcccgagctgaagcagacgc

SEQ ID NO: 21189 - DNA, 20 bp, Artificial sequence
  synthetic
cgccaactggctccttaccg

SEQ ID NO: 21190 - DNA, 20 bp, Artificial sequence
  synthetic
accctgtgcgcttccatcgt

SEQ ID NO: 21191 - DNA, 20 bp, Artificial sequence
  synthetic
cacttgccgctgtacaacga

SEQ ID NO: 21192 - DNA, 20 bp, Artificial sequence
  synthetic
tcagcctctgtgttcccaac

SEQ ID NO: 21193 - DNA, 20 bp, Artificial sequence
  synthetic
tcctgccacatatagctcgt

SEQ ID NO: 21194 - DNA, 20 bp, Artificial sequence
  synthetic
gtttaataaaagtagctttt

SEQ ID NO: 21195 - DNA, 20 bp, Artificial sequence
  synthetic
agacgtcagaaccgtcgcgg

SEQ ID NO: 21196 - DNA, 20 bp, Artificial sequence
  synthetic
gatggcggcgatatgggctc

SEQ ID NO: 21197 - DNA, 20 bp, Artificial sequence
  synthetic
cgtcgttcgcggacatagca

SEQ ID NO: 21198 - DNA, 20 bp, Artificial sequence
  synthetic
atgagtcgggcggtggccgg

SEQ ID NO: 21199 - DNA, 20 bp, Artificial sequence
  synthetic
gaacaacgcatttacgacgt

SEQ ID NO: 21200 - DNA, 20 bp, Artificial sequence
  synthetic
atgttaatgtaacaagacaa

SEQ ID NO: 21201 - DNA, 20 bp, Artificial sequence
  synthetic
ataagagcccggtgctatcg

SEQ ID NO: 21202 - DNA, 20 bp, Artificial sequence
  synthetic
cgtaggtggactttgtagta

SEQ ID NO: 21203 - DNA, 20 bp, Artificial sequence
  synthetic
gacaccgttcggccccatga

SEQ ID NO: 21204 - DNA, 20 bp, Artificial sequence
  synthetic
gttgcgggcatcccgggcga

SEQ ID NO: 21205 - DNA, 20 bp, Artificial sequence
  synthetic
gaacaggcgggcagcgtctc

SEQ ID NO: 21206 - DNA, 20 bp, Artificial sequence
  synthetic
acagtccctacggaacctga

SEQ ID NO: 21207 - DNA, 20 bp, Artificial sequence
  synthetic
tgcagagcgtcatgaaggac

SEQ ID NO: 21208 - DNA, 20 bp, Artificial sequence
  synthetic
acacgccttccctctttttc

SEQ ID NO: 21209 - DNA, 20 bp, Artificial sequence
  synthetic
tctccttcctcagtgtttgg

SEQ ID NO: 21210 - DNA, 20 bp, Artificial sequence
  synthetic
tttaagtcacggaggaagtt

SEQ ID NO: 21211 - DNA, 20 bp, Artificial sequence
  synthetic
tagacccacgcagatagcca

SEQ ID NO: 21212 - DNA, 20 bp, Artificial sequence
  synthetic
ctttcgcggcggacacgggg

SEQ ID NO: 21213 - DNA, 20 bp, Artificial sequence
  synthetic
ttaacgtcttcatccccccg

SEQ ID NO: 21214 - DNA, 20 bp, Artificial sequence
  synthetic
tcaacagcagacgttgtggg

SEQ ID NO: 21215 - DNA, 20 bp, Artificial sequence
  synthetic
tttgtgttgcttttagcagc

SEQ ID NO: 21216 - DNA, 20 bp, Artificial sequence
  synthetic
cgcgggtttgcttcctatat

SEQ ID NO: 21217 - DNA, 20 bp, Artificial sequence
  synthetic
tgattcccttcataaagctg

SEQ ID NO: 21218 - DNA, 20 bp, Artificial sequence
  synthetic
tgcggccttagcggctcggg

SEQ ID NO: 21219 - DNA, 20 bp, Artificial sequence
  synthetic
aggaggtgacctggctgctt

SEQ ID NO: 21220 - DNA, 20 bp, Artificial sequence
  synthetic
gtaggggaaacaacgtcacc

SEQ ID NO: 21221 - DNA, 20 bp, Artificial sequence
  synthetic
gaaaaacacgacgaaagcgt

SEQ ID NO: 21222 - DNA, 20 bp, Artificial sequence
  synthetic
atataatcgccgtttcgtaa

SEQ ID NO: 21223 - DNA, 20 bp, Artificial sequence
  synthetic
tgtatgtgaaaggttggctg

SEQ ID NO: 21224 - DNA, 20 bp, Artificial sequence
  synthetic
agtcgctcggaaacgactca

SEQ ID NO: 21225 - DNA, 20 bp, Artificial sequence
  synthetic
cagcttttgagtctagacag

SEQ ID NO: 21226 - DNA, 20 bp, Artificial sequence
  synthetic
gaccgtctttgccgccttca

SEQ ID NO: 21227 - DNA, 20 bp, Artificial sequence
  synthetic
gacaacggcacgctcagcgt

SEQ ID NO: 21228 - DNA, 20 bp, Artificial sequence
  synthetic
actccaccgagacgctcacc

SEQ ID NO: 21229 - DNA, 20 bp, Artificial sequence
  synthetic
ctcagcctggttttcactct

SEQ ID NO: 21230 - DNA, 20 bp, Artificial sequence
  synthetic
tagcttcgagaccttgcgga

SEQ ID NO: 21231 - DNA, 20 bp, Artificial sequence
  synthetic
aactggttttcggacagagc

SEQ ID NO: 21232 - DNA, 20 bp, Artificial sequence
  synthetic
tcaacaataaagctttttca

SEQ ID NO: 21233 - DNA, 20 bp, Artificial sequence
  synthetic
cgggtcggatacagggtgcc

SEQ ID NO: 21234 - DNA, 20 bp, Artificial sequence
  synthetic
atgcctataaaaccgcgccc

SEQ ID NO: 21235 - DNA, 20 bp, Artificial sequence
  synthetic
agcggcgtcgccccagttcg

SEQ ID NO: 21236 - DNA, 20 bp, Artificial sequence
  synthetic
cgcgcagcgcgctttatccg

SEQ ID NO: 21237 - DNA, 20 bp, Artificial sequence
  synthetic
tttctctgcttcttttctgg

SEQ ID NO: 21238 - DNA, 20 bp, Artificial sequence
  synthetic
cgtcgatgtcagtcttttcg

SEQ ID NO: 21239 - DNA, 20 bp, Artificial sequence
  synthetic
ccgaatcgtaccggcgtctg

SEQ ID NO: 21240 - DNA, 20 bp, Artificial sequence
  synthetic
acaaaccccgtgtccgcccc

SEQ ID NO: 21241 - DNA, 20 bp, Artificial sequence
  synthetic
cctgggtacttatggggagc

SEQ ID NO: 21242 - DNA, 20 bp, Artificial sequence
  synthetic
catcggtgacacagcttcag

SEQ ID NO: 21243 - DNA, 20 bp, Artificial sequence
  synthetic
ctgtgtttccgcctgtataa

SEQ ID NO: 21244 - DNA, 20 bp, Artificial sequence
  synthetic
ggggtgaacaacactaatcg

SEQ ID NO: 21245 - DNA, 20 bp, Artificial sequence
  synthetic
cgtcggcacttggcttcaga

SEQ ID NO: 21246 - DNA, 20 bp, Artificial sequence
  synthetic
taccagcggttacgcaccga

SEQ ID NO: 21247 - DNA, 20 bp, Artificial sequence
  synthetic
atgaccatcagcagtgtcct

SEQ ID NO: 21248 - DNA, 20 bp, Artificial sequence
  synthetic
ctacgtaacctggcctttgc

SEQ ID NO: 21249 - DNA, 20 bp, Artificial sequence
  synthetic
catgcagcgtgcggcgcctc

SEQ ID NO: 21250 - DNA, 20 bp, Artificial sequence
  synthetic
acacagccagacgcgttcgt

SEQ ID NO: 21251 - DNA, 20 bp, Artificial sequence
  synthetic
cggcgtgtcctcgttgctcg

SEQ ID NO: 21252 - DNA, 20 bp, Artificial sequence
  synthetic
gtatgcaggtaagcaactga

SEQ ID NO: 21253 - DNA, 20 bp, Artificial sequence
  synthetic
cggcgcgttataagcaccgt

SEQ ID NO: 21254 - DNA, 20 bp, Artificial sequence
  synthetic
ccgtcgctccgcgtcgcttc

SEQ ID NO: 21255 - DNA, 20 bp, Artificial sequence
  synthetic
ccgagcgcgccggggagaag

SEQ ID NO: 21256 - DNA, 20 bp, Artificial sequence
  synthetic
gacgcggtttatatacaccg

SEQ ID NO: 21257 - DNA, 20 bp, Artificial sequence
  synthetic
ttaaactaccccccctccct

SEQ ID NO: 21258 - DNA, 20 bp, Artificial sequence
  synthetic
gcgcagtccggggcgacgac

SEQ ID NO: 21259 - DNA, 20 bp, Artificial sequence
  synthetic
aagcgtcgtcgccccggact

SEQ ID NO: 21260 - DNA, 20 bp, Artificial sequence
  synthetic
aaaacgacgtcccccgtcga

SEQ ID NO: 21261 - DNA, 20 bp, Artificial sequence
  synthetic
ctgctcgcacggacctatac

SEQ ID NO: 21262 - DNA, 20 bp, Artificial sequence
  synthetic
acgtcaacgctgatagtgtc

SEQ ID NO: 21263 - DNA, 20 bp, Artificial sequence
  synthetic
tcggctgctgcagcacaacg

SEQ ID NO: 21264 - DNA, 20 bp, Artificial sequence
  synthetic
ggtttcgctgtagctgtggt

SEQ ID NO: 21265 - DNA, 20 bp, Artificial sequence
  synthetic
gctacgacctggcctgtggt

SEQ ID NO: 21266 - DNA, 20 bp, Artificial sequence
  synthetic
gtaccgtctccaccacagtt

SEQ ID NO: 21267 - DNA, 20 bp, Artificial sequence
  synthetic
cttcaacgacgcgaaagagg

SEQ ID NO: 21268 - DNA, 20 bp, Artificial sequence
  synthetic
cgctcgctcgcgcccgctcc

SEQ ID NO: 21269 - DNA, 20 bp, Artificial sequence
  synthetic
gacagcatacggggaggaga

SEQ ID NO: 21270 - DNA, 20 bp, Artificial sequence
  synthetic
ctttattgaaatctacctga

SEQ ID NO: 21271 - DNA, 20 bp, Artificial sequence
  synthetic
tggcaacattccattgtggg

SEQ ID NO: 21272 - DNA, 20 bp, Artificial sequence
  synthetic
gcgcctggtgatcggcgtgg

SEQ ID NO: 21273 - DNA, 20 bp, Artificial sequence
  synthetic
gacccgcccgccggctcgac

SEQ ID NO: 21274 - DNA, 20 bp, Artificial sequence
  synthetic
agacggcgccccgctgtgtc

SEQ ID NO: 21275 - DNA, 20 bp, Artificial sequence
  synthetic
accgtcatcgtggtggcgag

SEQ ID NO: 21276 - DNA, 20 bp, Artificial sequence
  synthetic
gctggtgctggctcttctgc

SEQ ID NO: 21277 - DNA, 20 bp, Artificial sequence
  synthetic
gtcacggagagatcctccgt

SEQ ID NO: 21278 - DNA, 20 bp, Artificial sequence
  synthetic
aagacgagccggcgccgggt

SEQ ID NO: 21279 - DNA, 20 bp, Artificial sequence
  synthetic
tcggattcatggcgatcggc

SEQ ID NO: 21280 - DNA, 20 bp, Artificial sequence
  synthetic
gcgtcggcaccggagaatcc

SEQ ID NO: 21281 - DNA, 20 bp, Artificial sequence
  synthetic
cttcaaggcctttcagatta

SEQ ID NO: 21282 - DNA, 20 bp, Artificial sequence
  synthetic
gcctgcatgatcatcgtcat

SEQ ID NO: 21283 - DNA, 20 bp, Artificial sequence
  synthetic
acggtaattttcctttcttc

SEQ ID NO: 21284 - DNA, 20 bp, Artificial sequence
  synthetic
cagggagcgggaccgacctt

SEQ ID NO: 21285 - DNA, 20 bp, Artificial sequence
  synthetic
cactgtccatctccctgtct

SEQ ID NO: 21286 - DNA, 20 bp, Artificial sequence
  synthetic
cgggaaggattgacgtgtgc

SEQ ID NO: 21287 - DNA, 20 bp, Artificial sequence
  synthetic
gcaaccgcagccagaccgca

SEQ ID NO: 21288 - DNA, 20 bp, Artificial sequence
  synthetic
aaaattcactcagtggcggc

SEQ ID NO: 21289 - DNA, 20 bp, Artificial sequence
  synthetic
catctacgaacggattccat

SEQ ID NO: 21290 - DNA, 20 bp, Artificial sequence
  synthetic
cgaggacgacgacgtctgat

SEQ ID NO: 21291 - DNA, 20 bp, Artificial sequence
  synthetic
tgatctttgttggtgcactg

SEQ ID NO: 21292 - DNA, 20 bp, Artificial sequence
  synthetic
ccgacgcgcccatgccgccg

SEQ ID NO: 21293 - DNA, 20 bp, Artificial sequence
  synthetic
tatgccaagatgctaaggca

SEQ ID NO: 21294 - DNA, 20 bp, Artificial sequence
  synthetic
cccacttggaaaaagcaata

SEQ ID NO: 21295 - DNA, 20 bp, Artificial sequence
  synthetic
ggcagtcatgcaagaccccc

SEQ ID NO: 21296 - DNA, 20 bp, Artificial sequence
  synthetic
tgaaccacctcactggagca

SEQ ID NO: 21297 - DNA, 20 bp, Artificial sequence
  synthetic
tgataagggtacacttgcca

SEQ ID NO: 21298 - DNA, 20 bp, Artificial sequence
  synthetic
catttccaagaccacagata

SEQ ID NO: 21299 - DNA, 20 bp, Artificial sequence
  synthetic
gatgattagaatctcttgtc

SEQ ID NO: 21300 - DNA, 20 bp, Artificial sequence
  synthetic
tatttcccatagtaataatt

SEQ ID NO: 21301 - DNA, 20 bp, Artificial sequence
  synthetic
atcagcttctgaatttattg

SEQ ID NO: 21302 - DNA, 20 bp, Artificial sequence
  synthetic
tagtggttttgctgtttttg

SEQ ID NO: 21303 - DNA, 20 bp, Artificial sequence
  synthetic
cgaaacaagaggggacgtca

SEQ ID NO: 21304 - DNA, 20 bp, Artificial sequence
  synthetic
gcaagtggcgcccaacgtgg

SEQ ID NO: 21305 - DNA, 20 bp, Artificial sequence
  synthetic
aatagtttatcacaacttaa

SEQ ID NO: 21306 - DNA, 20 bp, Artificial sequence
  synthetic
ttatcacaacttaaaagtga

SEQ ID NO: 21307 - DNA, 20 bp, Artificial sequence
  synthetic
ataacgattggctctgtttc

SEQ ID NO: 21308 - DNA, 20 bp, Artificial sequence
  synthetic
tgccataagcaccacattcc

SEQ ID NO: 21309 - DNA, 20 bp, Artificial sequence
  synthetic
aaactgatggggaacgccag

SEQ ID NO: 21310 - DNA, 20 bp, Artificial sequence
  synthetic
tactattactttctttaaca

SEQ ID NO: 21311 - DNA, 20 bp, Artificial sequence
  synthetic
gataactgacgaggaaatgc

SEQ ID NO: 21312 - DNA, 20 bp, Artificial sequence
  synthetic
ccatggccgagctagcctgt

SEQ ID NO: 21313 - DNA, 20 bp, Artificial sequence
  synthetic
cttgatgccatttgcgacaa

SEQ ID NO: 21314 - DNA, 20 bp, Artificial sequence
  synthetic
gggtccctatcctcctgact

SEQ ID NO: 21315 - DNA, 20 bp, Artificial sequence
  synthetic
ggacctcggtcgaaaatact

SEQ ID NO: 21316 - DNA, 20 bp, Artificial sequence
  synthetic
ttgcctaattctaacgggag

SEQ ID NO: 21317 - DNA, 20 bp, Artificial sequence
  synthetic
ctaccccacgtatgatctgg

SEQ ID NO: 21318 - DNA, 20 bp, Artificial sequence
  synthetic
cccacctgtctgacttggcc

SEQ ID NO: 21319 - DNA, 20 bp, Artificial sequence
  synthetic
tggaactgacgggcactgcg

SEQ ID NO: 21320 - DNA, 20 bp, Artificial sequence
  synthetic
gtcgtgttgaccggctcagg

SEQ ID NO: 21321 - DNA, 20 bp, Artificial sequence
  synthetic
gagactagctataaaagagg

SEQ ID NO: 21322 - DNA, 20 bp, Artificial sequence
  synthetic
atcacgcatgcgtgtgatga

SEQ ID NO: 21323 - DNA, 20 bp, Artificial sequence
  synthetic
tcgatgagtttatgtctgtc

SEQ ID NO: 21324 - DNA, 20 bp, Artificial sequence
  synthetic
tattaaagtttggaaataag

SEQ ID NO: 21325 - DNA, 20 bp, Artificial sequence
  synthetic
ccaaccatttgattagaagg

SEQ ID NO: 21326 - DNA, 20 bp, Artificial sequence
  synthetic
aagagaagccctcgagacct

SEQ ID NO: 21327 - DNA, 20 bp, Artificial sequence
  synthetic
tggcatccttgcccaccagc

SEQ ID NO: 21328 - DNA, 20 bp, Artificial sequence
  synthetic
ccgtcagataggggaagggt

SEQ ID NO: 21329 - DNA, 20 bp, Artificial sequence
  synthetic
ctgctgtctcaggaggggcc

SEQ ID NO: 21330 - DNA, 20 bp, Artificial sequence
  synthetic
ggacgatttacctggatgct

SEQ ID NO: 21331 - DNA, 20 bp, Artificial sequence
  synthetic
agctcttaagagagagcagc

SEQ ID NO: 21332 - DNA, 20 bp, Artificial sequence
  synthetic
ttcgccagccgccgggcggg

SEQ ID NO: 21333 - DNA, 20 bp, Artificial sequence
  synthetic
ggaagtcttggcggcgttgg

SEQ ID NO: 21334 - DNA, 20 bp, Artificial sequence
  synthetic
ccccacctccaccaccggcc

SEQ ID NO: 21335 - DNA, 20 bp, Artificial sequence
  synthetic
agggcttcttcagagggagc

SEQ ID NO: 21336 - DNA, 20 bp, Artificial sequence
  synthetic
aaaacctgagctcgtcctcg

SEQ ID NO: 21337 - DNA, 20 bp, Artificial sequence
  synthetic
gcgcgtcatccccgcgcacc

SEQ ID NO: 21338 - DNA, 20 bp, Artificial sequence
  synthetic
acaaggcacttcagagccca

SEQ ID NO: 21339 - DNA, 20 bp, Artificial sequence
  synthetic
ttaaggtattgcacagagac

SEQ ID NO: 21340 - DNA, 20 bp, Artificial sequence
  synthetic
ttctggccggccgagcgaag

SEQ ID NO: 21341 - DNA, 20 bp, Artificial sequence
  synthetic
gtcgcccgccccccgactct

SEQ ID NO: 21342 - DNA, 20 bp, Artificial sequence
  synthetic
gccagatacttcagaagggt

SEQ ID NO: 21343 - DNA, 20 bp, Artificial sequence
  synthetic
gccgggacgctagtgctgca

SEQ ID NO: 21344 - DNA, 20 bp, Artificial sequence
  synthetic
tggacacgcaagggcgaatg

SEQ ID NO: 21345 - DNA, 20 bp, Artificial sequence
  synthetic
ttcctcttttgctgcagaca

SEQ ID NO: 21346 - DNA, 20 bp, Artificial sequence
  synthetic
gagaccgccgccgcactgct

SEQ ID NO: 21347 - DNA, 20 bp, Artificial sequence
  synthetic
cggccaggccctgcccccgg

SEQ ID NO: 21348 - DNA, 20 bp, Artificial sequence
  synthetic
atttaaggatctatatgccc

SEQ ID NO: 21349 - DNA, 20 bp, Artificial sequence
  synthetic
gccaccgttctccccggact

SEQ ID NO: 21350 - DNA, 20 bp, Artificial sequence
  synthetic
agggcctggccggggctgac

SEQ ID NO: 21351 - DNA, 20 bp, Artificial sequence
  synthetic
gcctcgcgcagcgcccggca

SEQ ID NO: 21352 - DNA, 20 bp, Artificial sequence
  synthetic
ccgtgacgtgggccctggcc

SEQ ID NO: 21353 - DNA, 20 bp, Artificial sequence
  synthetic
taacatttaatgtgggactg

SEQ ID NO: 21354 - DNA, 20 bp, Artificial sequence
  synthetic
ccaacaggaggagctgagcg

SEQ ID NO: 21355 - DNA, 20 bp, Artificial sequence
  synthetic
caaacacagaatctgtagac

SEQ ID NO: 21356 - DNA, 20 bp, Artificial sequence
  synthetic
aattggggtgatcctgtagc

SEQ ID NO: 21357 - DNA, 20 bp, Artificial sequence
  synthetic
gtgtcctgtttggactttta

SEQ ID NO: 21358 - DNA, 20 bp, Artificial sequence
  synthetic
cttcagaagagaccttctct

SEQ ID NO: 21359 - DNA, 20 bp, Artificial sequence
  synthetic
tttcccttactcttccttct

SEQ ID NO: 21360 - DNA, 20 bp, Artificial sequence
  synthetic
ctgccgctactgctgctact

SEQ ID NO: 21361 - DNA, 20 bp, Artificial sequence
  synthetic
aaccttctaagcacccgcgc

SEQ ID NO: 21362 - DNA, 20 bp, Artificial sequence
  synthetic
ggggcgcgctgggccgcggc

SEQ ID NO: 21363 - DNA, 20 bp, Artificial sequence
  synthetic
gttaacctgatagcatagcc

SEQ ID NO: 21364 - DNA, 20 bp, Artificial sequence
  synthetic
ttctagttccctcttaatta

SEQ ID NO: 21365 - DNA, 20 bp, Artificial sequence
  synthetic
tacagtcctatcaaacttcc

SEQ ID NO: 21366 - DNA, 20 bp, Artificial sequence
  synthetic
ccggtattaaaaacccagaa

SEQ ID NO: 21367 - DNA, 20 bp, Artificial sequence
  synthetic
ttccggtcagggggtttggc

SEQ ID NO: 21368 - DNA, 20 bp, Artificial sequence
  synthetic
gcgccgtggaagaaggaact

SEQ ID NO: 21369 - DNA, 20 bp, Artificial sequence
  synthetic
gtggaacacgtgccccccga

SEQ ID NO: 21370 - DNA, 20 bp, Artificial sequence
  synthetic
cgtttgctccatctgtcagc

SEQ ID NO: 21371 - DNA, 20 bp, Artificial sequence
  synthetic
gaccagaaggggggcgacaa

SEQ ID NO: 21372 - DNA, 20 bp, Artificial sequence
  synthetic
cccgttctctttcttagtat

SEQ ID NO: 21373 - DNA, 20 bp, Artificial sequence
  synthetic
gttcctcaaccagcccacga

SEQ ID NO: 21374 - DNA, 20 bp, Artificial sequence
  synthetic
gggcagcggggtcgtcccca

SEQ ID NO: 21375 - DNA, 20 bp, Artificial sequence
  synthetic
cccgtggtggagattgacag

SEQ ID NO: 21376 - DNA, 20 bp, Artificial sequence
  synthetic
gggggacaagagcacaaaag

SEQ ID NO: 21377 - DNA, 20 bp, Artificial sequence
  synthetic
gttttactgaacgagcctgt

SEQ ID NO: 21378 - DNA, 20 bp, Artificial sequence
  synthetic
aagagagttccgattacacc

SEQ ID NO: 21379 - DNA, 20 bp, Artificial sequence
  synthetic
ccactccagcaacaccgcac

SEQ ID NO: 21380 - DNA, 20 bp, Artificial sequence
  synthetic
gcaccccaagaaagtgaagc

SEQ ID NO: 21381 - DNA, 20 bp, Artificial sequence
  synthetic
cgccggtcgctgtggggcca

SEQ ID NO: 21382 - DNA, 20 bp, Artificial sequence
  synthetic
gccatcgttctgtttagccc

SEQ ID NO: 21383 - DNA, 20 bp, Artificial sequence
  synthetic
tcgtcaggccgcgagaggat

SEQ ID NO: 21384 - DNA, 20 bp, Artificial sequence
  synthetic
gacattatttaagaccggga

SEQ ID NO: 21385 - DNA, 20 bp, Artificial sequence
  synthetic
cagttcaaacccagagacac

SEQ ID NO: 21386 - DNA, 20 bp, Artificial sequence
  synthetic
acgatgagtgatttcgccca

SEQ ID NO: 21387 - DNA, 20 bp, Artificial sequence
  synthetic
tgacaattttagatgaggta

SEQ ID NO: 21388 - DNA, 20 bp, Artificial sequence
  synthetic
acacctaaatttagcacgtc

SEQ ID NO: 21389 - DNA, 20 bp, Artificial sequence
  synthetic
cactaaacattgcaccttgc

SEQ ID NO: 21390 - DNA, 20 bp, Artificial sequence
  synthetic
gagtaatctccacactcccg

SEQ ID NO: 21391 - DNA, 20 bp, Artificial sequence
  synthetic
ttctactttaaaaaggccgg

SEQ ID NO: 21392 - DNA, 20 bp, Artificial sequence
  synthetic
aacccgaaacagtgtttccc

SEQ ID NO: 21393 - DNA, 20 bp, Artificial sequence
  synthetic
ttctttatctccatcctgaa

SEQ ID NO: 21394 - DNA, 20 bp, Artificial sequence
  synthetic
cctggcccagaacagcaccc

SEQ ID NO: 21395 - DNA, 20 bp, Artificial sequence
  synthetic
cattaagcagtgaagtaaag

SEQ ID NO: 21396 - DNA, 20 bp, Artificial sequence
  synthetic
aatcaggcgcaccttggcac

SEQ ID NO: 21397 - DNA, 20 bp, Artificial sequence
  synthetic
tcgcctccaatttggctata

SEQ ID NO: 21398 - DNA, 20 bp, Artificial sequence
  synthetic
agtaaaatatggacaaaaag

SEQ ID NO: 21399 - DNA, 20 bp, Artificial sequence
  synthetic
tgcagatgaggcaacacaat

SEQ ID NO: 21400 - DNA, 20 bp, Artificial sequence
  synthetic
ccccccacggagcgacccga

SEQ ID NO: 21401 - DNA, 20 bp, Artificial sequence
  synthetic
ggtccctcctttggttcgtg

SEQ ID NO: 21402 - DNA, 20 bp, Artificial sequence
  synthetic
ttctgtgccttctgtacatc

SEQ ID NO: 21403 - DNA, 20 bp, Artificial sequence
  synthetic
agtgagcttctgttaagttg

SEQ ID NO: 21404 - DNA, 20 bp, Artificial sequence
  synthetic
ttgaataatttctactgaaa

SEQ ID NO: 21405 - DNA, 20 bp, Artificial sequence
  synthetic
gtcgaggtgccctatttagg

SEQ ID NO: 21406 - DNA, 20 bp, Artificial sequence
  synthetic
agagggcaggcaccggcagt

SEQ ID NO: 21407 - DNA, 20 bp, Artificial sequence
  synthetic
tggtaagcttttcaagagcg

SEQ ID NO: 21408 - DNA, 20 bp, Artificial sequence
  synthetic
aatcccgcacccccctggca

SEQ ID NO: 21409 - DNA, 20 bp, Artificial sequence
  synthetic
ccactgacgctggcaggcct

SEQ ID NO: 21410 - DNA, 20 bp, Artificial sequence
  synthetic
tttttgtggcggcccttgtg

SEQ ID NO: 21411 - DNA, 20 bp, Artificial sequence
  synthetic
gcctttcagtggagcttagg

SEQ ID NO: 21412 - DNA, 20 bp, Artificial sequence
  synthetic
cgggtgtcgcgctttggggg

SEQ ID NO: 21413 - DNA, 20 bp, Artificial sequence
  synthetic
aaaaccacctcactagacat

SEQ ID NO: 21414 - DNA, 20 bp, Artificial sequence
  synthetic
ggaacctggtgccctcctcc

SEQ ID NO: 21415 - DNA, 20 bp, Artificial sequence
  synthetic
gatcctaacatctgtttcgg

SEQ ID NO: 21416 - DNA, 20 bp, Artificial sequence
  synthetic
tcctttgtttttccacatcg

SEQ ID NO: 21417 - DNA, 20 bp, Artificial sequence
  synthetic
cagcctgctactgtgtgtaa

SEQ ID NO: 21418 - DNA, 20 bp, Artificial sequence
  synthetic
taaaaactgaagaaggcgtg

SEQ ID NO: 21419 - DNA, 20 bp, Artificial sequence
  synthetic
agacgttggtgtgttgaagg

SEQ ID NO: 21420 - DNA, 20 bp, Artificial sequence
  synthetic
ggcaagcagtggagcaagac

SEQ ID NO: 21421 - DNA, 20 bp, Artificial sequence
  synthetic
aaagaagagagctggcacgt

SEQ ID NO: 21422 - DNA, 20 bp, Artificial sequence
  synthetic
gtttgcttgggggtggctat

SEQ ID NO: 21423 - DNA, 20 bp, Artificial sequence
  synthetic
taagagcacactgtgtggtt

SEQ ID NO: 21424 - DNA, 20 bp, Artificial sequence
  synthetic
gttgcaggggttaatgccat

SEQ ID NO: 21425 - DNA, 20 bp, Artificial sequence
  synthetic
atcctggagtttacaggtag

SEQ ID NO: 21426 - DNA, 20 bp, Artificial sequence
  synthetic
ctggtctttatcgtcgcgtt

SEQ ID NO: 21427 - DNA, 20 bp, Artificial sequence
  synthetic
gtggcgtccgtgaatacgtt

SEQ ID NO: 21428 - DNA, 20 bp, Artificial sequence
  synthetic
gctcacctcccctttccctt

SEQ ID NO: 21429 - DNA, 20 bp, Artificial sequence
  synthetic
ataaaggggcgtggcttcca

SEQ ID NO: 21430 - DNA, 20 bp, Artificial sequence
  synthetic
cacccttggtgctgtgcgcg

SEQ ID NO: 21431 - DNA, 20 bp, Artificial sequence
  synthetic
atgccagcttcatacgggac

SEQ ID NO: 21432 - DNA, 20 bp, Artificial sequence
  synthetic
gccaattcccggtcggcatc

SEQ ID NO: 21433 - DNA, 20 bp, Artificial sequence
  synthetic
gtgaccacgcactatagtgc

SEQ ID NO: 21434 - DNA, 20 bp, Artificial sequence
  synthetic
gccattatacacacgggttt

SEQ ID NO: 21435 - DNA, 20 bp, Artificial sequence
  synthetic
ggcaggacacaacatctaca

SEQ ID NO: 21436 - DNA, 20 bp, Artificial sequence
  synthetic
cgtccatatccgtgctggtt

SEQ ID NO: 21437 - DNA, 20 bp, Artificial sequence
  synthetic
tttctccgccgcgccccacc

SEQ ID NO: 21438 - DNA, 20 bp, Artificial sequence
  synthetic
cgccagccgatccccgcgta

SEQ ID NO: 21439 - DNA, 20 bp, Artificial sequence
  synthetic
cttctctggcgtccttgccg

SEQ ID NO: 21440 - DNA, 20 bp, Artificial sequence
  synthetic
cctccgtggcgaggtacggg

SEQ ID NO: 21441 - DNA, 20 bp, Artificial sequence
  synthetic
cggaaacaaggtggtgtatt

SEQ ID NO: 21442 - DNA, 20 bp, Artificial sequence
  synthetic
ttctcctatcttcagagtct

SEQ ID NO: 21443 - DNA, 20 bp, Artificial sequence
  synthetic
tcctgttggtattccccacg

SEQ ID NO: 21444 - DNA, 20 bp, Artificial sequence
  synthetic
gcgggggtcagggcactcga

SEQ ID NO: 21445 - DNA, 20 bp, Artificial sequence
  synthetic
tacgccctggtctgtagcat

SEQ ID NO: 21446 - DNA, 20 bp, Artificial sequence
  synthetic
agtcagcgggagtcttgtgg

SEQ ID NO: 21447 - DNA, 20 bp, Artificial sequence
  synthetic
aagggtgcgccatccgtgcc

SEQ ID NO: 21448 - DNA, 20 bp, Artificial sequence
  synthetic
tctcctgcaggttggcggca

SEQ ID NO: 21449 - DNA, 20 bp, Artificial sequence
  synthetic
gggccagaggtttgaggcgc

SEQ ID NO: 21450 - DNA, 20 bp, Artificial sequence
  synthetic
ggtcgacgccgtcgcggacc

SEQ ID NO: 21451 - DNA, 20 bp, Artificial sequence
  synthetic
gacccgcacgtggagattcc

SEQ ID NO: 21452 - DNA, 20 bp, Artificial sequence
  synthetic
tctcccgccgcagcgccgcc

SEQ ID NO: 21453 - DNA, 20 bp, Artificial sequence
  synthetic
aaccgacgtgggacagaaat

SEQ ID NO: 21454 - DNA, 20 bp, Artificial sequence
  synthetic
acggcagaaaggggccttcg

SEQ ID NO: 21455 - DNA, 20 bp, Artificial sequence
  synthetic
acctgtcaatctgttccact

SEQ ID NO: 21456 - DNA, 20 bp, Artificial sequence
  synthetic
tacagttggccaatgcattc

SEQ ID NO: 21457 - DNA, 20 bp, Artificial sequence
  synthetic
gacctctgacataagaatac

SEQ ID NO: 21458 - DNA, 20 bp, Artificial sequence
  synthetic
ttgccttatccaaggacagt

SEQ ID NO: 21459 - DNA, 20 bp, Artificial sequence
  synthetic
tgtgctttgtaaatttccgc

SEQ ID NO: 21460 - DNA, 20 bp, Artificial sequence
  synthetic
atttcagtaattgtcctcat

SEQ ID NO: 21461 - DNA, 20 bp, Artificial sequence
  synthetic
ttgccacccagctactggtt

SEQ ID NO: 21462 - DNA, 20 bp, Artificial sequence
  synthetic
tcctatgggggttgggtggg

SEQ ID NO: 21463 - DNA, 20 bp, Artificial sequence
  synthetic
ctccgttgtcgactataacc

SEQ ID NO: 21464 - DNA, 20 bp, Artificial sequence
  synthetic
ttctaaatttgcttgtttcg

SEQ ID NO: 21465 - DNA, 20 bp, Artificial sequence
  synthetic
acgcggaacgttggatagac

SEQ ID NO: 21466 - DNA, 20 bp, Artificial sequence
  synthetic
gttgccgcgtccaaaaaggt

SEQ ID NO: 21467 - DNA, 20 bp, Artificial sequence
  synthetic
cactaatatgtcagccacct

SEQ ID NO: 21468 - DNA, 20 bp, Artificial sequence
  synthetic
tgcttaccactggacattgc

SEQ ID NO: 21469 - DNA, 20 bp, Artificial sequence
  synthetic
gggactgtgcctcaaagacg

SEQ ID NO: 21470 - DNA, 20 bp, Artificial sequence
  synthetic
agacctgtacgcccttctgt

SEQ ID NO: 21471 - DNA, 20 bp, Artificial sequence
  synthetic
tgtctaatacaggcaatgct

SEQ ID NO: 21472 - DNA, 20 bp, Artificial sequence
  synthetic
gttgaggtggggtaatgctc

SEQ ID NO: 21473 - DNA, 20 bp, Artificial sequence
  synthetic
gtcgcccacggaaaaggtgt

SEQ ID NO: 21474 - DNA, 20 bp, Artificial sequence
  synthetic
tcgtgggaaggtgcccaaaa

SEQ ID NO: 21475 - DNA, 20 bp, Artificial sequence
  synthetic
tacgctgggcacagttccct

SEQ ID NO: 21476 - DNA, 20 bp, Artificial sequence
  synthetic
gcaaggggggtgcggtgttg

SEQ ID NO: 21477 - DNA, 20 bp, Artificial sequence
  synthetic
gaatgatgagtgatttcaac

SEQ ID NO: 21478 - DNA, 20 bp, Artificial sequence
  synthetic
gttccaggtcggggaccaag

SEQ ID NO: 21479 - DNA, 20 bp, Artificial sequence
  synthetic
tcggcggcggcggaacgagt

SEQ ID NO: 21480 - DNA, 20 bp, Artificial sequence
  synthetic
cgggaggtaagctggccagc

SEQ ID NO: 21481 - DNA, 20 bp, Artificial sequence
  synthetic
tagagaggcgcgctctgcca

SEQ ID NO: 21482 - DNA, 20 bp, Artificial sequence
  synthetic
actgggtgttccagactagt

SEQ ID NO: 21483 - DNA, 20 bp, Artificial sequence
  synthetic
cggctggtcgagtcccatac

SEQ ID NO: 21484 - DNA, 20 bp, Artificial sequence
  synthetic
ccactctatgcccggccatt

SEQ ID NO: 21485 - DNA, 20 bp, Artificial sequence
  synthetic
aaagtgctaaagactctcaa

SEQ ID NO: 21486 - DNA, 20 bp, Artificial sequence
  synthetic
tgaatactggccgcggctcc

SEQ ID NO: 21487 - DNA, 20 bp, Artificial sequence
  synthetic
gtaagtgtgctggtgtggac

SEQ ID NO: 21488 - DNA, 20 bp, Artificial sequence
  synthetic
ggtacggcacgtagcattgc

SEQ ID NO: 21489 - DNA, 20 bp, Artificial sequence
  synthetic
ctccttttttgccactatgc

SEQ ID NO: 21490 - DNA, 20 bp, Artificial sequence
  synthetic
ccaaagggtacaacctacgc

SEQ ID NO: 21491 - DNA, 20 bp, Artificial sequence
  synthetic
cttgtgagaaacacttggag

SEQ ID NO: 21492 - DNA, 20 bp, Artificial sequence
  synthetic
cgcttatggttacaactaat

SEQ ID NO: 21493 - DNA, 20 bp, Artificial sequence
  synthetic
ttgtgtttatttgtgtaatt

SEQ ID NO: 21494 - DNA, 20 bp, Artificial sequence
  synthetic
agacacttgtgtttgtgagt

SEQ ID NO: 21495 - DNA, 20 bp, Artificial sequence
  synthetic
tacacaatattccacgacaa

SEQ ID NO: 21496 - DNA, 20 bp, Artificial sequence
  synthetic
acgtactgtaagtgttgaca

SEQ ID NO: 21497 - DNA, 20 bp, Artificial sequence
  synthetic
ggaataggagttatactgct

SEQ ID NO: 21498 - DNA, 20 bp, Artificial sequence
  synthetic
ggtcaataccccgaggtgtg

SEQ ID NO: 21499 - DNA, 20 bp, Artificial sequence
  synthetic
ggcggacctgcattggcagc

SEQ ID NO: 21500 - DNA, 20 bp, Artificial sequence
  synthetic
ggatgcacccgctgcggggt

SEQ ID NO: 21501 - DNA, 20 bp, Artificial sequence
  synthetic
accgctgcgcagcagtatcc

SEQ ID NO: 21502 - DNA, 20 bp, Artificial sequence
  synthetic
cctcctcgtccctgatctaa

SEQ ID NO: 21503 - DNA, 20 bp, Artificial sequence
  synthetic
atgtgtaaataaagttgtac

SEQ ID NO: 21504 - DNA, 20 bp, Artificial sequence
  synthetic
caccccagcatcctttaatt

SEQ ID NO: 21505 - DNA, 20 bp, Artificial sequence
  synthetic
gggagagcttaacttgtatg

SEQ ID NO: 21506 - DNA, 20 bp, Artificial sequence
  synthetic
atggatgagcccaccctcct

SEQ ID NO: 21507 - DNA, 20 bp, Artificial sequence
  synthetic
gtctacctgcgcacgccctt

SEQ ID NO: 21508 - DNA, 20 bp, Artificial sequence
  synthetic
accggcgcacgtcctgactg

SEQ ID NO: 21509 - DNA, 20 bp, Artificial sequence
  synthetic
catcacccagggcgcgatcc

SEQ ID NO: 21510 - DNA, 20 bp, Artificial sequence
  synthetic
aacgcgcgcccacccggaaa

SEQ ID NO: 21511 - DNA, 20 bp, Artificial sequence
  synthetic
gcttttgtgatcatggcctg

SEQ ID NO: 21512 - DNA, 20 bp, Artificial sequence
  synthetic
gaggagaaggaaaaattgct

SEQ ID NO: 21513 - DNA, 20 bp, Artificial sequence
  synthetic
gcgggctttgtaactctgat

SEQ ID NO: 21514 - DNA, 20 bp, Artificial sequence
  synthetic
ctactcagcttctcttactg

SEQ ID NO: 21515 - DNA, 20 bp, Artificial sequence
  synthetic
gtctgcagcattgtctgcgt

SEQ ID NO: 21516 - DNA, 20 bp, Artificial sequence
  synthetic
gaatacagggacgagaacgt

SEQ ID NO: 21517 - DNA, 20 bp, Artificial sequence
  synthetic
tccccggcccccttccactg

SEQ ID NO: 21518 - DNA, 20 bp, Artificial sequence
  synthetic
aagtcatcttccacccggag

SEQ ID NO: 21519 - DNA, 20 bp, Artificial sequence
  synthetic
tagttgttcagcagcacctc

SEQ ID NO: 21520 - DNA, 20 bp, Artificial sequence
  synthetic
gttttgaacacgctgcaggt

SEQ ID NO: 21521 - DNA, 20 bp, Artificial sequence
  synthetic
cgtaggagccatataccgcg

SEQ ID NO: 21522 - DNA, 20 bp, Artificial sequence
  synthetic
gtcaaagtccggtgtttatg

SEQ ID NO: 21523 - DNA, 20 bp, Artificial sequence
  synthetic
ggagccgcggctaacgtggt

SEQ ID NO: 21524 - DNA, 20 bp, Artificial sequence
  synthetic
gtcgcaccgcgcgtcctttc

SEQ ID NO: 21525 - DNA, 20 bp, Artificial sequence
  synthetic
tggcccaatcgcgaagaggc

SEQ ID NO: 21526 - DNA, 20 bp, Artificial sequence
  synthetic
atatttgtgtgacagtgcaa

SEQ ID NO: 21527 - DNA, 20 bp, Artificial sequence
  synthetic
gtagaagcagacctgtgtgg

SEQ ID NO: 21528 - DNA, 20 bp, Artificial sequence
  synthetic
aagcaaaccgactcccggcg

SEQ ID NO: 21529 - DNA, 20 bp, Artificial sequence
  synthetic
gaggaaaaaaggaagaggtc

SEQ ID NO: 21530 - DNA, 20 bp, Artificial sequence
  synthetic
ggtagaactgctgctgctgt

SEQ ID NO: 21531 - DNA, 20 bp, Artificial sequence
  synthetic
ggactgggcggtggaatgct

SEQ ID NO: 21532 - DNA, 20 bp, Artificial sequence
  synthetic
aatggctgagtttccatgtc

SEQ ID NO: 21533 - DNA, 20 bp, Artificial sequence
  synthetic
tgatcatccacaagacccag

SEQ ID NO: 21534 - DNA, 20 bp, Artificial sequence
  synthetic
agccagcattcttttgacca

SEQ ID NO: 21535 - DNA, 20 bp, Artificial sequence
  synthetic
ggtttggcgggattttttac

SEQ ID NO: 21536 - DNA, 20 bp, Artificial sequence
  synthetic
attgcccgcactggagcaga

SEQ ID NO: 21537 - DNA, 20 bp, Artificial sequence
  synthetic
gatggacagattgagtaaaa

SEQ ID NO: 21538 - DNA, 20 bp, Artificial sequence
  synthetic
aacggcgggaatcacgtcac

SEQ ID NO: 21539 - DNA, 20 bp, Artificial sequence
  synthetic
atctaagatctttttttttt

SEQ ID NO: 21540 - DNA, 20 bp, Artificial sequence
  synthetic
gtatttttttttcactttac

SEQ ID NO: 21541 - DNA, 20 bp, Artificial sequence
  synthetic
taggcgatgttgacgagccg

SEQ ID NO: 21542 - DNA, 20 bp, Artificial sequence
  synthetic
agggcgacggcctagtcgtg

SEQ ID NO: 21543 - DNA, 20 bp, Artificial sequence
  synthetic
tgacgagtcttccttctatt

SEQ ID NO: 21544 - DNA, 20 bp, Artificial sequence
  synthetic
tgtcagaatatctatcattt

SEQ ID NO: 21545 - DNA, 20 bp, Artificial sequence
  synthetic
ggtgtaaacatgaaagtact

SEQ ID NO: 21546 - DNA, 20 bp, Artificial sequence
  synthetic
gtaaccttaccatcatgctt

SEQ ID NO: 21547 - DNA, 20 bp, Artificial sequence
  synthetic
cggagacagcgtaaccaccg

SEQ ID NO: 21548 - DNA, 20 bp, Artificial sequence
  synthetic
aaggataagaccaaagttct

SEQ ID NO: 21549 - DNA, 20 bp, Artificial sequence
  synthetic
gacaccaagaatgagtggac

SEQ ID NO: 21550 - DNA, 20 bp, Artificial sequence
  synthetic
agcaggagcagctctccttc

SEQ ID NO: 21551 - DNA, 20 bp, Artificial sequence
  synthetic
cgacgaccccgaacccgcag

SEQ ID NO: 21552 - DNA, 20 bp, Artificial sequence
  synthetic
ggctcgtccgggatctgttc

SEQ ID NO: 21553 - DNA, 20 bp, Artificial sequence
  synthetic
atgtgtcccttccccaaaat

SEQ ID NO: 21554 - DNA, 20 bp, Artificial sequence
  synthetic
ccgggtggtgacagaatgtg

SEQ ID NO: 21555 - DNA, 20 bp, Artificial sequence
  synthetic
acgtatgtcagccaatcagc

SEQ ID NO: 21556 - DNA, 20 bp, Artificial sequence
  synthetic
gagtgaacatctctgggaag

SEQ ID NO: 21557 - DNA, 20 bp, Artificial sequence
  synthetic
tacttctgccttctttgata

SEQ ID NO: 21558 - DNA, 20 bp, Artificial sequence
  synthetic
agaagcatcggaagtggatt

SEQ ID NO: 21559 - DNA, 20 bp, Artificial sequence
  synthetic
tgaataatttctactgaaag

SEQ ID NO: 21560 - DNA, 20 bp, Artificial sequence
  synthetic
tccggtgctttacaccggag

SEQ ID NO: 21561 - DNA, 20 bp, Artificial sequence
  synthetic
ctcgctcagcacgagatctg

SEQ ID NO: 21562 - DNA, 20 bp, Artificial sequence
  synthetic
cggtgtatcttaacccaggc

SEQ ID NO: 21563 - DNA, 20 bp, Artificial sequence
  synthetic
gttcgcagacggccgcggcg

SEQ ID NO: 21564 - DNA, 20 bp, Artificial sequence
  synthetic
aataaaactcaccaaggcca

SEQ ID NO: 21565 - DNA, 20 bp, Artificial sequence
  synthetic
tgggcatagtcgcgccgcgc

SEQ ID NO: 21566 - DNA, 20 bp, Artificial sequence
  synthetic
caccccagcatcctttaatc

SEQ ID NO: 21567 - DNA, 20 bp, Artificial sequence
  synthetic
tgctattaagagaggaaaga

SEQ ID NO: 21568 - DNA, 20 bp, Artificial sequence
  synthetic
cctgtgggggttctagacga

SEQ ID NO: 21569 - DNA, 20 bp, Artificial sequence
  synthetic
acaaaaacgaagatcagctg

SEQ ID NO: 21570 - DNA, 20 bp, Artificial sequence
  synthetic
gcgcgcccacccggaaaaaa

SEQ ID NO: 21571 - DNA, 20 bp, Artificial sequence
  synthetic
taccgaacttcgacgcagtt

SEQ ID NO: 21572 - DNA, 20 bp, Artificial sequence
  synthetic
ttagcccatacaaggtggtc

SEQ ID NO: 21573 - DNA, 20 bp, Artificial sequence
  synthetic
ggggtctaaggaatcttctt

SEQ ID NO: 21574 - DNA, 20 bp, Artificial sequence
  synthetic
acctgcgtctgcagcattgt

SEQ ID NO: 21575 - DNA, 20 bp, Artificial sequence
  synthetic
atacacactacaaaacagtt

SEQ ID NO: 21576 - DNA, 20 bp, Artificial sequence
  synthetic
tggcctgtaccgggaccgag

SEQ ID NO: 21577 - DNA, 20 bp, Artificial sequence
  synthetic
taaaagcgcaccgcggcacg

SEQ ID NO: 21578 - DNA, 20 bp, Artificial sequence
  synthetic
aaggtcttagaaactctcaa

SEQ ID NO: 21579 - DNA, 20 bp, Artificial sequence
  synthetic
tttgtgaacttctttaaatc

SEQ ID NO: 21580 - DNA, 20 bp, Artificial sequence
  synthetic
aggggcacttgttctttgtc

SEQ ID NO: 21581 - DNA, 20 bp, Artificial sequence
  synthetic
agattaaggcaaccagtggt

SEQ ID NO: 21582 - DNA, 20 bp, Artificial sequence
  synthetic
caacaaccccctaacctccc

SEQ ID NO: 21583 - DNA, 20 bp, Artificial sequence
  synthetic
cccgcaccatcgtcgagcgt

SEQ ID NO: 21584 - DNA, 20 bp, Artificial sequence
  synthetic
tcactgcgaattgtgtggat

SEQ ID NO: 21585 - DNA, 20 bp, Artificial sequence
  synthetic
ggaaaacggggtcattttgc

SEQ ID NO: 21586 - DNA, 20 bp, Artificial sequence
  synthetic
aaactcatgatgtgtagtcc

SEQ ID NO: 21587 - DNA, 20 bp, Artificial sequence
  synthetic
ggggcttggatacgagggaa

SEQ ID NO: 21588 - DNA, 20 bp, Artificial sequence
  synthetic
tgggacggaaccgactactt

SEQ ID NO: 21589 - DNA, 20 bp, Artificial sequence
  synthetic
atgaaccattgagatttctc

SEQ ID NO: 21590 - DNA, 20 bp, Artificial sequence
  synthetic
tcgcggctggccgaccatga

SEQ ID NO: 21591 - DNA, 20 bp, Artificial sequence
  synthetic
tgaagtattgagatttctct

SEQ ID NO: 21592 - DNA, 20 bp, Artificial sequence
  synthetic
cgcggctggccgaccataac

SEQ ID NO: 21593 - DNA, 20 bp, Artificial sequence
  synthetic
gatcatgttttacaacagta

SEQ ID NO: 21594 - DNA, 20 bp, Artificial sequence
  synthetic
ccgaagtcgggcatcccaaa

SEQ ID NO: 21595 - DNA, 20 bp, Artificial sequence
  synthetic
cctcgcctagtcccaacaca

SEQ ID NO: 21596 - DNA, 20 bp, Artificial sequence
  synthetic
acacccgacgggacacaaat

SEQ ID NO: 21597 - DNA, 20 bp, Artificial sequence
  synthetic
ctccacaggccatccctctc

SEQ ID NO: 21598 - DNA, 20 bp, Artificial sequence
  synthetic
aaatcaagagaggctgagtt

SEQ ID NO: 21599 - DNA, 20 bp, Artificial sequence
  synthetic
ttcccagtacttcttatata

SEQ ID NO: 21600 - DNA, 20 bp, Artificial sequence
  synthetic
gaaacaaggtagcctagctt

SEQ ID NO: 21601 - DNA, 20 bp, Artificial sequence
  synthetic
cttaggtggtattgagaaac

SEQ ID NO: 21602 - DNA, 20 bp, Artificial sequence
  synthetic
agcctgccggcggatgcctg

SEQ ID NO: 21603 - DNA, 20 bp, Artificial sequence
  synthetic
tatcccattgccatcccaac

SEQ ID NO: 21604 - DNA, 20 bp, Artificial sequence
  synthetic
taagacttgttgtgtggaga

SEQ ID NO: 21605 - DNA, 20 bp, Artificial sequence
  synthetic
gaatgcgtatccggaacgcc

SEQ ID NO: 21606 - DNA, 20 bp, Artificial sequence
  synthetic
caagacacaccttaacctgg

SEQ ID NO: 21607 - DNA, 20 bp, Artificial sequence
  synthetic
agcacccctgggtcacgccc

SEQ ID NO: 21608 - DNA, 20 bp, Artificial sequence
  synthetic
cctggtactacgagcttggg

SEQ ID NO: 21609 - DNA, 20 bp, Artificial sequence
  synthetic
gagactggccgaaaggcagc

SEQ ID NO: 21610 - DNA, 20 bp, Artificial sequence
  synthetic
tagggtgacggtatttacat

SEQ ID NO: 21611 - DNA, 20 bp, Artificial sequence
  synthetic
tgttacagtaccattaacat

SEQ ID NO: 21612 - DNA, 20 bp, Artificial sequence
  synthetic
tagtacatctcctaccaatg

SEQ ID NO: 21613 - DNA, 20 bp, Artificial sequence
  synthetic
ctcacgcgctgtcaataccg

SEQ ID NO: 21614 - DNA, 20 bp, Artificial sequence
  synthetic
ttctttgagacctcgttggc

SEQ ID NO: 21615 - DNA, 20 bp, Artificial sequence
  synthetic
gacagtccctgcattgcact

SEQ ID NO: 21616 - DNA, 20 bp, Artificial sequence
  synthetic
acgttaaagggaggtaacca

SEQ ID NO: 21617 - DNA, 20 bp, Artificial sequence
  synthetic
aggtaacacgcgacactcgg

SEQ ID NO: 21618 - DNA, 20 bp, Artificial sequence
  synthetic
aagggtggaaggccagcgtt

SEQ ID NO: 21619 - DNA, 20 bp, Artificial sequence
  synthetic
tgcacaaggttgttctgccc

SEQ ID NO: 21620 - DNA, 20 bp, Artificial sequence
  synthetic
cccaacagatcaaagtgtat

SEQ ID NO: 21621 - DNA, 20 bp, Artificial sequence
  synthetic
tgaactccaagttcacgttt

SEQ ID NO: 21622 - DNA, 20 bp, Artificial sequence
  synthetic
ttgagctccggctacctgtg

SEQ ID NO: 21623 - DNA, 20 bp, Artificial sequence
  synthetic
ctgcctaccacaagggcccg

SEQ ID NO: 21624 - DNA, 20 bp, Artificial sequence
  synthetic
cagttaaagcagaaacaatc

SEQ ID NO: 21625 - DNA, 20 bp, Artificial sequence
  synthetic
tcgatgaggccaaaccctgg

SEQ ID NO: 21626 - DNA, 20 bp, Artificial sequence
  synthetic
ccagtctctttcacgtgccg

SEQ ID NO: 21627 - DNA, 20 bp, Artificial sequence
  synthetic
gcgagtggctggtcaagctg

SEQ ID NO: 21628 - DNA, 20 bp, Artificial sequence
  synthetic
ccggcaggaccgattctgtt

SEQ ID NO: 21629 - DNA, 20 bp, Artificial sequence
  synthetic
tcaaagcacttgaagacacc

SEQ ID NO: 21630 - DNA, 20 bp, Artificial sequence
  synthetic
catttgtgaaacgtgctttt

SEQ ID NO: 21631 - DNA, 20 bp, Artificial sequence
  synthetic
gtcagagacctctgaaagtg

SEQ ID NO: 21632 - DNA, 20 bp, Artificial sequence
  synthetic
tgattgtcactgagagtggt

SEQ ID NO: 21633 - DNA, 20 bp, Artificial sequence
  synthetic
aggacggagctgacaccttc

SEQ ID NO: 21634 - DNA, 20 bp, Artificial sequence
  synthetic
taatgcgcaaaaccaagctt

SEQ ID NO: 21635 - DNA, 20 bp, Artificial sequence
  synthetic
tgttccgccgctgcgctgct

SEQ ID NO: 21636 - DNA, 20 bp, Artificial sequence
  synthetic
tttacctgcgttgggtgaac

SEQ ID NO: 21637 - DNA, 20 bp, Artificial sequence
  synthetic
tcctggagcaccccccctag

SEQ ID NO: 21638 - DNA, 20 bp, Artificial sequence
  synthetic
gcaaagcgcaaagtccagcg

SEQ ID NO: 21639 - DNA, 20 bp, Artificial sequence
  synthetic
attggtgatgttacaactca

SEQ ID NO: 21640 - DNA, 20 bp, Artificial sequence
  synthetic
ctcccatcccagtcgtatct

SEQ ID NO: 21641 - DNA, 20 bp, Artificial sequence
  synthetic
gcagctgctgcccaaccaga

SEQ ID NO: 21642 - DNA, 20 bp, Artificial sequence
  synthetic
gagataattggagggctgac

SEQ ID NO: 21643 - DNA, 20 bp, Artificial sequence
  synthetic
gttcttaagtttttcctctt

SEQ ID NO: 21644 - DNA, 20 bp, Artificial sequence
  synthetic
ggggacacggttgatggttt

SEQ ID NO: 21645 - DNA, 20 bp, Artificial sequence
  synthetic
caaccaccatgtggagctgg

SEQ ID NO: 21646 - DNA, 20 bp, Artificial sequence
  synthetic
ctgtgctcctccgggcatgt

SEQ ID NO: 21647 - DNA, 20 bp, Artificial sequence
  synthetic
gtgaccagataccaaatgtg

SEQ ID NO: 21648 - DNA, 20 bp, Artificial sequence
  synthetic
gttgacgaagaagaaatcgt

SEQ ID NO: 21649 - DNA, 20 bp, Artificial sequence
  synthetic
attctggaggcatctacccc

SEQ ID NO: 21650 - DNA, 20 bp, Artificial sequence
  synthetic
aacattcctggttgtccttt

SEQ ID NO: 21651 - DNA, 20 bp, Artificial sequence
  synthetic
accttgagagctgcagtggc

SEQ ID NO: 21652 - DNA, 20 bp, Artificial sequence
  synthetic
ttgcgtgatgcacttgagac

SEQ ID NO: 21653 - DNA, 20 bp, Artificial sequence
  synthetic
ggtttcctcaaacaaagatc

SEQ ID NO: 21654 - DNA, 20 bp, Artificial sequence
  synthetic
cgtctgttgtcgatgtggtc

SEQ ID NO: 21655 - DNA, 20 bp, Artificial sequence
  synthetic
ggaggaccgatgatcgctta

SEQ ID NO: 21656 - DNA, 20 bp, Artificial sequence
  synthetic
accgtaatttggaaaagcgc

SEQ ID NO: 21657 - DNA, 20 bp, Artificial sequence
  synthetic
aagccttactactttcttac

SEQ ID NO: 21658 - DNA, 20 bp, Artificial sequence
  synthetic
gacaaacttcccgagactgt

SEQ ID NO: 21659 - DNA, 20 bp, Artificial sequence
  synthetic
tgggcgctagcactctggta

SEQ ID NO: 21660 - DNA, 20 bp, Artificial sequence
  synthetic
gtaaaagatatcatgattaa

SEQ ID NO: 21661 - DNA, 20 bp, Artificial sequence
  synthetic
agatccaatgaaggatctgg

SEQ ID NO: 21662 - DNA, 20 bp, Artificial sequence
  synthetic
gccgctatagggagagttgc

SEQ ID NO: 21663 - DNA, 20 bp, Artificial sequence
  synthetic
cagccctcaaccacacagaa

SEQ ID NO: 21664 - DNA, 20 bp, Artificial sequence
  synthetic
ttgagcattggcaacgccta

SEQ ID NO: 21665 - DNA, 20 bp, Artificial sequence
  synthetic
aacaatagctggcttaagaa

SEQ ID NO: 21666 - DNA, 20 bp, Artificial sequence
  synthetic
cagatcgccacaatcgagca

SEQ ID NO: 21667 - DNA, 20 bp, Artificial sequence
  synthetic
ttcagagacatcagaggctt

SEQ ID NO: 21668 - DNA, 20 bp, Artificial sequence
  synthetic
cccacaagagcaggccagtg

SEQ ID NO: 21669 - DNA, 20 bp, Artificial sequence
  synthetic
attaggacactaatgctaaa

SEQ ID NO: 21670 - DNA, 20 bp, Artificial sequence
  synthetic
gcttggcataacggggagca

SEQ ID NO: 21671 - DNA, 20 bp, Artificial sequence
  synthetic
caactctacgcaggaagtgg

SEQ ID NO: 21672 - DNA, 20 bp, Artificial sequence
  synthetic
cctgtcaaagacatcttcac

SEQ ID NO: 21673 - DNA, 20 bp, Artificial sequence
  synthetic
tctgatgctactgcagtgga

SEQ ID NO: 21674 - DNA, 20 bp, Artificial sequence
  synthetic
ggaggccccttacccaagga

SEQ ID NO: 21675 - DNA, 20 bp, Artificial sequence
  synthetic
tggtaccagacgaattatgt

SEQ ID NO: 21676 - DNA, 20 bp, Artificial sequence
  synthetic
ggggacagcgtgagcagagc

SEQ ID NO: 21677 - DNA, 20 bp, Artificial sequence
  synthetic
aattcacatagcacagctga

SEQ ID NO: 21678 - DNA, 20 bp, Artificial sequence
  synthetic
tgcccattggtgatcaggat

SEQ ID NO: 21679 - DNA, 20 bp, Artificial sequence
  synthetic
cagtccggagctatctacgt

SEQ ID NO: 21680 - DNA, 20 bp, Artificial sequence
  synthetic
gggatagtttccaccggggg

SEQ ID NO: 21681 - DNA, 20 bp, Artificial sequence
  synthetic
gcatcaattttgggcatacc

SEQ ID NO: 21682 - DNA, 20 bp, Artificial sequence
  synthetic
ctaggcatcaagaaaaagga

SEQ ID NO: 21683 - DNA, 20 bp, Artificial sequence
  synthetic
atgacccctgccgacaagtc

SEQ ID NO: 21684 - DNA, 20 bp, Artificial sequence
  synthetic
gtggcggctagtacactggt

SEQ ID NO: 21685 - DNA, 20 bp, Artificial sequence
  synthetic
aagtggccgatccgttatcc

SEQ ID NO: 21686 - DNA, 20 bp, Artificial sequence
  synthetic
ctaaaggacgtgctcataaa

SEQ ID NO: 21687 - DNA, 20 bp, Artificial sequence
  synthetic
gaagcaaacccggtggacca

SEQ ID NO: 21688 - DNA, 20 bp, Artificial sequence
  synthetic
atggacatgtacagagttac

SEQ ID NO: 21689 - DNA, 20 bp, Artificial sequence
  synthetic
ggtattgaagatttgatttc

SEQ ID NO: 21690 - DNA, 20 bp, Artificial sequence
  synthetic
accgactcaatagcaaggtg

SEQ ID NO: 21691 - DNA, 20 bp, Artificial sequence
  synthetic
ttgtacgcacttgaggccaa

SEQ ID NO: 21692 - DNA, 20 bp, Artificial sequence
  synthetic
aacacctccacctactcgct

SEQ ID NO: 21693 - DNA, 20 bp, Artificial sequence
  synthetic
gggtttgactatgcagtggc

SEQ ID NO: 21694 - DNA, 20 bp, Artificial sequence
  synthetic
gccctcgaagatcaggcagg

SEQ ID NO: 21695 - DNA, 20 bp, Artificial sequence
  synthetic
tcatacttcactcagagcca

SEQ ID NO: 21696 - DNA, 20 bp, Artificial sequence
  synthetic
acagactttgaagaagcaat

SEQ ID NO: 21697 - DNA, 20 bp, Artificial sequence
  synthetic
gtggaacagggaaaatccag

SEQ ID NO: 21698 - DNA, 20 bp, Artificial sequence
  synthetic
gaagaaaagctatttgcctt

SEQ ID NO: 21699 - DNA, 20 bp, Artificial sequence
  synthetic
ggcggcatgccatctggctg

SEQ ID NO: 21700 - DNA, 20 bp, Artificial sequence
  synthetic
aaccggacagcggcgtgctg

SEQ ID NO: 21701 - DNA, 20 bp, Artificial sequence
  synthetic
cgccttttgggatgcaggaa

SEQ ID NO: 21702 - DNA, 20 bp, Artificial sequence
  synthetic
attgtctaagcagcagcagg

SEQ ID NO: 21703 - DNA, 20 bp, Artificial sequence
  synthetic
acaagcgagggttggatctg

SEQ ID NO: 21704 - DNA, 20 bp, Artificial sequence
  synthetic
caccacctggtcaagaacgg

SEQ ID NO: 21705 - DNA, 20 bp, Artificial sequence
  synthetic
ccccaccagttgctaaattt

SEQ ID NO: 21706 - DNA, 20 bp, Artificial sequence
  synthetic
gatgtggcaaaacagacata

SEQ ID NO: 21707 - DNA, 20 bp, Artificial sequence
  synthetic
ccctcccctgctgacttcat

SEQ ID NO: 21708 - DNA, 20 bp, Artificial sequence
  synthetic
ccggcggacctgcccgacaa

SEQ ID NO: 21709 - DNA, 20 bp, Artificial sequence
  synthetic
tctcctgccacacatgttct

SEQ ID NO: 21710 - DNA, 20 bp, Artificial sequence
  synthetic
gttggagcaccaaccaagac

SEQ ID NO: 21711 - DNA, 20 bp, Artificial sequence
  synthetic
gacactgggtttttcttttc

SEQ ID NO: 21712 - DNA, 20 bp, Artificial sequence
  synthetic
aaattgaaggaacctgatac

SEQ ID NO: 21713 - DNA, 20 bp, Artificial sequence
  synthetic
actgactgctctgccttggg

SEQ ID NO: 21714 - DNA, 20 bp, Artificial sequence
  synthetic
gttagggctggaaagacccg

SEQ ID NO: 21715 - DNA, 20 bp, Artificial sequence
  synthetic
gaaattgatttccaacaact

SEQ ID NO: 21716 - DNA, 20 bp, Artificial sequence
  synthetic
gcaatcttaagctttgttcg

SEQ ID NO: 21717 - DNA, 20 bp, Artificial sequence
  synthetic
aggcttaattccagacctct

SEQ ID NO: 21718 - DNA, 20 bp, Artificial sequence
  synthetic
gaacatgtctagacaaggta

SEQ ID NO: 21719 - DNA, 20 bp, Artificial sequence
  synthetic
aggagcaactgatgtagatg

SEQ ID NO: 21720 - DNA, 20 bp, Artificial sequence
  synthetic
gaactcaaatgccatgttat

SEQ ID NO: 21721 - DNA, 20 bp, Artificial sequence
  synthetic
taaaaacttcaaggatgcaa

SEQ ID NO: 21722 - DNA, 20 bp, Artificial sequence
  synthetic
aggggatgtgcctagagctt

SEQ ID NO: 21723 - DNA, 20 bp, Artificial sequence
  synthetic
aggcgaaggtcttcctggaa

SEQ ID NO: 21724 - DNA, 20 bp, Artificial sequence
  synthetic
gaaagtggagtttactcagt

SEQ ID NO: 21725 - DNA, 20 bp, Artificial sequence
  synthetic
tgtagaagaaccagaggatt

SEQ ID NO: 21726 - DNA, 20 bp, Artificial sequence
  synthetic
attcggagatgttggtcttg

SEQ ID NO: 21727 - DNA, 20 bp, Artificial sequence
  synthetic
ttaccatgtctgtggttcaa

SEQ ID NO: 21728 - DNA, 20 bp, Artificial sequence
  synthetic
ggttggagatctaagtcaac

SEQ ID NO: 21729 - DNA, 20 bp, Artificial sequence
  synthetic
acctcttcttttctactcca

SEQ ID NO: 21730 - DNA, 20 bp, Artificial sequence
  synthetic
gctgtagcgaccacacaaag

SEQ ID NO: 21731 - DNA, 20 bp, Artificial sequence
  synthetic
accgctcatacgcgatattg

SEQ ID NO: 21732 - DNA, 20 bp, Artificial sequence
  synthetic
caacaccaacaacaagcgtt

SEQ ID NO: 21733 - DNA, 20 bp, Artificial sequence
  synthetic
acaaggagttgacaatgctg

SEQ ID NO: 21734 - DNA, 20 bp, Artificial sequence
  synthetic
ctaccaagaaaatgattacc

SEQ ID NO: 21735 - DNA, 20 bp, Artificial sequence
  synthetic
tacctctgcctccgtccgga

SEQ ID NO: 21736 - DNA, 20 bp, Artificial sequence
  synthetic
cttcactgatgagttcatca

SEQ ID NO: 21737 - DNA, 20 bp, Artificial sequence
  synthetic
tgctacttgctcttccttta

SEQ ID NO: 21738 - DNA, 20 bp, Artificial sequence
  synthetic
aacaaatccaggccctgtgc

SEQ ID NO: 21739 - DNA, 20 bp, Artificial sequence
  synthetic
ttggctcaaacaaaaattgt

SEQ ID NO: 21740 - DNA, 20 bp, Artificial sequence
  synthetic
ctctagcttcattgttgcta

SEQ ID NO: 21741 - DNA, 20 bp, Artificial sequence
  synthetic
tgctcagtctccaccagact

SEQ ID NO: 21742 - DNA, 20 bp, Artificial sequence
  synthetic
caaactcaaggatgtgagac

SEQ ID NO: 21743 - DNA, 20 bp, Artificial sequence
  synthetic
cactggaatcatgaacaccg

SEQ ID NO: 21744 - DNA, 20 bp, Artificial sequence
  synthetic
gaggacagtcgcccacgacg

SEQ ID NO: 21745 - DNA, 20 bp, Artificial sequence
  synthetic
ggactacgctcattccaaat

SEQ ID NO: 21746 - DNA, 20 bp, Artificial sequence
  synthetic
caatttctttacagagcaaa

SEQ ID NO: 21747 - DNA, 20 bp, Artificial sequence
  synthetic
gacctgggctcagcccgggt

SEQ ID NO: 21748 - DNA, 20 bp, Artificial sequence
  synthetic
agcctaccaagtgcgcaatt

SEQ ID NO: 21749 - DNA, 20 bp, Artificial sequence
  synthetic
cagggacggcaaactcccca

SEQ ID NO: 21750 - DNA, 20 bp, Artificial sequence
  synthetic
ggtggggaactgggcgaagg

SEQ ID NO: 21751 - DNA, 20 bp, Artificial sequence
  synthetic
caatagcacggccttgaact

SEQ ID NO: 21752 - DNA, 20 bp, Artificial sequence
  synthetic
ccttaacaacaccaggccac

SEQ ID NO: 21753 - DNA, 20 bp, Artificial sequence
  synthetic
ggaagacagggacaggtccg

SEQ ID NO: 21754 - DNA, 20 bp, Artificial sequence
  synthetic
ggccattaagtgggagtacg

SEQ ID NO: 21755 - DNA, 20 bp, Artificial sequence
  synthetic
gttcttctgctttgcgtggt

SEQ ID NO: 21756 - DNA, 20 bp, Artificial sequence
  synthetic
tgacatcaccaaactactcc

SEQ ID NO: 21757 - DNA, 20 bp, Artificial sequence
  synthetic
tactggcacctgtgtgtata

SEQ ID NO: 21758 - DNA, 20 bp, Artificial sequence
  synthetic
cggtaagagcaccaaggtcc

SEQ ID NO: 21759 - DNA, 20 bp, Artificial sequence
  synthetic
gtactccacctacggcaagt

SEQ ID NO: 21760 - DNA, 20 bp, Artificial sequence
  synthetic
ccctccgggctccgtcactg

SEQ ID NO: 21761 - DNA, 20 bp, Artificial sequence
  synthetic
cgcattgggcatcaatgccg

SEQ ID NO: 21762 - DNA, 20 bp, Artificial sequence
  synthetic
tgaccctacctttaccattg

SEQ ID NO: 21763 - DNA, 20 bp, Artificial sequence
  synthetic
aatcaccaaatacatcatga

SEQ ID NO: 21764 - DNA, 20 bp, Artificial sequence
  synthetic
ccccacacactacgtgccgg

SEQ ID NO: 21765 - DNA, 20 bp, Artificial sequence
  synthetic
gagcgactttaagacctggc

SEQ ID NO: 21766 - DNA, 20 bp, Artificial sequence
  synthetic
cgtcggtcctaggacctgca

SEQ ID NO: 21767 - DNA, 20 bp, Artificial sequence
  synthetic
catgactactgacaatctca

SEQ ID NO: 21768 - DNA, 20 bp, Artificial sequence
  synthetic
cgagcccgaaccggacgtag

SEQ ID NO: 21769 - DNA, 20 bp, Artificial sequence
  synthetic
ctcccctgacgccgagctca

SEQ ID NO: 21770 - DNA, 20 bp, Artificial sequence
  synthetic
tcggagattcgccccagccc

SEQ ID NO: 21771 - DNA, 20 bp, Artificial sequence
  synthetic
cctggcgcccccacattcag

SEQ ID NO: 21772 - DNA, 20 bp, Artificial sequence
  synthetic
gcctgagaaggggggtcgta

SEQ ID NO: 21773 - DNA, 20 bp, Artificial sequence
  synthetic
ggtctactaccttacccgtg

SEQ ID NO: 21774 - DNA, 20 bp, Artificial sequence
  synthetic
gcttgaacaggctctcaact

SEQ ID NO: 21775 - DNA, 20 bp, Artificial sequence
  synthetic
atcacagcgtgtctcatgcc

SEQ ID NO: 21776 - DNA, 20 bp, Artificial sequence
  synthetic
cagagggccaatacggtttg

SEQ ID NO: 21777 - DNA, 20 bp, Artificial sequence
  synthetic
gggcaaaaaacaaaagaaaa

SEQ ID NO: 21778 - DNA, 20 bp, Artificial sequence
  synthetic
caatcaatgctggattcgag

SEQ ID NO: 21779 - DNA, 20 bp, Artificial sequence
  synthetic
acccacccttgacataagaa

SEQ ID NO: 21780 - DNA, 20 bp, Artificial sequence
  synthetic
gaccgacagaggctggggta

SEQ ID NO: 21781 - DNA, 20 bp, Artificial sequence
  synthetic
agtgcatcgtgagtggttca

SEQ ID NO: 21782 - DNA, 20 bp, Artificial sequence
  synthetic
tacctcggagtgtgacagca

SEQ ID NO: 21783 - DNA, 20 bp, Artificial sequence
  synthetic
gcccgccacagaggtgttaa

SEQ ID NO: 21784 - DNA, 20 bp, Artificial sequence
  synthetic
cgcgtttgggtattggctga

SEQ ID NO: 21785 - DNA, 20 bp, Artificial sequence
  synthetic
tagtgccagtgctgcccaac

SEQ ID NO: 21786 - DNA, 20 bp, Artificial sequence
  synthetic
gtacggtcccgaaagagata

SEQ ID NO: 21787 - DNA, 20 bp, Artificial sequence
  synthetic
ctttgattttttcaccctgg

SEQ ID NO: 21788 - DNA, 20 bp, Artificial sequence
  synthetic
tcaggtgctcattggaagaa

SEQ ID NO: 21789 - DNA, 20 bp, Artificial sequence
  synthetic
gtgtcagatcgcgaaagcgc

SEQ ID NO: 21790 - DNA, 20 bp, Artificial sequence
  synthetic
ctcgccgaagctgtaaggcg

SEQ ID NO: 21791 - DNA, 20 bp, Artificial sequence
  synthetic
ctctcaaaagcatcaaacaa

SEQ ID NO: 21792 - DNA, 20 bp, Artificial sequence
  synthetic
gtatccaataaatcctcttg

SEQ ID NO: 21793 - DNA, 20 bp, Artificial sequence
  synthetic
gacccttcgtgcaccctaaa

SEQ ID NO: 21794 - DNA, 20 bp, Artificial sequence
  synthetic
atctactcacggaggaccct

SEQ ID NO: 21795 - DNA, 20 bp, Artificial sequence
  synthetic
cgttcccccttcgcctggga

SEQ ID NO: 21796 - DNA, 20 bp, Artificial sequence
  synthetic
tagtccactatcgccagttg

SEQ ID NO: 21797 - DNA, 20 bp, Artificial sequence
  synthetic
gagaaacagaggaaaaggaa

SEQ ID NO: 21798 - DNA, 20 bp, Artificial sequence
  synthetic
aaaacagtcccaccctgttt

SEQ ID NO: 21799 - DNA, 20 bp, Artificial sequence
  synthetic
tctgtcgcctctggatccct

SEQ ID NO: 21800 - DNA, 20 bp, Artificial sequence
  synthetic
gagaagtagccactagagaa

SEQ ID NO: 21801 - DNA, 20 bp, Artificial sequence
  synthetic
ccagcaagtctgccgtcaaa

SEQ ID NO: 21802 - DNA, 20 bp, Artificial sequence
  synthetic
ccaaagttgtaaccaagaag

SEQ ID NO: 21803 - DNA, 20 bp, Artificial sequence
  synthetic
gggtccgcagacaccaaact

SEQ ID NO: 21804 - DNA, 20 bp, Artificial sequence
  synthetic
ttcaacgctctcaaaatccc

SEQ ID NO: 21805 - DNA, 20 bp, Artificial sequence
  synthetic
aatatcaggcaaccaccctc

SEQ ID NO: 21806 - DNA, 20 bp, Artificial sequence
  synthetic
tacccttaaggcaggcaaag

SEQ ID NO: 21807 - DNA, 20 bp, Artificial sequence
  synthetic
tctcaaagaagtcgaaaagt

SEQ ID NO: 21808 - DNA, 20 bp, Artificial sequence
  synthetic
gtatacagtagtttgaatcc

SEQ ID NO: 21809 - DNA, 20 bp, Artificial sequence
  synthetic
agcagtcgctactctgttca

SEQ ID NO: 21810 - DNA, 20 bp, Artificial sequence
  synthetic
ctaaaccagatggaaggtgg

SEQ ID NO: 21811 - DNA, 20 bp, Artificial sequence
  synthetic
atgttacaccacccaaagat

SEQ ID NO: 21812 - DNA, 20 bp, Artificial sequence
  synthetic
gcaaagtaaaagtttccaga

SEQ ID NO: 21813 - DNA, 20 bp, Artificial sequence
  synthetic
gttttacatggttataccca

SEQ ID NO: 21814 - DNA, 20 bp, Artificial sequence
  synthetic
aactcttatttggtatagat

SEQ ID NO: 21815 - DNA, 20 bp, Artificial sequence
  synthetic
agagggtggctaggcctgca

SEQ ID NO: 21816 - DNA, 20 bp, Artificial sequence
  synthetic
attgcacgttctcttagaat

SEQ ID NO: 21817 - DNA, 20 bp, Artificial sequence
  synthetic
tataaaactccaaagtcctg

SEQ ID NO: 21818 - DNA, 20 bp, Artificial sequence
  synthetic
aagagagccctgcctaagga

SEQ ID NO: 21819 - DNA, 20 bp, Artificial sequence
  synthetic
ggtaggcctgtaaatgaaat

SEQ ID NO: 21820 - DNA, 20 bp, Artificial sequence
  synthetic
attgggttatattatgaatt

SEQ ID NO: 21821 - DNA, 20 bp, Artificial sequence
  synthetic
gggctaaaaatagaagtcac

SEQ ID NO: 21822 - DNA, 20 bp, Artificial sequence
  synthetic
gacttcaggacctgcagact

SEQ ID NO: 21823 - DNA, 20 bp, Artificial sequence
  synthetic
ctcaccacattaagctccaa

SEQ ID NO: 21824 - DNA, 20 bp, Artificial sequence
  synthetic
gttgcccagaaggtccaaaa

SEQ ID NO: 21825 - DNA, 20 bp, Artificial sequence
  synthetic
acactttttggactcctgga

SEQ ID NO: 21826 - DNA, 20 bp, Artificial sequence
  synthetic
attgtaacttgctgccaggc

SEQ ID NO: 21827 - DNA, 20 bp, Artificial sequence
  synthetic
ttcaaagctctgcagttcca

SEQ ID NO: 21828 - DNA, 20 bp, Artificial sequence
  synthetic
caatattatctttgtcagaa

SEQ ID NO: 21829 - DNA, 20 bp, Artificial sequence
  synthetic
tctcagggtgtgtgcggcgt

SEQ ID NO: 21830 - DNA, 20 bp, Artificial sequence
  synthetic
ggaagccaggaatgtccagg

SEQ ID NO: 21831 - DNA, 20 bp, Artificial sequence
  synthetic
tttcactggtgctgcaatgg

SEQ ID NO: 21832 - DNA, 20 bp, Artificial sequence
  synthetic
cgccttcctctgcttttccc

SEQ ID NO: 21833 - DNA, 20 bp, Artificial sequence
  synthetic
cccccacatgtggatcgttg

SEQ ID NO: 21834 - DNA, 20 bp, Artificial sequence
  synthetic
cacctttactgatgagctca

SEQ ID NO: 21835 - DNA, 20 bp, Artificial sequence
  synthetic
cacttccacttgcaattcct

SEQ ID NO: 21836 - DNA, 20 bp, Artificial sequence
  synthetic
atgggaaaaagcaaaaacca

SEQ ID NO: 21837 - DNA, 20 bp, Artificial sequence
  synthetic
tgattggcttaagagcaaat

SEQ ID NO: 21838 - DNA, 20 bp, Artificial sequence
  synthetic
ttctatgccccccgattcgg

SEQ ID NO: 21839 - DNA, 20 bp, Artificial sequence
  synthetic
gaggagaacagtcgctcatg

SEQ ID NO: 21840 - DNA, 20 bp, Artificial sequence
  synthetic
tgttttcaccatccttggta

SEQ ID NO: 21841 - DNA, 20 bp, Artificial sequence
  synthetic
cttatgtaacgatgagttag

SEQ ID NO: 21842 - DNA, 20 bp, Artificial sequence
  synthetic
gcagagatattgtatttaag

SEQ ID NO: 21843 - DNA, 20 bp, Artificial sequence
  synthetic
tggtcggccacaggcggcgt

SEQ ID NO: 21844 - DNA, 20 bp, Artificial sequence
  synthetic
cctcctgcttcccttccacc

SEQ ID NO: 21845 - DNA, 20 bp, Artificial sequence
  synthetic
aattccgcattgcagagata

SEQ ID NO: 21846 - DNA, 20 bp, Artificial sequence
  synthetic
gctgcggcttaggagggcag

SEQ ID NO: 21847 - DNA, 20 bp, Artificial sequence
  synthetic
cggcgaatcgacaagggaga

SEQ ID NO: 21848 - DNA, 20 bp, Artificial sequence
  synthetic
gttattttaggacccgcccc

SEQ ID NO: 21849 - DNA, 20 bp, Artificial sequence
  synthetic
tcccaccaggatcacagtgc

SEQ ID NO: 21850 - DNA, 20 bp, Artificial sequence
  synthetic
ttctctcagctggagaaaca

SEQ ID NO: 21851 - DNA, 20 bp, Artificial sequence
  synthetic
ctgcggggcgaggagctggc

SEQ ID NO: 21852 - DNA, 20 bp, Artificial sequence
  synthetic
tgccagcaggcctggtacca

SEQ ID NO: 21853 - DNA, 20 bp, Artificial sequence
  synthetic
cagcccatttacatcgtcat

SEQ ID NO: 21854 - DNA, 20 bp, Artificial sequence
  synthetic
aactgcctggtgacagaaaa

SEQ ID NO: 21855 - DNA, 20 bp, Artificial sequence
  synthetic
tttgggatcctgctgtggga

SEQ ID NO: 21856 - DNA, 20 bp, Artificial sequence
  synthetic
tgccacttagtcatcattac

SEQ ID NO: 21857 - DNA, 20 bp, Artificial sequence
  synthetic
gtggtggccatgcctgtagt

SEQ ID NO: 21858 - DNA, 20 bp, Artificial sequence
  synthetic
gcccctcttacggatcaagg

SEQ ID NO: 21859 - DNA, 20 bp, Artificial sequence
  synthetic
cggaagtcaggaaacagccg

SEQ ID NO: 21860 - DNA, 20 bp, Artificial sequence
  synthetic
cataaagatcgccccttggt

SEQ ID NO: 21861 - DNA, 20 bp, Artificial sequence
  synthetic
cacttagttgttggaacaca

SEQ ID NO: 21862 - DNA, 20 bp, Artificial sequence
  synthetic
aatatcttgggtacaagtta

SEQ ID NO: 21863 - DNA, 20 bp, Artificial sequence
  synthetic
ggtcagatcctaacgaggcg

SEQ ID NO: 21864 - DNA, 20 bp, Artificial sequence
  synthetic
ccacacacccaaggccatgc

SEQ ID NO: 21865 - DNA, 20 bp, Artificial sequence
  synthetic
cgctcccagaggggatcctg

SEQ ID NO: 21866 - DNA, 20 bp, Artificial sequence
  synthetic
agtgggaaaaaggatggaac

SEQ ID NO: 21867 - DNA, 20 bp, Artificial sequence
  synthetic
gagcagccagggaacctttg

SEQ ID NO: 21868 - DNA, 20 bp, Artificial sequence
  synthetic
ggaactgaccggttagtctt

SEQ ID NO: 21869 - DNA, 20 bp, Artificial sequence
  synthetic
actcaggtctctggcgtggc

SEQ ID NO: 21870 - DNA, 20 bp, Artificial sequence
  synthetic
tttatggggagtgagtactg

SEQ ID NO: 21871 - DNA, 20 bp, Artificial sequence
  synthetic
gcggtcctgcagaaccgagc

SEQ ID NO: 21872 - DNA, 20 bp, Artificial sequence
  synthetic
atcggaagttggctgcgagg

SEQ ID NO: 21873 - DNA, 20 bp, Artificial sequence
  synthetic
tgctcttgcatagggggaaa

SEQ ID NO: 21874 - DNA, 20 bp, Artificial sequence
  synthetic
agcgtgccggggcactggct

SEQ ID NO: 21875 - DNA, 20 bp, Artificial sequence
  synthetic
tccccagtaactatgtcgcg

SEQ ID NO: 21876 - DNA, 20 bp, Artificial sequence
  synthetic
tcgatatggctgctcagatt

SEQ ID NO: 21877 - DNA, 20 bp, Artificial sequence
  synthetic
ccaagttccccatcaagtgg

SEQ ID NO: 21878 - DNA, 20 bp, Artificial sequence
  synthetic
gcatgccctgcccgcccgag

SEQ ID NO: 21879 - DNA, 20 bp, Artificial sequence
  synthetic
cgtcttccctgttttgccct

SEQ ID NO: 21880 - DNA, 20 bp, Artificial sequence
  synthetic
acttgggaaatcgggagagt

SEQ ID NO: 21881 - DNA, 20 bp, Artificial sequence
  synthetic
cgacaaaggggaggaagtgg

SEQ ID NO: 21882 - DNA, 20 bp, Artificial sequence
  synthetic
ggcggttgaggggtcagatc

SEQ ID NO: 21883 - DNA, 20 bp, Artificial sequence
  synthetic
tacggatcaaggcatagccg

SEQ ID NO: 21884 - DNA, 20 bp, Artificial sequence
  synthetic
tgttggaacacacctgtctt

SEQ ID NO: 21885 - DNA, 20 bp, Artificial sequence
  synthetic
gggtacaagttaggcagtac

SEQ ID NO: 21886 - DNA, 20 bp, Artificial sequence
  synthetic
ccaaggccatgtttgtggtt

SEQ ID NO: 21887 - DNA, 20 bp, Artificial sequence
  synthetic
agagaggctaaagatcttca

SEQ ID NO: 21888 - DNA, 20 bp, Artificial sequence
  synthetic
agggaacctttggattacat

SEQ ID NO: 21889 - DNA, 20 bp, Artificial sequence
  synthetic
cggtataaccgggggatgcg

SEQ ID NO: 21890 - DNA, 20 bp, Artificial sequence
  synthetic
ccgagcggctattgacttct

SEQ ID NO: 21891 - DNA, 20 bp, Artificial sequence
  synthetic
acagcctgagaggcactggc

SEQ ID NO: 21892 - DNA, 20 bp, Artificial sequence
  synthetic
aaattaaactcctcttgaat

SEQ ID NO: 21893 - DNA, 20 bp, Artificial sequence
  synthetic
cagaaaccacaaaagaatac

SEQ ID NO: 21894 - DNA, 20 bp, Artificial sequence
  synthetic
gataattgatgtcttgttct

SEQ ID NO: 21895 - DNA, 20 bp, Artificial sequence
  synthetic
aatccagagatatacagttc

SEQ ID NO: 21896 - DNA, 20 bp, Artificial sequence
  synthetic
ggcagcttatcagggagatt

SEQ ID NO: 21897 - DNA, 20 bp, Artificial sequence
  synthetic
ctcttttggcttaggtactg

SEQ ID NO: 21898 - DNA, 20 bp, Artificial sequence
  synthetic
gcatgtctctgttggtaccc

SEQ ID NO: 21899 - DNA, 20 bp, Artificial sequence
  synthetic
ccacagcccaaagaaagctt

SEQ ID NO: 21900 - DNA, 20 bp, Artificial sequence
  synthetic
cgcggaacgcggggaaaggg

SEQ ID NO: 21901 - DNA, 20 bp, Artificial sequence
  synthetic
tgtaaaggtccccagctatg

SEQ ID NO: 21902 - DNA, 20 bp, Artificial sequence
  synthetic
actagacaacctgattcatt

SEQ ID NO: 21903 - DNA, 20 bp, Artificial sequence
  synthetic
tcctgagctctcttgctccc

SEQ ID NO: 21904 - DNA, 20 bp, Artificial sequence
  synthetic
ggcgtctggcttgcacccgc

SEQ ID NO: 21905 - DNA, 20 bp, Artificial sequence
  synthetic
cgttttgggtctttccttta

SEQ ID NO: 21906 - DNA, 20 bp, Artificial sequence
  synthetic
aactttgccaatatattgct

SEQ ID NO: 21907 - DNA, 20 bp, Artificial sequence
  synthetic
cccccaaaaggccccccccg

SEQ ID NO: 21908 - DNA, 20 bp, Artificial sequence
  synthetic
gggacttagcgccccccaaa

SEQ ID NO: 21909 - DNA, 20 bp, Artificial sequence
  synthetic
ggctgaaaatacggtcctcc

SEQ ID NO: 21910 - DNA, 20 bp, Artificial sequence
  synthetic
gcctggcgggtcctacctca

SEQ ID NO: 21911 - DNA, 20 bp, Artificial sequence
  synthetic
gccctggctgcccgcctccg

SEQ ID NO: 21912 - DNA, 20 bp, Artificial sequence
  synthetic
gtcttgggagacctccagtg

SEQ ID NO: 21913 - DNA, 20 bp, Artificial sequence
  synthetic
tctagatataacgagcaaga

SEQ ID NO: 21914 - DNA, 20 bp, Artificial sequence
  synthetic
ctgcagactcaggccttaag

SEQ ID NO: 21915 - DNA, 20 bp, Artificial sequence
  synthetic
tccctttctcatcacgttcc

SEQ ID NO: 21916 - DNA, 20 bp, Artificial sequence
  synthetic
atcaacaatggatgacaaca

SEQ ID NO: 21917 - DNA, 20 bp, Artificial sequence
  synthetic
taacctgggaaatatgggga

SEQ ID NO: 21918 - DNA, 20 bp, Artificial sequence
  synthetic
gggaaccttcccctccctgg

SEQ ID NO: 21919 - DNA, 20 bp, Artificial sequence
  synthetic
aaggcaacgccttattatta

SEQ ID NO: 21920 - DNA, 20 bp, Artificial sequence
  synthetic
cttgctgtttcctacgcatt

SEQ ID NO: 21921 - DNA, 20 bp, Artificial sequence
  synthetic
ccgattacatcaaccttcga

SEQ ID NO: 21922 - DNA, 20 bp, Artificial sequence
  synthetic
agtgtagcgcagagaggttg

SEQ ID NO: 21923 - DNA, 20 bp, Artificial sequence
  synthetic
ttcttgcagctgtgctaagc

SEQ ID NO: 21924 - DNA, 20 bp, Artificial sequence
  synthetic
cttcccatgtaacaagcccc

SEQ ID NO: 21925 - DNA, 20 bp, Artificial sequence
  synthetic
actttcccccttcgagcagt

SEQ ID NO: 21926 - DNA, 20 bp, Artificial sequence
  synthetic
cccccccttcgataccctcc

SEQ ID NO: 21927 - DNA, 20 bp, Artificial sequence
  synthetic
cacctggtcagaattggttg

SEQ ID NO: 21928 - DNA, 20 bp, Artificial sequence
  synthetic
ctcagctctcggtcctgagc

SEQ ID NO: 21929 - DNA, 20 bp, Artificial sequence
  synthetic
taaggcaaaccacggtttgg

SEQ ID NO: 21930 - DNA, 20 bp, Artificial sequence
  synthetic
tgaaagcgatgaatccgtta

SEQ ID NO: 21931 - DNA, 20 bp, Artificial sequence
  synthetic
acgtacaatgcaatgctaca

SEQ ID NO: 21932 - DNA, 20 bp, Artificial sequence
  synthetic
acacctatgtgccaattacc

SEQ ID NO: 21933 - DNA, 20 bp, Artificial sequence
  synthetic
acaagaatcactcaacaagt

SEQ ID NO: 21934 - DNA, 20 bp, Artificial sequence
  synthetic
cctgggcacctagggcgcct

SEQ ID NO: 21935 - DNA, 20 bp, Artificial sequence
  synthetic
caggcggtgagggaatagtt

SEQ ID NO: 21936 - DNA, 20 bp, Artificial sequence
  synthetic
gagaggacagtttattggaa

SEQ ID NO: 21937 - DNA, 20 bp, Artificial sequence
  synthetic
gcatcccatacacaataaga

SEQ ID NO: 21938 - DNA, 20 bp, Artificial sequence
  synthetic
ataaacaacagacagtggtc

SEQ ID NO: 21939 - DNA, 20 bp, Artificial sequence
  synthetic
gtccactgatttgtggaaag

SEQ ID NO: 21940 - DNA, 20 bp, Artificial sequence
  synthetic
attgccggcgttccgcactg

SEQ ID NO: 21941 - DNA, 20 bp, Artificial sequence
  synthetic
caacctcatgctccactaag

SEQ ID NO: 21942 - DNA, 20 bp, Artificial sequence
  synthetic
gctggaacgcctctgaggtc

SEQ ID NO: 21943 - DNA, 20 bp, Artificial sequence
  synthetic
gccgtgattatatccccggc

SEQ ID NO: 21944 - DNA, 20 bp, Artificial sequence
  synthetic
ccctatacaggtttaatcgc

SEQ ID NO: 21945 - DNA, 20 bp, Artificial sequence
  synthetic
ccccggccataacccaccag

SEQ ID NO: 21946 - DNA, 20 bp, Artificial sequence
  synthetic
accccgcatcctttgatgct

SEQ ID NO: 21947 - DNA, 20 bp, Artificial sequence
  synthetic
acccactcctcgggaccggc

SEQ ID NO: 21948 - DNA, 20 bp, Artificial sequence
  synthetic
cagcaaatctggctatcgaa

SEQ ID NO: 21949 - DNA, 20 bp, Artificial sequence
  synthetic
agatcccagccatcgacttt

SEQ ID NO: 21950 - DNA, 20 bp, Artificial sequence
  synthetic
ccttgacgcgccacactgag

SEQ ID NO: 21951 - DNA, 20 bp, Artificial sequence
  synthetic
cagatattgtgcactgtcgt

SEQ ID NO: 21952 - DNA, 20 bp, Artificial sequence
  synthetic
aattgtacgagctagtggag

SEQ ID NO: 21953 - DNA, 20 bp, Artificial sequence
  synthetic
agtttgattccacccagaat

SEQ ID NO: 21954 - DNA, 20 bp, Artificial sequence
  synthetic
gcacccttctatggaataca

SEQ ID NO: 21955 - DNA, 20 bp, Artificial sequence
  synthetic
atgtagctcagatgtgtgtg

SEQ ID NO: 21956 - DNA, 20 bp, Artificial sequence
  synthetic
gattctcagcccttcgcaat

SEQ ID NO: 21957 - DNA, 20 bp, Artificial sequence
  synthetic
gctggggccgcgccgctaac

SEQ ID NO: 21958 - DNA, 20 bp, Artificial sequence
  synthetic
tccgttgacatgaattcaat

SEQ ID NO: 21959 - DNA, 20 bp, Artificial sequence
  synthetic
gggactgccgagctcaccac

SEQ ID NO: 21960 - DNA, 20 bp, Artificial sequence
  synthetic
acaccttccccagccccatc

SEQ ID NO: 21961 - DNA, 20 bp, Artificial sequence
  synthetic
ctgctcgttgagaatgccgc

SEQ ID NO: 21962 - DNA, 20 bp, Artificial sequence
  synthetic
cagtctactgtcgctgagct

SEQ ID NO: 21963 - DNA, 20 bp, Artificial sequence
  synthetic
gggcagaaaacaaaacaaaa

SEQ ID NO: 21964 - DNA, 20 bp, Artificial sequence
  synthetic
tggcagtaacaacggtcaac

SEQ ID NO: 21965 - DNA, 20 bp, Artificial sequence
  synthetic
aggcttcactgatcgtgggt

SEQ ID NO: 21966 - DNA, 20 bp, Artificial sequence
  synthetic
agccatcgtggtggagtact

SEQ ID NO: 21967 - DNA, 20 bp, Artificial sequence
  synthetic
atcctactctgggagtgatg

SEQ ID NO: 21968 - DNA, 20 bp, Artificial sequence
  synthetic
ggttgggaggggagacaagc

SEQ ID NO: 21969 - DNA, 20 bp, Artificial sequence
  synthetic
tgacactggatgtgccattg

SEQ ID NO: 21970 - DNA, 20 bp, Artificial sequence
  synthetic
acaggttgatgctttcaatg

SEQ ID NO: 21971 - DNA, 20 bp, Artificial sequence
  synthetic
ggcgaggtatgtggtgctag

SEQ ID NO: 21972 - DNA, 20 bp, Artificial sequence
  synthetic
gtggccagccactgagtttt

SEQ ID NO: 21973 - DNA, 20 bp, Artificial sequence
  synthetic
tgttttccacacactatggc

SEQ ID NO: 21974 - DNA, 20 bp, Artificial sequence
  synthetic
tgatttgcaagatgagatac

SEQ ID NO: 21975 - DNA, 20 bp, Artificial sequence
  synthetic
tgggccgcgcacgaatgcca

SEQ ID NO: 21976 - DNA, 20 bp, Artificial sequence
  synthetic
accggaaaaacagaggtcac

SEQ ID NO: 21977 - DNA, 20 bp, Artificial sequence
  synthetic
aagcatggcactggacctgc

SEQ ID NO: 21978 - DNA, 20 bp, Artificial sequence
  synthetic
ggctacgctcactttgtggg

SEQ ID NO: 21979 - DNA, 20 bp, Artificial sequence
  synthetic
aaaagttctctgcccttaca

SEQ ID NO: 21980 - DNA, 20 bp, Artificial sequence
  synthetic
actactggggcgaatggatc

SEQ ID NO: 21981 - DNA, 20 bp, Artificial sequence
  synthetic
agtgttcgctgaacagaatc

SEQ ID NO: 21982 - DNA, 20 bp, Artificial sequence
  synthetic
agggaaaatgtacgctgatg

SEQ ID NO: 21983 - DNA, 20 bp, Artificial sequence
  synthetic
agaaggaaagaccgtaatgg

SEQ ID NO: 21984 - DNA, 20 bp, Artificial sequence
  synthetic
gatagctgtcaggacctggc

SEQ ID NO: 21985 - DNA, 20 bp, Artificial sequence
  synthetic
agcatatgcacagatgtggc

SEQ ID NO: 21986 - DNA, 20 bp, Artificial sequence
  synthetic
ccggatactgggtagacggt

SEQ ID NO: 21987 - DNA, 20 bp, Artificial sequence
  synthetic
tagaggttagaggagacccc

SEQ ID NO: 21988 - DNA, 20 bp, Artificial sequence
  synthetic
gaccccgcatttgcatcaaa

SEQ ID NO: 21989 - DNA, 20 bp, Artificial sequence
  synthetic
cccgaacagggacctgagag

SEQ ID NO: 21990 - DNA, 20 bp, Artificial sequence
  synthetic
gttagagaaggtgacggtac

SEQ ID NO: 21991 - DNA, 20 bp, Artificial sequence
  synthetic
tcagaaaaatctaagtgtga

SEQ ID NO: 21992 - DNA, 20 bp, Artificial sequence
  synthetic
gttgaggatgtaatgaacac

SEQ ID NO: 21993 - DNA, 20 bp, Artificial sequence
  synthetic
cctatagatattttatatgg

SEQ ID NO: 21994 - DNA, 20 bp, Artificial sequence
  synthetic
tttgaggtagaaaatagtac

SEQ ID NO: 21995 - DNA, 20 bp, Artificial sequence
  synthetic
catactggtcatccctggaa

SEQ ID NO: 21996 - DNA, 20 bp, Artificial sequence
  synthetic
aagagctgggtgaagtcaat

SEQ ID NO: 21997 - DNA, 20 bp, Artificial sequence
  synthetic
tatgactgttgcattaaagc

SEQ ID NO: 21998 - DNA, 20 bp, Artificial sequence
  synthetic
ctttgtaataaatataattc

SEQ ID NO: 21999 - DNA, 20 bp, Artificial sequence
  synthetic
ctccgggcctctcctgcctg

SEQ ID NO: 22000 - DNA, 20 bp, Artificial sequence
  synthetic
gaccccttaaaagacggagg

SEQ ID NO: 22001 - DNA, 20 bp, Artificial sequence
  synthetic
ggcaagacagatatgcctgc

SEQ ID NO: 22002 - DNA, 20 bp, Artificial sequence
  synthetic
gccacgtgtggtgccgtccg

SEQ ID NO: 22003 - DNA, 20 bp, Artificial sequence
  synthetic
attaagaagaaatcaggaaa

SEQ ID NO: 22004 - DNA, 20 bp, Artificial sequence
  synthetic
gctgtgtccttgcatttaga

SEQ ID NO: 22005 - DNA, 20 bp, Artificial sequence
  synthetic
ttgggcatagaacatactac

SEQ ID NO: 22006 - DNA, 20 bp, Artificial sequence
  synthetic
ttttgaatataaaagcctgt

SEQ ID NO: 22007 - DNA, 20 bp, Artificial sequence
  synthetic
aattaaaattacctctctct

SEQ ID NO: 22008 - DNA, 20 bp, Artificial sequence
  synthetic
acccagagagagggatatgt

SEQ ID NO: 22009 - DNA, 20 bp, Artificial sequence
  synthetic
aggcgcaaggggaaaacaag

SEQ ID NO: 22010 - DNA, 20 bp, Artificial sequence
  synthetic
acgcaactgctgcccagcag

SEQ ID NO: 22011 - DNA, 20 bp, Artificial sequence
  synthetic
tgtaaacaagttgcctatat

SEQ ID NO: 22012 - DNA, 20 bp, Artificial sequence
  synthetic
gagttgatcacaaatgaact

SEQ ID NO: 22013 - DNA, 20 bp, Artificial sequence
  synthetic
atagggagagtaactggaag

SEQ ID NO: 22014 - DNA, 20 bp, Artificial sequence
  synthetic
tgcaagaaaggaaagaactt

SEQ ID NO: 22015 - DNA, 20 bp, Artificial sequence
  synthetic
aagaacacaaaaattgtcgg

SEQ ID NO: 22016 - DNA, 20 bp, Artificial sequence
  synthetic
ccacaaagtcacgttgatgt

SEQ ID NO: 22017 - DNA, 20 bp, Artificial sequence
  synthetic
agccaggtggtgaagttagt

SEQ ID NO: 22018 - DNA, 20 bp, Artificial sequence
  synthetic
gacagtacctcttgcaatag

SEQ ID NO: 22019 - DNA, 20 bp, Artificial sequence
  synthetic
ttgcaatgtgtgcctatctt

SEQ ID NO: 22020 - DNA, 20 bp, Artificial sequence
  synthetic
cacaggaaagttatagaaga

SEQ ID NO: 22021 - DNA, 20 bp, Artificial sequence
  synthetic
ataacgtgtgggatgtcgct

SEQ ID NO: 22022 - DNA, 20 bp, Artificial sequence
  synthetic
cctgctgaggaaggtgactt

SEQ ID NO: 22023 - DNA, 20 bp, Artificial sequence
  synthetic
ccaaaagcagttatagagga

SEQ ID NO: 22024 - DNA, 20 bp, Artificial sequence
  synthetic
gctgttaagaacataatggc

SEQ ID NO: 22025 - DNA, 20 bp, Artificial sequence
  synthetic
caggctctctcaaagaggca

SEQ ID NO: 22026 - DNA, 20 bp, Artificial sequence
  synthetic
cacacagcactatacaaaag

SEQ ID NO: 22027 - DNA, 20 bp, Artificial sequence
  synthetic
tccgagacacagcaagaagg

SEQ ID NO: 22028 - DNA, 20 bp, Artificial sequence
  synthetic
ggcaaacttaccaaagtgga

SEQ ID NO: 22029 - DNA, 20 bp, Artificial sequence
  synthetic
gggactataaaaccagtact

SEQ ID NO: 22030 - DNA, 20 bp, Artificial sequence
  synthetic
gcttaccaattggcacaggg

SEQ ID NO: 22031 - DNA, 20 bp, Artificial sequence
  synthetic
cgcccaacacgcacagctaa

SEQ ID NO: 22032 - DNA, 20 bp, Artificial sequence
  synthetic
aggtaccgagacctcaaaat

SEQ ID NO: 22033 - DNA, 20 bp, Artificial sequence
  synthetic
caagcagcagcacaagctaa

SEQ ID NO: 22034 - DNA, 20 bp, Artificial sequence
  synthetic
aaaatgcaattgttagcaca

SEQ ID NO: 22035 - DNA, 20 bp, Artificial sequence
  synthetic
agagacataaggggaaaaca

SEQ ID NO: 22036 - DNA, 20 bp, Artificial sequence
  synthetic
aggcacccccacattggaca

SEQ ID NO: 22037 - DNA, 20 bp, Artificial sequence
  synthetic
tgtatcaggagaaagggaaa

SEQ ID NO: 22038 - DNA, 20 bp, Artificial sequence
  synthetic
gaattatggaaattgcccac

SEQ ID NO: 22039 - DNA, 20 bp, Artificial sequence
  synthetic
atagcagaaagcattaatgg

SEQ ID NO: 22040 - DNA, 20 bp, Artificial sequence
  synthetic
atacaagacaacaggagagg

SEQ ID NO: 22041 - DNA, 20 bp, Artificial sequence
  synthetic
tctctggcaaatggagaatg

SEQ ID NO: 22042 - DNA, 20 bp, Artificial sequence
  synthetic
caacctaaggtgtcagaaaa

SEQ ID NO: 22043 - DNA, 20 bp, Artificial sequence
  synthetic
attagggcaagaaacattcc

SEQ ID NO: 22044 - DNA, 20 bp, Artificial sequence
  synthetic
gaaaaaaagagaactcagcc

SEQ ID NO: 22045 - DNA, 20 bp, Artificial sequence
  synthetic
gcaggatgtgttagaggcaa

SEQ ID NO: 22046 - DNA, 20 bp, Artificial sequence
  synthetic
agcaaaatatatcaattgga

SEQ ID NO: 22047 - DNA, 20 bp, Artificial sequence
  synthetic
agacgtctttgattggtcag

SEQ ID NO: 22048 - DNA, 20 bp, Artificial sequence
  synthetic
actgtagctctgagctgtat

SEQ ID NO: 22049 - DNA, 20 bp, Artificial sequence
  synthetic
cccgtaggacgctctaatac

SEQ ID NO: 22050 - DNA, 20 bp, Artificial sequence
  synthetic
acaaaatgggggctcaagta

SEQ ID NO: 22051 - DNA, 20 bp, Artificial sequence
  synthetic
cttctgatgatttccaatcg

SEQ ID NO: 22052 - DNA, 20 bp, Artificial sequence
  synthetic
tcttgtgccgatctgcttgt

SEQ ID NO: 22053 - DNA, 20 bp, Artificial sequence
  synthetic
tcagtattggaaatgcttat

SEQ ID NO: 22054 - DNA, 20 bp, Artificial sequence
  synthetic
tacgcgacctgctgtggtta

SEQ ID NO: 22055 - DNA, 20 bp, Artificial sequence
  synthetic
ccctagtaaaaattgtgtca

SEQ ID NO: 22056 - DNA, 20 bp, Artificial sequence
  synthetic
ccattgagcaaagtgcacct

SEQ ID NO: 22057 - DNA, 20 bp, Artificial sequence
  synthetic
ttgaacctgtatgcttgctc

SEQ ID NO: 22058 - DNA, 20 bp, Artificial sequence
  synthetic
tatgccagaacccagatggt

SEQ ID NO: 22059 - DNA, 20 bp, Artificial sequence
  synthetic
gggcactggctaggaggttt

SEQ ID NO: 22060 - DNA, 20 bp, Artificial sequence
  synthetic
atagaaggacacaagtcaga

SEQ ID NO: 22061 - DNA, 20 bp, Artificial sequence
  synthetic
cagatctactcaaatcagta

SEQ ID NO: 22062 - DNA, 20 bp, Artificial sequence
  synthetic
caggtcagtgtggcggagtg

SEQ ID NO: 22063 - DNA, 20 bp, Artificial sequence
  synthetic
cgcctagcaaaactaaattg

SEQ ID NO: 22064 - DNA, 20 bp, Artificial sequence
  synthetic
tcacctgggctaatgtcaca

SEQ ID NO: 22065 - DNA, 20 bp, Artificial sequence
  synthetic
gtgaattgtgtgaagacaca

SEQ ID NO: 22066 - DNA, 20 bp, Artificial sequence
  synthetic
cggacacacaagggtcaaat

SEQ ID NO: 22067 - DNA, 20 bp, Artificial sequence
  synthetic
atctcaagtgcaggctgaga

SEQ ID NO: 22068 - DNA, 20 bp, Artificial sequence
  synthetic
ttgatggccccgaaacagca

SEQ ID NO: 22069 - DNA, 20 bp, Artificial sequence
  synthetic
ccgtccatgccgatatgggt

SEQ ID NO: 22070 - DNA, 20 bp, Artificial sequence
  synthetic
cttatcttgccctactagca

SEQ ID NO: 22071 - DNA, 20 bp, Artificial sequence
  synthetic
cagattggataccattagca

SEQ ID NO: 22072 - DNA, 20 bp, Artificial sequence
  synthetic
caggaccattagtggctgga

SEQ ID NO: 22073 - DNA, 20 bp, Artificial sequence
  synthetic
aaaatgaagaggaagaacaa

SEQ ID NO: 22074 - DNA, 20 bp, Artificial sequence
  synthetic
agaaagacctaatatcatat

SEQ ID NO: 22075 - DNA, 20 bp, Artificial sequence
  synthetic
ctcctggaacgtcaggatct

SEQ ID NO: 22076 - DNA, 20 bp, Artificial sequence
  synthetic
gggttatagaccccagacgc

SEQ ID NO: 22077 - DNA, 20 bp, Artificial sequence
  synthetic
tgagaagaggagacctacca

SEQ ID NO: 22078 - DNA, 20 bp, Artificial sequence
  synthetic
cctcagtgaatgtgtcccta

SEQ ID NO: 22079 - DNA, 20 bp, Artificial sequence
  synthetic
aaggcctaacaaaaggagga

SEQ ID NO: 22080 - DNA, 20 bp, Artificial sequence
  synthetic
ccaggatgtgcaccagagaa

SEQ ID NO: 22081 - DNA, 20 bp, Artificial sequence
  synthetic
tggaaggagaagggctgcac

SEQ ID NO: 22082 - DNA, 20 bp, Artificial sequence
  synthetic
ccgaggccattttcaaacta

SEQ ID NO: 22083 - DNA, 20 bp, Artificial sequence
  synthetic
taaatgacatgggaaagatt

SEQ ID NO: 22084 - DNA, 20 bp, Artificial sequence
  synthetic
aggtcggattaagccatagt

SEQ ID NO: 22085 - DNA, 20 bp, Artificial sequence
  synthetic
gcatggcgtagtggactagc

SEQ ID NO: 22086 - DNA, 20 bp, Artificial sequence
  synthetic
cagggaccaatgaaattggt

SEQ ID NO: 22087 - DNA, 20 bp, Artificial sequence
  synthetic
aaaaagacatcgctctgtct

SEQ ID NO: 22088 - DNA, 20 bp, Artificial sequence
  synthetic
atgggactggacacacgcac

SEQ ID NO: 22089 - DNA, 20 bp, Artificial sequence
  synthetic
atgctggtcaccccatccat

SEQ ID NO: 22090 - DNA, 20 bp, Artificial sequence
  synthetic
ggcaaaggaagcttggtaac

SEQ ID NO: 22091 - DNA, 20 bp, Artificial sequence
  synthetic
atgttcgaggccactgaaag

SEQ ID NO: 22092 - DNA, 20 bp, Artificial sequence
  synthetic
ccaaacacaccggagtgtcc

SEQ ID NO: 22093 - DNA, 20 bp, Artificial sequence
  synthetic
gccgacatgggctactggat

SEQ ID NO: 22094 - DNA, 20 bp, Artificial sequence
  synthetic
tgttgccgctcgtgcacact

SEQ ID NO: 22095 - DNA, 20 bp, Artificial sequence
  synthetic
ttagtggccgggggcttgct

SEQ ID NO: 22096 - DNA, 20 bp, Artificial sequence
  synthetic
ctgatttcatatggaggagg

SEQ ID NO: 22097 - DNA, 20 bp, Artificial sequence
  synthetic
atggatcttcatcctgggtc

SEQ ID NO: 22098 - DNA, 20 bp, Artificial sequence
  synthetic
tctgaacacacaggaagaga

SEQ ID NO: 22099 - DNA, 20 bp, Artificial sequence
  synthetic
ggagaggcagccgcaatctt

SEQ ID NO: 22100 - DNA, 20 bp, Artificial sequence
  synthetic
attaaagccggaaatgacat

SEQ ID NO: 22101 - DNA, 20 bp, Artificial sequence
  synthetic
aggggtgaccttccagtttg

SEQ ID NO: 22102 - DNA, 20 bp, Artificial sequence
  synthetic
gatgcccgcacttattcaga

SEQ ID NO: 22103 - DNA, 20 bp, Artificial sequence
  synthetic
ggcggtagggcttacaggca

SEQ ID NO: 22104 - DNA, 20 bp, Artificial sequence
  synthetic
tgcgcagtccaactcttgct

SEQ ID NO: 22105 - DNA, 20 bp, Artificial sequence
  synthetic
cttgctttttctattatgaa

SEQ ID NO: 22106 - DNA, 20 bp, Artificial sequence
  synthetic
ttgaaaagaggagagacaac

SEQ ID NO: 22107 - DNA, 20 bp, Artificial sequence
  synthetic
tacacaaaaggcggtccagg

SEQ ID NO: 22108 - DNA, 20 bp, Artificial sequence
  synthetic
tggatatctaatggcacagg

SEQ ID NO: 22109 - DNA, 20 bp, Artificial sequence
  synthetic
atattcaagctcacatacca

SEQ ID NO: 22110 - DNA, 20 bp, Artificial sequence
  synthetic
gctcaccatcagtggatgac

SEQ ID NO: 22111 - DNA, 20 bp, Artificial sequence
  synthetic
gcaacctgggcccagaacat

SEQ ID NO: 22112 - DNA, 20 bp, Artificial sequence
  synthetic
taagccacagtacggaagaa

SEQ ID NO: 22113 - DNA, 20 bp, Artificial sequence
  synthetic
gttagaggagaccccccgca

SEQ ID NO: 22114 - DNA, 20 bp, Artificial sequence
  synthetic
atgctggtaactccatccat

SEQ ID NO: 22115 - DNA, 20 bp, Artificial sequence
  synthetic
caagctcccacgtcggaaat

SEQ ID NO: 22116 - DNA, 20 bp, Artificial sequence
  synthetic
gaatggtgctgtagatcttg

SEQ ID NO: 22117 - DNA, 20 bp, Artificial sequence
  synthetic
ggcccactaatagctggagg

SEQ ID NO: 22118 - DNA, 20 bp, Artificial sequence
  synthetic
cccggcacatctggatctcc

SEQ ID NO: 22119 - DNA, 20 bp, Artificial sequence
  synthetic
acaataatggacctacatcc

SEQ ID NO: 22120 - DNA, 20 bp, Artificial sequence
  synthetic
agggtaatagacccgaggcg

SEQ ID NO: 22121 - DNA, 20 bp, Artificial sequence
  synthetic
aatgagatgggattactgga

SEQ ID NO: 22122 - DNA, 20 bp, Artificial sequence
  synthetic
gatgtcattcccatggtcac

SEQ ID NO: 22123 - DNA, 20 bp, Artificial sequence
  synthetic
atccatgcccaccatcaatg

SEQ ID NO: 22124 - DNA, 20 bp, Artificial sequence
  synthetic
cggccaaaagccacgtgtat

SEQ ID NO: 22125 - DNA, 20 bp, Artificial sequence
  synthetic
caccttcaaggttaatgatt

SEQ ID NO: 22126 - DNA, 20 bp, Artificial sequence
  synthetic
ccacgctggaggtttgctgg

SEQ ID NO: 22127 - DNA, 20 bp, Artificial sequence
  synthetic
cgaatacaaggacttcctgg

SEQ ID NO: 22128 - DNA, 20 bp, Artificial sequence
  synthetic
gtctagaaactttgctcagt

SEQ ID NO: 22129 - DNA, 20 bp, Artificial sequence
  synthetic
agggaaggatttctcactca

SEQ ID NO: 22130 - DNA, 20 bp, Artificial sequence
  synthetic
agaggagaacgttttcggtt

SEQ ID NO: 22131 - DNA, 20 bp, Artificial sequence
  synthetic
cagatgtgtgcagctgattg

SEQ ID NO: 22132 - DNA, 20 bp, Artificial sequence
  synthetic
ccccgaacatgcgaagcgca

SEQ ID NO: 22133 - DNA, 20 bp, Artificial sequence
  synthetic
agctgggctccagttcagag

SEQ ID NO: 22134 - DNA, 20 bp, Artificial sequence
  synthetic
taaagcaagacagcaagcga

SEQ ID NO: 22135 - DNA, 20 bp, Artificial sequence
  synthetic
ctaccccactggggtgagca

SEQ ID NO: 22136 - DNA, 20 bp, Artificial sequence
  synthetic
atctttcatccgcctctctt

SEQ ID NO: 22137 - DNA, 20 bp, Artificial sequence
  synthetic
cacctccccggggcttccat

SEQ ID NO: 22138 - DNA, 20 bp, Artificial sequence
  synthetic
aggagtctctttgttgagga

SEQ ID NO: 22139 - DNA, 20 bp, Artificial sequence
  synthetic
atctagcaagacaatgtaga

SEQ ID NO: 22140 - DNA, 20 bp, Artificial sequence
  synthetic
aaaaagagcagatccaaata

SEQ ID NO: 22141 - DNA, 20 bp, Artificial sequence
  synthetic
ttatcaagtatatcagaagg

SEQ ID NO: 22142 - DNA, 20 bp, Artificial sequence
  synthetic
agaagcctgggaatcaaatt

SEQ ID NO: 22143 - DNA, 20 bp, Artificial sequence
  synthetic
agcaaaagcagcctattgga

SEQ ID NO: 22144 - DNA, 20 bp, Artificial sequence
  synthetic
attacaaacagataatggac

SEQ ID NO: 22145 - DNA, 20 bp, Artificial sequence
  synthetic
gaagaatcagaaataatttt

SEQ ID NO: 22146 - DNA, 20 bp, Artificial sequence
  synthetic
acaaaaaacctaacctttgc

SEQ ID NO: 22147 - DNA, 20 bp, Artificial sequence
  synthetic
tggaaagcttgctaatgacg

SEQ ID NO: 22148 - DNA, 20 bp, Artificial sequence
  synthetic
ctgaaaaacaaggctctgac

SEQ ID NO: 22149 - DNA, 20 bp, Artificial sequence
  synthetic
cttccgcgttcttgtctcgt

SEQ ID NO: 22150 - DNA, 20 bp, Artificial sequence
  synthetic
gcattgtcttcccggggaag

SEQ ID NO: 22151 - DNA, 20 bp, Artificial sequence
  synthetic
ctcttgggcagctatcctac

SEQ ID NO: 22152 - DNA, 20 bp, Artificial sequence
  synthetic
acacactaacagcccccttg

SEQ ID NO: 22153 - DNA, 20 bp, Artificial sequence
  synthetic
gacatctcgatactcccact

SEQ ID NO: 22154 - DNA, 20 bp, Artificial sequence
  synthetic
accctgatcctaggcgccag

SEQ ID NO: 22155 - DNA, 20 bp, Artificial sequence
  synthetic
cttctatacctcccagacga

SEQ ID NO: 22156 - DNA, 20 bp, Artificial sequence
  synthetic
ttgaaccatactcaggacca

SEQ ID NO: 22157 - DNA, 20 bp, Artificial sequence
  synthetic
agaccatagatcttactgac

SEQ ID NO: 22158 - DNA, 20 bp, Artificial sequence
  synthetic
ccctatattctgcccttcac

SEQ ID NO: 22159 - DNA, 20 bp, Artificial sequence
  synthetic
catctgtcatctttcaaccc

SEQ ID NO: 22160 - DNA, 20 bp, Artificial sequence
  synthetic
caaagcaagccctttgcgac

SEQ ID NO: 22161 - DNA, 20 bp, Artificial sequence
  synthetic
gcagccacaccaacctcccc

SEQ ID NO: 22162 - DNA, 20 bp, Artificial sequence
  synthetic
tccaccacagtcctccacta

SEQ ID NO: 22163 - DNA, 20 bp, Artificial sequence
  synthetic
ggtggatcccgtggcgattc

SEQ ID NO: 22164 - DNA, 20 bp, Artificial sequence
  synthetic
gtgtcccttcgactacactt

SEQ ID NO: 22165 - DNA, 20 bp, Artificial sequence
  synthetic
cccgctcctccatcccaacc

SEQ ID NO: 22166 - DNA, 20 bp, Artificial sequence
  synthetic
tccgccctagcggccggaac

SEQ ID NO: 22167 - DNA, 20 bp, Artificial sequence
  synthetic
cgaggattagacctcctatt

SEQ ID NO: 22168 - DNA, 20 bp, Artificial sequence
  synthetic
gaaatccacataaccctgaa

SEQ ID NO: 22169 - DNA, 20 bp, Artificial sequence
  synthetic
ccacctgtccagagcaccaa

SEQ ID NO: 22170 - DNA, 20 bp, Artificial sequence
  synthetic
tctttcaatcaatgcgaaag

SEQ ID NO: 22171 - DNA, 20 bp, Artificial sequence
  synthetic
aaaaattcgaaaccaaagcc

SEQ ID NO: 22172 - DNA, 20 bp, Artificial sequence
  synthetic
ttcccctagcgctgaaaaac

SEQ ID NO: 22173 - DNA, 20 bp, Artificial sequence
  synthetic
gcggcctcggttgagacgcc

SEQ ID NO: 22174 - DNA, 20 bp, Artificial sequence
  synthetic
gtacccactgccaaaagcct

SEQ ID NO: 22175 - DNA, 20 bp, Artificial sequence
  synthetic
cagcttatgctgggacgccc

SEQ ID NO: 22176 - DNA, 20 bp, Artificial sequence
  synthetic
gttaaatacacattcacgca

SEQ ID NO: 22177 - DNA, 20 bp, Artificial sequence
  synthetic
agattctcttcgatgtatac

SEQ ID NO: 22178 - DNA, 20 bp, Artificial sequence
  synthetic
tacacatggcaaagtgcttc

SEQ ID NO: 22179 - DNA, 20 bp, Artificial sequence
  synthetic
atggcattcagaatagtaaa

SEQ ID NO: 22180 - DNA, 20 bp, Artificial sequence
  synthetic
ttcaccagtaattttgttct

SEQ ID NO: 22181 - DNA, 20 bp, Artificial sequence
  synthetic
gattgccatcaaccatctaa

SEQ ID NO: 22182 - DNA, 20 bp, Artificial sequence
  synthetic
ctatccctgttaaggaaaaa

SEQ ID NO: 22183 - DNA, 20 bp, Artificial sequence
  synthetic
attaatttgagtagcacccc

SEQ ID NO: 22184 - DNA, 20 bp, Artificial sequence
  synthetic
ttattctctaagtacaaggg

SEQ ID NO: 22185 - DNA, 20 bp, Artificial sequence
  synthetic
tttgattactctaattttga

SEQ ID NO: 22186 - DNA, 20 bp, Artificial sequence
  synthetic
tcttttgtctttctcagttt

SEQ ID NO: 22187 - DNA, 20 bp, Artificial sequence
  synthetic
tggtttcctagggaaggcac

SEQ ID NO: 22188 - DNA, 20 bp, Artificial sequence
  synthetic
aatttgttaaaacaggaaga

SEQ ID NO: 22189 - DNA, 20 bp, Artificial sequence
  synthetic
ctaaaagagttaaagattgc

SEQ ID NO: 22190 - DNA, 20 bp, Artificial sequence
  synthetic
actaagacagaggacctttc

SEQ ID NO: 22191 - DNA, 20 bp, Artificial sequence
  synthetic
agaccttatcgaaaaaaggg

SEQ ID NO: 22192 - DNA, 20 bp, Artificial sequence
  synthetic
tcgggttgctttgtttgtgg

SEQ ID NO: 22193 - DNA, 20 bp, Artificial sequence
  synthetic
attatttgacatccttaaag

SEQ ID NO: 22194 - DNA, 20 bp, Artificial sequence
  synthetic
tcaatatggtgtcaaccctc

SEQ ID NO: 22195 - DNA, 20 bp, Artificial sequence
  synthetic
tgagtgagcccacgagtgag

SEQ ID NO: 22196 - DNA, 20 bp, Artificial sequence
  synthetic
cgcagcatccccattgtata

SEQ ID NO: 22197 - DNA, 20 bp, Artificial sequence
  synthetic
ctttatgtcgagcccgggtt

SEQ ID NO: 22198 - DNA, 20 bp, Artificial sequence
  synthetic
gagctgcgggggacgacccg

SEQ ID NO: 22199 - DNA, 20 bp, Artificial sequence
  synthetic
agtaccaattcctggagatt

SEQ ID NO: 22200 - DNA, 20 bp, Artificial sequence
  synthetic
ctcagatattgaagtgcaag

SEQ ID NO: 22201 - DNA, 20 bp, Artificial sequence
  synthetic
aggatcataccctctgctct

SEQ ID NO: 22202 - DNA, 20 bp, Artificial sequence
  synthetic
accatccactcccacgactg

SEQ ID NO: 22203 - DNA, 20 bp, Artificial sequence
  synthetic
gcaaggaagaggaggcaggc

SEQ ID NO: 22204 - DNA, 20 bp, Artificial sequence
  synthetic
ccgagacacccattaaaaag

SEQ ID NO: 22205 - DNA, 20 bp, Artificial sequence
  synthetic
ccggccctgcatcacgcagt

SEQ ID NO: 22206 - DNA, 20 bp, Artificial sequence
  synthetic
acccgaggaactcctcaaag

SEQ ID NO: 22207 - DNA, 20 bp, Artificial sequence
  synthetic
taatctaataccgctggaca

SEQ ID NO: 22208 - DNA, 20 bp, Artificial sequence
  synthetic
acagccagcatcgcgaggaa

SEQ ID NO: 22209 - DNA, 20 bp, Artificial sequence
  synthetic
cagcacccaagagcgatccc

SEQ ID NO: 22210 - DNA, 20 bp, Artificial sequence
  synthetic
tcaagactcatccagtgtcc

SEQ ID NO: 22211 - DNA, 20 bp, Artificial sequence
  synthetic
gacacaagagatttgcggga

SEQ ID NO: 22212 - DNA, 20 bp, Artificial sequence
  synthetic
cagggcaggagatgatattg

SEQ ID NO: 22213 - DNA, 20 bp, Artificial sequence
  synthetic
tagcctatccgacgctgtcc

SEQ ID NO: 22214 - DNA, 20 bp, Artificial sequence
  synthetic
ccagagagaatcaaattgga

SEQ ID NO: 22215 - DNA, 20 bp, Artificial sequence
  synthetic
ccattgatcacacacggttc

SEQ ID NO: 22216 - DNA, 20 bp, Artificial sequence
  synthetic
ttttcttacttttatccttt

SEQ ID NO: 22217 - DNA, 20 bp, Artificial sequence
  synthetic
acagtcactcgggaagatgg

SEQ ID NO: 22218 - DNA, 20 bp, Artificial sequence
  synthetic
ataccctgaagttcacctag

SEQ ID NO: 22219 - DNA, 20 bp, Artificial sequence
  synthetic
tacttgccataggaggagac

SEQ ID NO: 22220 - DNA, 20 bp, Artificial sequence
  synthetic
gaccgctatgaccattgatg

SEQ ID NO: 22221 - DNA, 20 bp, Artificial sequence
  synthetic
tgctgcagacacaatccgga

SEQ ID NO: 22222 - DNA, 20 bp, Artificial sequence
  synthetic
tgtaagtgaccctcattgcc

SEQ ID NO: 22223 - DNA, 20 bp, Artificial sequence
  synthetic
aaggattgcttcgttagtgc

SEQ ID NO: 22224 - DNA, 20 bp, Artificial sequence
  synthetic
gagaggttatgaccgttatc

SEQ ID NO: 22225 - DNA, 20 bp, Artificial sequence
  synthetic
ggggatgaattatctgaata

SEQ ID NO: 22226 - DNA, 20 bp, Artificial sequence
  synthetic
cgacccttactcagcaaatc

SEQ ID NO: 22227 - DNA, 20 bp, Artificial sequence
  synthetic
tatagtacctagggcagctc

SEQ ID NO: 22228 - DNA, 20 bp, Artificial sequence
  synthetic
agcagggatggtgctattga

SEQ ID NO: 22229 - DNA, 20 bp, Artificial sequence
  synthetic
aagagccccaagtagatcct

SEQ ID NO: 22230 - DNA, 20 bp, Artificial sequence
  synthetic
agcgcataggttgagggatc

SEQ ID NO: 22231 - DNA, 20 bp, Artificial sequence
  synthetic
agaaacattgtttcgactcg

SEQ ID NO: 22232 - DNA, 20 bp, Artificial sequence
  synthetic
tgacgccctcgctgaggtaa

SEQ ID NO: 22233 - DNA, 20 bp, Artificial sequence
  synthetic
gcggacttcacctggactta

SEQ ID NO: 22234 - DNA, 20 bp, Artificial sequence
  synthetic
gatcactcgcaaattttggg

SEQ ID NO: 22235 - DNA, 20 bp, Artificial sequence
  synthetic
ctctgcagaatggccaacct

SEQ ID NO: 22236 - DNA, 20 bp, Artificial sequence
  synthetic
caagccctttgtacacccta

SEQ ID NO: 22237 - DNA, 20 bp, Artificial sequence
  synthetic
ggcattccccctccgcacag

SEQ ID NO: 22238 - DNA, 20 bp, Artificial sequence
  synthetic
cctcatcaccacactccact

SEQ ID NO: 22239 - DNA, 20 bp, Artificial sequence
  synthetic
cactgtggccgtgaagacct

SEQ ID NO: 22240 - DNA, 20 bp, Artificial sequence
  synthetic
ggactacctgagggagtgta

SEQ ID NO: 22241 - DNA, 20 bp, Artificial sequence
  synthetic
ggaatccagtatctcagatg

SEQ ID NO: 22242 - DNA, 20 bp, Artificial sequence
  synthetic
ggtcactgcctctccttcct

SEQ ID NO: 22243 - DNA, 20 bp, Artificial sequence
  synthetic
gtccccagggagagacaagg

SEQ ID NO: 22244 - DNA, 20 bp, Artificial sequence
  synthetic
tgaccccaccaaggccggcc

SEQ ID NO: 22245 - DNA, 20 bp, Artificial sequence
  synthetic
cgccttcatccccctcatat

SEQ ID NO: 22246 - DNA, 20 bp, Artificial sequence
  synthetic
ggctggcaagaacctgtaca

SEQ ID NO: 22247 - DNA, 20 bp, Artificial sequence
  synthetic
gagggagacctggatggagc

SEQ ID NO: 22248 - DNA, 20 bp, Artificial sequence
  synthetic
ccccggtgcctcagacccag

SEQ ID NO: 22249 - DNA, 20 bp, Artificial sequence
  synthetic
ttcattggaaggaagctgtc

SEQ ID NO: 22250 - DNA, 20 bp, Artificial sequence
  synthetic
cactggctggctaggcacat

SEQ ID NO: 22251 - DNA, 20 bp, Artificial sequence
  synthetic
agagtacgagccatagataa

SEQ ID NO: 22252 - DNA, 20 bp, Artificial sequence
  synthetic
cagctgaatatgggccaaac

SEQ ID NO: 22253 - DNA, 20 bp, Artificial sequence
  synthetic
cagtttctagagaaccatca

SEQ ID NO: 22254 - DNA, 20 bp, Artificial sequence
  synthetic
gcacgattctgggtgaaaga

SEQ ID NO: 22255 - DNA, 20 bp, Artificial sequence
  synthetic
tgccccggctcagggccaag

SEQ ID NO: 22256 - DNA, 20 bp, Artificial sequence
  synthetic
aacgccattttgcaaggcat

SEQ ID NO: 22257 - DNA, 20 bp, Artificial sequence
  synthetic
cccaccgtcgggaggtaagc

SEQ ID NO: 22258 - DNA, 20 bp, Artificial sequence
  synthetic
tttcggtttttcgccgaaac

SEQ ID NO: 22259 - DNA, 20 bp, Artificial sequence
  synthetic
agtccgtagatgtcaagaag

SEQ ID NO: 22260 - DNA, 20 bp, Artificial sequence
  synthetic
tcacctgggaggctattgcc

SEQ ID NO: 22261 - DNA, 20 bp, Artificial sequence
  synthetic
cgataatggcggacctctca

SEQ ID NO: 22262 - DNA, 20 bp, Artificial sequence
  synthetic
agcccacctgggatgattgc

SEQ ID NO: 22263 - DNA, 20 bp, Artificial sequence
  synthetic
aagaaagagagagaaggaga

SEQ ID NO: 22264 - DNA, 20 bp, Artificial sequence
  synthetic
cccaaaatcctggaccccta

SEQ ID NO: 22265 - DNA, 20 bp, Artificial sequence
  synthetic
cttctaaaagagggtcaggg

SEQ ID NO: 22266 - DNA, 20 bp, Artificial sequence
  synthetic
acggggactctgtttaaatg

SEQ ID NO: 22267 - DNA, 20 bp, Artificial sequence
  synthetic
tctgtatggggcacccccgc

SEQ ID NO: 22268 - DNA, 20 bp, Artificial sequence
  synthetic
ccccctccgtgtcggtgacg

SEQ ID NO: 22269 - DNA, 20 bp, Artificial sequence
  synthetic
aatatagggccccgcatccc

SEQ ID NO: 22270 - DNA, 20 bp, Artificial sequence
  synthetic
ttactaaatctagtacaggg

SEQ ID NO: 22271 - DNA, 20 bp, Artificial sequence
  synthetic
gaccatacaggcctagtaag

SEQ ID NO: 22272 - DNA, 20 bp, Artificial sequence
  synthetic
gccaagaacagatggtcccc

SEQ ID NO: 22273 - DNA, 20 bp, Artificial sequence
  synthetic
atctggcggacccgtggtgg

SEQ ID NO: 22274 - DNA, 20 bp, Artificial sequence
  synthetic
agacgagaacctaaaacagt

SEQ ID NO: 22275 - DNA, 20 bp, Artificial sequence
  synthetic
gaccttaggtcactggaaag

SEQ ID NO: 22276 - DNA, 20 bp, Artificial sequence
  synthetic
agggcccaatgagtctccct

SEQ ID NO: 22277 - DNA, 20 bp, Artificial sequence
  synthetic
cctgaccctagatgactagg

SEQ ID NO: 22278 - DNA, 20 bp, Artificial sequence
  synthetic
gatcatacctctgaaagcaa

SEQ ID NO: 22279 - DNA, 20 bp, Artificial sequence
  synthetic
cgtggatgacttactgctgg

SEQ ID NO: 22280 - DNA, 20 bp, Artificial sequence
  synthetic
gactgaggccagaaaagaga

SEQ ID NO: 22281 - DNA, 20 bp, Artificial sequence
  synthetic
gccgctcccagacgccgacc

SEQ ID NO: 22282 - DNA, 20 bp, Artificial sequence
  synthetic
agtgactgatataaaggacc

SEQ ID NO: 22283 - DNA, 20 bp, Artificial sequence
  synthetic
cttagccctgtaccgagccc

SEQ ID NO: 22284 - DNA, 20 bp, Artificial sequence
  synthetic
agtctggagacctctggcgg

SEQ ID NO: 22285 - DNA, 20 bp, Artificial sequence
  synthetic
cgcgtcccaatagggccaaa

SEQ ID NO: 22286 - DNA, 20 bp, Artificial sequence
  synthetic
caagccctcaacctcaccag

SEQ ID NO: 22287 - DNA, 20 bp, Artificial sequence
  synthetic
accattatgggacccctcat

SEQ ID NO: 22288 - DNA, 20 bp, Artificial sequence
  synthetic
ccagggtgccccaaggacct

SEQ ID NO: 22289 - DNA, 20 bp, Artificial sequence
  synthetic
ccaataaaccctcttgcagt

SEQ ID NO: 22290 - DNA, 20 bp, Artificial sequence
  synthetic
cgggggtctttcatttgggg

SEQ ID NO: 22291 - DNA, 20 bp, Artificial sequence
  synthetic
gtctcgctgttccttgggag

SEQ ID NO: 22292 - DNA, 20 bp, Artificial sequence
  synthetic
tgtttgatgttatgcgcctg

SEQ ID NO: 22293 - DNA, 20 bp, Artificial sequence
  synthetic
cgaccccgtcaggatatgtg

SEQ ID NO: 22294 - DNA, 20 bp, Artificial sequence
  synthetic
atcacccaggttaagatcaa

SEQ ID NO: 22295 - DNA, 20 bp, Artificial sequence
  synthetic
gaacctcctctttcgacccc

SEQ ID NO: 22296 - DNA, 20 bp, Artificial sequence
  synthetic
ggagatagtggagaagcgac

SEQ ID NO: 22297 - DNA, 20 bp, Artificial sequence
  synthetic
gcggtgcggggcgatgatgg

SEQ ID NO: 22298 - DNA, 20 bp, Artificial sequence
  synthetic
gatcgtaggagacatagaga

SEQ ID NO: 22299 - DNA, 20 bp, Artificial sequence
  synthetic
cggggaccaagaccccagac

SEQ ID NO: 22300 - DNA, 20 bp, Artificial sequence
  synthetic
gcctacggatggtagcagcc

SEQ ID NO: 22301 - DNA, 20 bp, Artificial sequence
  synthetic
gggaccgggtccagttcaga

SEQ ID NO: 22302 - DNA, 20 bp, Artificial sequence
  synthetic
gaagcagtcttttacaagag

SEQ ID NO: 22303 - DNA, 20 bp, Artificial sequence
  synthetic
gcccgcaacacgccgggccc

SEQ ID NO: 22304 - DNA, 20 bp, Artificial sequence
  synthetic
tgagctgtcgccatcggtag

SEQ ID NO: 22305 - DNA, 20 bp, Artificial sequence
  synthetic
cacgcccgaagactccaaca

SEQ ID NO: 22306 - DNA, 20 bp, Artificial sequence
  synthetic
ggagatcctaaaaggagaga

SEQ ID NO: 22307 - DNA, 20 bp, Artificial sequence
  synthetic
ctccctgactggaaaggcac

SEQ ID NO: 22308 - DNA, 20 bp, Artificial sequence
  synthetic
ggacctgaaaatgaccctgt

SEQ ID NO: 22309 - DNA, 20 bp, Artificial sequence
  synthetic
aaagttcagatcaaggtcag

SEQ ID NO: 22310 - DNA, 20 bp, Artificial sequence
  synthetic
ttatttgaactaaccaatca

SEQ ID NO: 22311 - DNA, 20 bp, Artificial sequence
  synthetic
ctctcctgcctgactgtgga

SEQ ID NO: 22312 - DNA, 20 bp, Artificial sequence
  synthetic
gtcatggaaggagttatggg

SEQ ID NO: 22313 - DNA, 20 bp, Artificial sequence
  synthetic
ttaaaatgcagctgttagca

SEQ ID NO: 22314 - DNA, 20 bp, Artificial sequence
  synthetic
agaaatattaagggattgga

SEQ ID NO: 22315 - DNA, 20 bp, Artificial sequence
  synthetic
agggtatccagcaaagtggc

SEQ ID NO: 22316 - DNA, 20 bp, Artificial sequence
  synthetic
aaagttaatggaaggggata

SEQ ID NO: 22317 - DNA, 20 bp, Artificial sequence
  synthetic
cgttaaatttagaaaacacg

SEQ ID NO: 22318 - DNA, 20 bp, Artificial sequence
  synthetic
ggtagtagtatataacagca

SEQ ID NO: 22319 - DNA, 20 bp, Artificial sequence
  synthetic
tattcccctagcagaggaag

SEQ ID NO: 22320 - DNA, 20 bp, Artificial sequence
  synthetic
gtggctgggaccaacacagg

SEQ ID NO: 22321 - DNA, 20 bp, Artificial sequence
  synthetic
gtaacaggtaaggaaaaatc

SEQ ID NO: 22322 - DNA, 20 bp, Artificial sequence
  synthetic
ggcgttgctaatgccgtgca

SEQ ID NO: 22323 - DNA, 20 bp, Artificial sequence
  synthetic
ggctgcaccaatggggtagc

SEQ ID NO: 22324 - DNA, 20 bp, Artificial sequence
  synthetic
tggacaacccattattaagc

SEQ ID NO: 22325 - DNA, 20 bp, Artificial sequence
  synthetic
agtgcaggactggacctctg

SEQ ID NO: 22326 - DNA, 20 bp, Artificial sequence
  synthetic
aacccccaacaaagtgctca

SEQ ID NO: 22327 - DNA, 20 bp, Artificial sequence
  synthetic
aagagccgttaataaggtaa

SEQ ID NO: 22328 - DNA, 20 bp, Artificial sequence
  synthetic
caacttccaaagtcctatgc

SEQ ID NO: 22329 - DNA, 20 bp, Artificial sequence
  synthetic
cttactcacctacccctcgc

SEQ ID NO: 22330 - DNA, 20 bp, Artificial sequence
  synthetic
aaaatccccctacctgtcag

SEQ ID NO: 22331 - DNA, 20 bp, Artificial sequence
  synthetic
ggggcgaggctcagcctgca

SEQ ID NO: 22332 - DNA, 20 bp, Artificial sequence
  synthetic
cagcaagcccctattcacgt

SEQ ID NO: 22333 - DNA, 20 bp, Artificial sequence
  synthetic
attctgtcagccacccacca

SEQ ID NO: 22334 - DNA, 20 bp, Artificial sequence
  synthetic
ctgcctgcaaactggacagg

SEQ ID NO: 22335 - DNA, 20 bp, Artificial sequence
  synthetic
gctaccggtacagcaggact

SEQ ID NO: 22336 - DNA, 20 bp, Artificial sequence
  synthetic
cccttccttggacccttatt

SEQ ID NO: 22337 - DNA, 20 bp, Artificial sequence
  synthetic
ccaaaaaggtacctgtaagc

SEQ ID NO: 22338 - DNA, 20 bp, Artificial sequence
  synthetic
ttaaataaagcatacaagtc

SEQ ID NO: 22339 - DNA, 20 bp, Artificial sequence
  synthetic
tctgttctagggggctatct

SEQ ID NO: 22340 - DNA, 20 bp, Artificial sequence
  synthetic
actaccggccgagagctcaa

SEQ ID NO: 22341 - DNA, 20 bp, Artificial sequence
  synthetic
ttctacctactgctccacta

SEQ ID NO: 22342 - DNA, 20 bp, Artificial sequence
  synthetic
cccttcaaaagggtgtttaa

SEQ ID NO: 22343 - DNA, 20 bp, Artificial sequence
  synthetic
tttcctgatgacatgctgga

SEQ ID NO: 22344 - DNA, 20 bp, Artificial sequence
  synthetic
caccttatacatgaacgccc

SEQ ID NO: 22345 - DNA, 20 bp, Artificial sequence
  synthetic
tgacagaaactacacactta

SEQ ID NO: 22346 - DNA, 20 bp, Artificial sequence
  synthetic
atcaatggatccatcagaaa

SEQ ID NO: 22347 - DNA, 20 bp, Artificial sequence
  synthetic
ctggagtctagtcagcttat

SEQ ID NO: 22348 - DNA, 20 bp, Artificial sequence
  synthetic
ccaaatagtcaacctcgcca

SEQ ID NO: 22349 - DNA, 20 bp, Artificial sequence
  synthetic
gtcctggattcacgcgttgt

SEQ ID NO: 22350 - DNA, 20 bp, Artificial sequence
  synthetic
ccgaacgataagaaggcagt

SEQ ID NO: 22351 - DNA, 20 bp, Artificial sequence
  synthetic
gggctcgtccacctctatgt

SEQ ID NO: 22352 - DNA, 20 bp, Artificial sequence
  synthetic
tattctcctgaggctagata

SEQ ID NO: 22353 - DNA, 20 bp, Artificial sequence
  synthetic
aggatgttcagaatgggtct

SEQ ID NO: 22354 - DNA, 20 bp, Artificial sequence
  synthetic
tattctagatgatctcaatg

SEQ ID NO: 22355 - DNA, 20 bp, Artificial sequence
  synthetic
acgcagatgcaggtcagtga

SEQ ID NO: 22356 - DNA, 20 bp, Artificial sequence
  synthetic
cccacgcccggctacacccg

SEQ ID NO: 22357 - DNA, 20 bp, Artificial sequence
  synthetic
cacttggacaccgtgcaacc

SEQ ID NO: 22358 - DNA, 20 bp, Artificial sequence
  synthetic
gcccgcgccgccggacccgt

SEQ ID NO: 22359 - DNA, 20 bp, Artificial sequence
  synthetic
ctcgctgccaggcgcgtcag

SEQ ID NO: 22360 - DNA, 20 bp, Artificial sequence
  synthetic
gtcaccaatgaccgcgccta

SEQ ID NO: 22361 - DNA, 20 bp, Artificial sequence
  synthetic
gcgcaggctgcgcgcgcctg

SEQ ID NO: 22362 - DNA, 20 bp, Artificial sequence
  synthetic
gcggtcggcggcggcccacg

SEQ ID NO: 22363 - DNA, 20 bp, Artificial sequence
  synthetic
gcatcagtccaacgccctcg

SEQ ID NO: 22364 - DNA, 20 bp, Artificial sequence
  synthetic
gaccttcacctcgccttctc

SEQ ID NO: 22365 - DNA, 20 bp, Artificial sequence
  synthetic
gagatgcccggaacggaacg

SEQ ID NO: 22366 - DNA, 20 bp, Artificial sequence
  synthetic
gagcccgaggtcgatgcgtg

SEQ ID NO: 22367 - DNA, 20 bp, Artificial sequence
  synthetic
tgccgccgtttcgacccaga

SEQ ID NO: 22368 - DNA, 20 bp, Artificial sequence
  synthetic
ggcgcggtcttttaccgcgt

SEQ ID NO: 22369 - DNA, 20 bp, Artificial sequence
  synthetic
gccccccaggccttccttgc

SEQ ID NO: 22370 - DNA, 20 bp, Artificial sequence
  synthetic
cgaccgccgcccgcgacccc

SEQ ID NO: 22371 - DNA, 20 bp, Artificial sequence
  synthetic
agccccatgggacgcgcgac

SEQ ID NO: 22372 - DNA, 20 bp, Artificial sequence
  synthetic
cctggcggcagctactacaa

SEQ ID NO: 22373 - DNA, 20 bp, Artificial sequence
  synthetic
cctgtcataggctctcaggc

SEQ ID NO: 22374 - DNA, 20 bp, Artificial sequence
  synthetic
cgcacgttagcgccaccccg

SEQ ID NO: 22375 - DNA, 20 bp, Artificial sequence
  synthetic
cccccgccctaccaagtcag

SEQ ID NO: 22376 - DNA, 20 bp, Artificial sequence
  synthetic
ctgggcgccatttgcgccct

SEQ ID NO: 22377 - DNA, 20 bp, Artificial sequence
  synthetic
gttgctgagcgtcggagagg

SEQ ID NO: 22378 - DNA, 20 bp, Artificial sequence
  synthetic
ctcagcactgtcagggagaa

SEQ ID NO: 22379 - DNA, 20 bp, Artificial sequence
  synthetic
caaatgctttaagtgcggca

SEQ ID NO: 22380 - DNA, 20 bp, Artificial sequence
  synthetic
tccagcaaagaagctcctcc

SEQ ID NO: 22381 - DNA, 20 bp, Artificial sequence
  synthetic
tctcaatatgtaatgaacat

SEQ ID NO: 22382 - DNA, 20 bp, Artificial sequence
  synthetic
caccccagaaagaggatggc

SEQ ID NO: 22383 - DNA, 20 bp, Artificial sequence
  synthetic
gtggtgcacattcaaggaag

SEQ ID NO: 22384 - DNA, 20 bp, Artificial sequence
  synthetic
ggagaggacctttttcccct

SEQ ID NO: 22385 - DNA, 20 bp, Artificial sequence
  synthetic
aacaaacgatgaggccttgt

SEQ ID NO: 22386 - DNA, 20 bp, Artificial sequence
  synthetic
aaacatattgggatacttta

SEQ ID NO: 22387 - DNA, 20 bp, Artificial sequence
  synthetic
gtagatcagaaaatagaaca

SEQ ID NO: 22388 - DNA, 20 bp, Artificial sequence
  synthetic
ctgtctctaaaaaggtatat

SEQ ID NO: 22389 - DNA, 20 bp, Artificial sequence
  synthetic
ggttctggtcatggttctca

SEQ ID NO: 22390 - DNA, 20 bp, Artificial sequence
  synthetic
ggccagacaacggaggaggg

SEQ ID NO: 22391 - DNA, 20 bp, Artificial sequence
  synthetic
aagcgctagtgtcagcactt

SEQ ID NO: 22392 - DNA, 20 bp, Artificial sequence
  synthetic
tgggtgttcgctggttagcc

SEQ ID NO: 22393 - DNA, 20 bp, Artificial sequence
  synthetic
tggcttcatatagctcaata

SEQ ID NO: 22394 - DNA, 20 bp, Artificial sequence
  synthetic
cactggccagggcaacatat

SEQ ID NO: 22395 - DNA, 20 bp, Artificial sequence
  synthetic
cttttggattaatcctaggc

SEQ ID NO: 22396 - DNA, 20 bp, Artificial sequence
  synthetic
tcgagacagacaataaggta

SEQ ID NO: 22397 - DNA, 20 bp, Artificial sequence
  synthetic
aggatttgaacttaatggtc

SEQ ID NO: 22398 - DNA, 20 bp, Artificial sequence
  synthetic
ctctgaccccaattcccata

SEQ ID NO: 22399 - DNA, 20 bp, Artificial sequence
  synthetic
gatggccgcatatactctta

SEQ ID NO: 22400 - DNA, 20 bp, Artificial sequence
  synthetic
tgtcgcacaaattaaacaca

SEQ ID NO: 22401 - DNA, 20 bp, Artificial sequence
  synthetic
aaagataaaaaagggggaat

SEQ ID NO: 22402 - DNA, 20 bp, Artificial sequence
  synthetic
attagataatacatggcatg

SEQ ID NO: 22403 - DNA, 20 bp, Artificial sequence
  synthetic
tatcaacaatgtaacattgg

SEQ ID NO: 22404 - DNA, 20 bp, Artificial sequence
  synthetic
tttcatggattcctccctta

SEQ ID NO: 22405 - DNA, 20 bp, Artificial sequence
  synthetic
cctaagacaggcgcagcctc

SEQ ID NO: 22406 - DNA, 20 bp, Artificial sequence
  synthetic
tgtctcttgttcccttcaat

SEQ ID NO: 22407 - DNA, 20 bp, Artificial sequence
  synthetic
ctccgtcttactttcccgcc

SEQ ID NO: 22408 - DNA, 20 bp, Artificial sequence
  synthetic
tgtgcatcgtaagggctatg

SEQ ID NO: 22409 - DNA, 20 bp, Artificial sequence
  synthetic
ccattgatgtcaaaatgatg

SEQ ID NO: 22410 - DNA, 20 bp, Artificial sequence
  synthetic
gtccctgcaaagtgcccatt

SEQ ID NO: 22411 - DNA, 20 bp, Artificial sequence
  synthetic
agataaaccatcactggcac

SEQ ID NO: 22412 - DNA, 20 bp, Artificial sequence
  synthetic
ttagatcactctttggaggg

SEQ ID NO: 22413 - DNA, 20 bp, Artificial sequence
  synthetic
cgaagatcataggaaccgcc

SEQ ID NO: 22414 - DNA, 20 bp, Artificial sequence
  synthetic
gtgatctcatcatacccatc

SEQ ID NO: 22415 - DNA, 20 bp, Artificial sequence
  synthetic
ccgacatgattgatcctttt

SEQ ID NO: 22416 - DNA, 20 bp, Artificial sequence
  synthetic
tcggcgccgcgtttgctgaa

SEQ ID NO: 22417 - DNA, 20 bp, Artificial sequence
  synthetic
tgctactcatggttggagtt

SEQ ID NO: 22418 - DNA, 20 bp, Artificial sequence
  synthetic
gggagagtgatgctgaaatc

SEQ ID NO: 22419 - DNA, 20 bp, Artificial sequence
  synthetic
gcgccattgtgcaaggagag

SEQ ID NO: 22420 - DNA, 20 bp, Artificial sequence
  synthetic
tgctggcacccaccagggtc

SEQ ID NO: 22421 - DNA, 20 bp, Artificial sequence
  synthetic
aaacagagatcccagacaga

SEQ ID NO: 22422 - DNA, 20 bp, Artificial sequence
  synthetic
ccagcgctgctcagcggaga

SEQ ID NO: 22423 - DNA, 20 bp, Artificial sequence
  synthetic
tcttacttgatctgcggccg

SEQ ID NO: 22424 - DNA, 20 bp, Artificial sequence
  synthetic
cagtcaccctatgggagaat

SEQ ID NO: 22425 - DNA, 20 bp, Artificial sequence
  synthetic
aaaggcgtttcctcgagcca

SEQ ID NO: 22426 - DNA, 20 bp, Artificial sequence
  synthetic
ccatgaagagtggagtcgac

SEQ ID NO: 22427 - DNA, 20 bp, Artificial sequence
  synthetic
tgctatgcccttacatgccc

SEQ ID NO: 22428 - DNA, 20 bp, Artificial sequence
  synthetic
tcaaggaaaaggtggacaca

SEQ ID NO: 22429 - DNA, 20 bp, Artificial sequence
  synthetic
ttgaagaacagaaccaatgg

SEQ ID NO: 22430 - DNA, 20 bp, Artificial sequence
  synthetic
ggaaaactgtgatggacgtc

SEQ ID NO: 22431 - DNA, 20 bp, Artificial sequence
  synthetic
aggtcagaacctggctgttt

SEQ ID NO: 22432 - DNA, 20 bp, Artificial sequence
  synthetic
ggtatgactggcagcaggtt

SEQ ID NO: 22433 - DNA, 20 bp, Artificial sequence
  synthetic
acgcgcagatgtggctgctg

SEQ ID NO: 22434 - DNA, 20 bp, Artificial sequence
  synthetic
cttgtttgcctccatcgacc

SEQ ID NO: 22435 - DNA, 20 bp, Artificial sequence
  synthetic
tcggagatgcgtcgtgaaga

SEQ ID NO: 22436 - DNA, 20 bp, Artificial sequence
  synthetic
cggggggcaatggctgcgcg

SEQ ID NO: 22437 - DNA, 20 bp, Artificial sequence
  synthetic
taggtccaatgagattctag

SEQ ID NO: 22438 - DNA, 20 bp, Artificial sequence
  synthetic
caacacagcccttctggtca

SEQ ID NO: 22439 - DNA, 20 bp, Artificial sequence
  synthetic
tgaacgggtgtatgtaaatg

SEQ ID NO: 22440 - DNA, 20 bp, Artificial sequence
  synthetic
cgcccaggtaattggaccga

SEQ ID NO: 22441 - DNA, 20 bp, Artificial sequence
  synthetic
aactcgcctatttctgacga

SEQ ID NO: 22442 - DNA, 20 bp, Artificial sequence
  synthetic
gtcaaccgaaaatgatgacg

SEQ ID NO: 22443 - DNA, 20 bp, Artificial sequence
  synthetic
gctcatcgcaaccagcacta

SEQ ID NO: 22444 - DNA, 20 bp, Artificial sequence
  synthetic
ccccaccaccacggaagacc

SEQ ID NO: 22445 - DNA, 20 bp, Artificial sequence
  synthetic
cgggttctatggttttgggt

SEQ ID NO: 22446 - DNA, 20 bp, Artificial sequence
  synthetic
gcctccggggagattcaccc

SEQ ID NO: 22447 - DNA, 20 bp, Artificial sequence
  synthetic
caaacaagagtatcgaccac

SEQ ID NO: 22448 - DNA, 20 bp, Artificial sequence
  synthetic
gggagctacaatgttggact

SEQ ID NO: 22449 - DNA, 20 bp, Artificial sequence
  synthetic
ccttccctctggttttgcca

SEQ ID NO: 22450 - DNA, 20 bp, Artificial sequence
  synthetic
aatcactagtagagtgccac

SEQ ID NO: 22451 - DNA, 20 bp, Artificial sequence
  synthetic
agtagtcacatatgcgttga

SEQ ID NO: 22452 - DNA, 20 bp, Artificial sequence
  synthetic
aaccaattggttcccactag

SEQ ID NO: 22453 - DNA, 20 bp, Artificial sequence
  synthetic
catttagacgtgatcgaata

SEQ ID NO: 22454 - DNA, 20 bp, Artificial sequence
  synthetic
gtaagagaagcctgtaaaca

SEQ ID NO: 22455 - DNA, 20 bp, Artificial sequence
  synthetic
ataatagatgcaataaactc

SEQ ID NO: 22456 - DNA, 20 bp, Artificial sequence
  synthetic
agtatcattagtaattcagt

SEQ ID NO: 22457 - DNA, 20 bp, Artificial sequence
  synthetic
gcccgacatggggaatacgc

SEQ ID NO: 22458 - DNA, 20 bp, Artificial sequence
  synthetic
gcggcacatgatgcggaagt

SEQ ID NO: 22459 - DNA, 20 bp, Artificial sequence
  synthetic
cgtctcgctgcagaaattga

SEQ ID NO: 22460 - DNA, 20 bp, Artificial sequence
  synthetic
ttgtcgcctgatttcacaaa

SEQ ID NO: 22461 - DNA, 20 bp, Artificial sequence
  synthetic
ttgttactattgtgtgagac

SEQ ID NO: 22462 - DNA, 20 bp, Artificial sequence
  synthetic
gtaatttcaactggaagaac

SEQ ID NO: 22463 - DNA, 20 bp, Artificial sequence
  synthetic
tgccatgctttcactttaga

SEQ ID NO: 22464 - DNA, 20 bp, Artificial sequence
  synthetic
cttcctgatgatgcctggcg

SEQ ID NO: 22465 - DNA, 20 bp, Artificial sequence
  synthetic
caagttgtgctagcgtatgc

SEQ ID NO: 22466 - DNA, 20 bp, Artificial sequence
  synthetic
actgacgataatactccttc

SEQ ID NO: 22467 - DNA, 20 bp, Artificial sequence
  synthetic
tccttatcagtcttatctta

SEQ ID NO: 22468 - DNA, 20 bp, Artificial sequence
  synthetic
tccatcatattcaaggtcaa

SEQ ID NO: 22469 - DNA, 20 bp, Artificial sequence
  synthetic
agcatttcaccagtcctccc

SEQ ID NO: 22470 - DNA, 20 bp, Artificial sequence
  synthetic
tcaatagacatgctattgac

SEQ ID NO: 22471 - DNA, 20 bp, Artificial sequence
  synthetic
ctactgaaatcaacttggga

SEQ ID NO: 22472 - DNA, 20 bp, Artificial sequence
  synthetic
caagaattaatttacttttt

SEQ ID NO: 22473 - DNA, 20 bp, Artificial sequence
  synthetic
caccgactatatatcatgaa

SEQ ID NO: 22474 - DNA, 20 bp, Artificial sequence
  synthetic
tatttttaaggttccagtaa

SEQ ID NO: 22475 - DNA, 20 bp, Artificial sequence
  synthetic
tgtcagctgtatacaaacac

SEQ ID NO: 22476 - DNA, 20 bp, Artificial sequence
  synthetic
catgatggttgtcactgaga

SEQ ID NO: 22477 - DNA, 20 bp, Artificial sequence
  synthetic
attgaatgcggcacgagttg

SEQ ID NO: 22478 - DNA, 20 bp, Artificial sequence
  synthetic
ggaactgcgacttgaaggaa

SEQ ID NO: 22479 - DNA, 20 bp, Artificial sequence
  synthetic
catagttcatagatataatg

SEQ ID NO: 22480 - DNA, 20 bp, Artificial sequence
  synthetic
aatcaggaatttatcacata

SEQ ID NO: 22481 - DNA, 20 bp, Artificial sequence
  synthetic
ctcgaagataatcttaaatt

SEQ ID NO: 22482 - DNA, 20 bp, Artificial sequence
  synthetic
gaaaccatatagctcaaatg

SEQ ID NO: 22483 - DNA, 20 bp, Artificial sequence
  synthetic
cagaccctgtgatggatgtc

SEQ ID NO: 22484 - DNA, 20 bp, Artificial sequence
  synthetic
tgcccgtagtaccactcgac

SEQ ID NO: 22485 - DNA, 20 bp, Artificial sequence
  synthetic
cgggggaattgtgtgctgtt

SEQ ID NO: 22486 - DNA, 20 bp, Artificial sequence
  synthetic
ctgtcacttcccgagttggt

SEQ ID NO: 22487 - DNA, 20 bp, Artificial sequence
  synthetic
catacatgcgctttgatgca

SEQ ID NO: 22488 - DNA, 20 bp, Artificial sequence
  synthetic
ccattgccactgtggtagca

SEQ ID NO: 22489 - DNA, 20 bp, Artificial sequence
  synthetic
tgaccctggttactcttgat

SEQ ID NO: 22490 - DNA, 20 bp, Artificial sequence
  synthetic
gggtcaagcccaataaagag

SEQ ID NO: 22491 - DNA, 20 bp, Artificial sequence
  synthetic
tagggaacacactgcatgag

SEQ ID NO: 22492 - DNA, 20 bp, Artificial sequence
  synthetic
atgatgctagtctcagtcca

SEQ ID NO: 22493 - DNA, 20 bp, Artificial sequence
  synthetic
tgactatgactcctgcagac

SEQ ID NO: 22494 - DNA, 20 bp, Artificial sequence
  synthetic
aaaccttagagatcgttatc

SEQ ID NO: 22495 - DNA, 20 bp, Artificial sequence
  synthetic
tgagaagcctaattattgac

SEQ ID NO: 22496 - DNA, 20 bp, Artificial sequence
  synthetic
tgtttttcttttgattgcat

SEQ ID NO: 22497 - DNA, 20 bp, Artificial sequence
  synthetic
atcacacccacccaggtgag

SEQ ID NO: 22498 - DNA, 20 bp, Artificial sequence
  synthetic
ttttaccttatgtcaatgct

SEQ ID NO: 22499 - DNA, 20 bp, Artificial sequence
  synthetic
tcattcctgttaacaataca

SEQ ID NO: 22500 - DNA, 20 bp, Artificial sequence
  synthetic
atactaacctacacacacaa

SEQ ID NO: 22501 - DNA, 20 bp, Artificial sequence
  synthetic
ggaggtttcttaaagagaaa

SEQ ID NO: 22502 - DNA, 20 bp, Artificial sequence
  synthetic
gaattaagaatttatatatc

SEQ ID NO: 22503 - DNA, 20 bp, Artificial sequence
  synthetic
ctaagtgctgtccatttatc

SEQ ID NO: 22504 - DNA, 20 bp, Artificial sequence
  synthetic
cacctccagccatagctgac

SEQ ID NO: 22505 - DNA, 20 bp, Artificial sequence
  synthetic
gtcttggcatatatgaccaa

SEQ ID NO: 22506 - DNA, 20 bp, Artificial sequence
  synthetic
atgtttcatctaaaacccga

SEQ ID NO: 22507 - DNA, 20 bp, Artificial sequence
  synthetic
tactagatgcttataagaac

SEQ ID NO: 22508 - DNA, 20 bp, Artificial sequence
  synthetic
gtagacatgcataccaggaa

SEQ ID NO: 22509 - DNA, 20 bp, Artificial sequence
  synthetic
gtcataaaggtgatttcgtc

SEQ ID NO: 22510 - DNA, 20 bp, Artificial sequence
  synthetic
gccagagatatctataaaaa

SEQ ID NO: 22511 - DNA, 20 bp, Artificial sequence
  synthetic
ggtctctccaatatagaagt

SEQ ID NO: 22512 - DNA, 20 bp, Artificial sequence
  synthetic
gtgttgtttcaatctgagtg

SEQ ID NO: 22513 - DNA, 20 bp, Artificial sequence
  synthetic
accatggtatgtataggcgg

SEQ ID NO: 22514 - DNA, 20 bp, Artificial sequence
  synthetic
aacccagagtccaaatgcca

SEQ ID NO: 22515 - DNA, 20 bp, Artificial sequence
  synthetic
tggttggcttgcaaaaacgt

SEQ ID NO: 22516 - DNA, 20 bp, Artificial sequence
  synthetic
agagtgtggtgaccagggtt

SEQ ID NO: 22517 - DNA, 20 bp, Artificial sequence
  synthetic
cttggcaggtccatagggac

SEQ ID NO: 22518 - DNA, 20 bp, Artificial sequence
  synthetic
gggttcctgtggcacacatt

SEQ ID NO: 22519 - DNA, 20 bp, Artificial sequence
  synthetic
ctttcaacagcatcttcggg

SEQ ID NO: 22520 - DNA, 20 bp, Artificial sequence
  synthetic
tggactcagagttattcctt

SEQ ID NO: 22521 - DNA, 20 bp, Artificial sequence
  synthetic
gagcatctgtgaggagtacc

SEQ ID NO: 22522 - DNA, 20 bp, Artificial sequence
  synthetic
tggtggcagtggggatcaca

SEQ ID NO: 22523 - DNA, 20 bp, Artificial sequence
  synthetic
tcctaagtgtagcttcggca

SEQ ID NO: 22524 - DNA, 20 bp, Artificial sequence
  synthetic
gtgtcttgcacacgatgtgg

SEQ ID NO: 22525 - DNA, 20 bp, Artificial sequence
  synthetic
gcctgagaacgttggtgttg

SEQ ID NO: 22526 - DNA, 20 bp, Artificial sequence
  synthetic
agggaagacaaaattgggag

SEQ ID NO: 22527 - DNA, 20 bp, Artificial sequence
  synthetic
ccattactagtgaggaaaga

SEQ ID NO: 22528 - DNA, 20 bp, Artificial sequence
  synthetic
cctttgaaaaggactactcc

SEQ ID NO: 22529 - DNA, 20 bp, Artificial sequence
  synthetic
ccctgggtgtcatctggtgc

SEQ ID NO: 22530 - DNA, 20 bp, Artificial sequence
  synthetic
cgggaaaacagagaagcagt

SEQ ID NO: 22531 - DNA, 20 bp, Artificial sequence
  synthetic
cgaatgtggacatccagcca

SEQ ID NO: 22532 - DNA, 20 bp, Artificial sequence
  synthetic
gtgtggcgggacatgtcatg

SEQ ID NO: 22533 - DNA, 20 bp, Artificial sequence
  synthetic
gatcaggaatggacgtgttc

SEQ ID NO: 22534 - DNA, 20 bp, Artificial sequence
  synthetic
aaaacagatgggcaagtgca

SEQ ID NO: 22535 - DNA, 20 bp, Artificial sequence
  synthetic
tcatggatgtcatcacaaga

SEQ ID NO: 22536 - DNA, 20 bp, Artificial sequence
  synthetic
tacccttttgttcacaccat

SEQ ID NO: 22537 - DNA, 20 bp, Artificial sequence
  synthetic
agccccagaaaccgacgcct

SEQ ID NO: 22538 - DNA, 20 bp, Artificial sequence
  synthetic
tacagtcacttgcgtgtggg

SEQ ID NO: 22539 - DNA, 20 bp, Artificial sequence
  synthetic
cgtgacgtgtgttctggacc

SEQ ID NO: 22540 - DNA, 20 bp, Artificial sequence
  synthetic
ggggcccctgggcaaccagg

SEQ ID NO: 22541 - DNA, 20 bp, Artificial sequence
  synthetic
tttcccgctggccctcttga

SEQ ID NO: 22542 - DNA, 20 bp, Artificial sequence
  synthetic
gtggaggcacaaagccgtga

SEQ ID NO: 22543 - DNA, 20 bp, Artificial sequence
  synthetic
tgaggttctcatcggcgtct

SEQ ID NO: 22544 - DNA, 20 bp, Artificial sequence
  synthetic
tacgtcgcgaagcatgggaa

SEQ ID NO: 22545 - DNA, 20 bp, Artificial sequence
  synthetic
tgggaggtttttggccaacc

SEQ ID NO: 22546 - DNA, 20 bp, Artificial sequence
  synthetic
ccctatgacgcagcaccctt

SEQ ID NO: 22547 - DNA, 20 bp, Artificial sequence
  synthetic
tgccattgcctattataggg

SEQ ID NO: 22548 - DNA, 20 bp, Artificial sequence
  synthetic
gggtgttcagcggaccatgt

SEQ ID NO: 22549 - DNA, 20 bp, Artificial sequence
  synthetic
ctacacagcaaccgccaagt

SEQ ID NO: 22550 - DNA, 20 bp, Artificial sequence
  synthetic
taacaactctggcactacca

SEQ ID NO: 22551 - DNA, 20 bp, Artificial sequence
  synthetic
ggtggatgaggtacaggtgg

SEQ ID NO: 22552 - DNA, 20 bp, Artificial sequence
  synthetic
tgagaagaccccgtcggtgt

SEQ ID NO: 22553 - DNA, 20 bp, Artificial sequence
  synthetic
gatgtcgtgctgcgttgaaa

SEQ ID NO: 22554 - DNA, 20 bp, Artificial sequence
  synthetic
tgaatgtgacaagtgtgagg

SEQ ID NO: 22555 - DNA, 20 bp, Artificial sequence
  synthetic
acggagggtggacaaggtga

SEQ ID NO: 22556 - DNA, 20 bp, Artificial sequence
  synthetic
ggtgtcggttaaggacttag

SEQ ID NO: 22557 - DNA, 20 bp, Artificial sequence
  synthetic
gtgcgagccctcatatcatg

SEQ ID NO: 22558 - DNA, 20 bp, Artificial sequence
  synthetic
cctcctttatccttggcacc

SEQ ID NO: 22559 - DNA, 20 bp, Artificial sequence
  synthetic
agcagcgttgagggttaccg

SEQ ID NO: 22560 - DNA, 20 bp, Artificial sequence
  synthetic
tccaggcctacggcttcctc

SEQ ID NO: 22561 - DNA, 20 bp, Artificial sequence
  synthetic
catctgttgcggcaaggtct

SEQ ID NO: 22562 - DNA, 20 bp, Artificial sequence
  synthetic
ctgcggagaggctggcagat

SEQ ID NO: 22563 - DNA, 20 bp, Artificial sequence
  synthetic
tgtgtgttcccatctctcct

SEQ ID NO: 22564 - DNA, 20 bp, Artificial sequence
  synthetic
agtgaaggcagtaagggcgg

SEQ ID NO: 22565 - DNA, 20 bp, Artificial sequence
  synthetic
gaaactggaactgcagagaa

SEQ ID NO: 22566 - DNA, 20 bp, Artificial sequence
  synthetic
gaagtagtgccaggatttca

SEQ ID NO: 22567 - DNA, 20 bp, Artificial sequence
  synthetic
cccaccctagaagagatgct

SEQ ID NO: 22568 - DNA, 20 bp, Artificial sequence
  synthetic
cctccggcagatccagcagc

SEQ ID NO: 22569 - DNA, 20 bp, Artificial sequence
  synthetic
tagtaggagatcctatacca

SEQ ID NO: 22570 - DNA, 20 bp, Artificial sequence
  synthetic
gccaacagaaaggagaagcc

SEQ ID NO: 22571 - DNA, 20 bp, Artificial sequence
  synthetic
tattaaaactggccagtagg

SEQ ID NO: 22572 - DNA, 20 bp, Artificial sequence
  synthetic
attcaaattttaaaaatttc

SEQ ID NO: 22573 - DNA, 20 bp, Artificial sequence
  synthetic
aggaactggatagtagtccc

SEQ ID NO: 22574 - DNA, 20 bp, Artificial sequence
  synthetic
gaagtaagaagagccatcag

SEQ ID NO: 22575 - DNA, 20 bp, Artificial sequence
  synthetic
ggccttcgagtggctagaga

SEQ ID NO: 22576 - DNA, 20 bp, Artificial sequence
  synthetic
tatatttacacatttcaaga

SEQ ID NO: 22577 - DNA, 20 bp, Artificial sequence
  synthetic
tgggtaatagaaactctgag

SEQ ID NO: 22578 - DNA, 20 bp, Artificial sequence
  synthetic
gactccaaggaaaactaaga

SEQ ID NO: 22579 - DNA, 20 bp, Artificial sequence
  synthetic
ccatgtgtcaagctaacacc

SEQ ID NO: 22580 - DNA, 20 bp, Artificial sequence
  synthetic
ttagggtatgaggagatgat

SEQ ID NO: 22581 - DNA, 20 bp, Artificial sequence
  synthetic
aagcactattgggatgctat

SEQ ID NO: 22582 - DNA, 20 bp, Artificial sequence
  synthetic
gtgcatatagtagtgggaat

SEQ ID NO: 22583 - DNA, 20 bp, Artificial sequence
  synthetic
tttccagaaggggctgtaac

SEQ ID NO: 22584 - DNA, 20 bp, Artificial sequence
  synthetic
cagtaccatattggcggcag

SEQ ID NO: 22585 - DNA, 20 bp, Artificial sequence
  synthetic
gccctgatttgaaacagatt

SEQ ID NO: 22586 - DNA, 20 bp, Artificial sequence
  synthetic
aaccatcccaaccctctcag

SEQ ID NO: 22587 - DNA, 20 bp, Artificial sequence
  synthetic
ctaagttaagacaaggaccc

SEQ ID NO: 22588 - DNA, 20 bp, Artificial sequence
  synthetic
tgtcattaacatcccttcaa

SEQ ID NO: 22589 - DNA, 20 bp, Artificial sequence
  synthetic
gactggcctcctgtaaaaca

SEQ ID NO: 22590 - DNA, 20 bp, Artificial sequence
  synthetic
agcaccagtgccgacctcat

SEQ ID NO: 22591 - DNA, 20 bp, Artificial sequence
  synthetic
tcagcaaccagaatatccta

SEQ ID NO: 22592 - DNA, 20 bp, Artificial sequence
  synthetic
acatgtcagtcatagcacct

SEQ ID NO: 22593 - DNA, 20 bp, Artificial sequence
  synthetic
tgaaaacatggataatgaat

SEQ ID NO: 22594 - DNA, 20 bp, Artificial sequence
  synthetic
tcacaaccatggttgatgtg

SEQ ID NO: 22595 - DNA, 20 bp, Artificial sequence
  synthetic
aagcagaagcccactcacac

SEQ ID NO: 22596 - DNA, 20 bp, Artificial sequence
  synthetic
tggcatctccatatgtgtgg

SEQ ID NO: 22597 - DNA, 20 bp, Artificial sequence
  synthetic
ggaacctatgtagccagtag

SEQ ID NO: 22598 - DNA, 20 bp, Artificial sequence
  synthetic
gaatggaaaatagcaactag

SEQ ID NO: 22599 - DNA, 20 bp, Artificial sequence
  synthetic
caacgaaggggacttaaccc

SEQ ID NO: 22600 - DNA, 20 bp, Artificial sequence
  synthetic
cttttacgggaatatcagaa

SEQ ID NO: 22601 - DNA, 20 bp, Artificial sequence
  synthetic
aacagatggaaggatttaca

SEQ ID NO: 22602 - DNA, 20 bp, Artificial sequence
  synthetic
aaaggcactaatactaccct

SEQ ID NO: 22603 - DNA, 20 bp, Artificial sequence
  synthetic
tatgtaagtggacgaaattg

SEQ ID NO: 22604 - DNA, 20 bp, Artificial sequence
  synthetic
atttgcttgggggggaacac

SEQ ID NO: 22605 - DNA, 20 bp, Artificial sequence
  synthetic
ccaagtaacaactgtattta

SEQ ID NO: 22606 - DNA, 20 bp, Artificial sequence
  synthetic
cttttccattgtatgaacta

SEQ ID NO: 22607 - DNA, 20 bp, Artificial sequence
  synthetic
tagttaatataaaaactcat

SEQ ID NO: 22608 - DNA, 20 bp, Artificial sequence
  synthetic
tttatcaatcatggcgggtt

SEQ ID NO: 22609 - DNA, 20 bp, Artificial sequence
  synthetic
acttcagctcgcgatggaat

SEQ ID NO: 22610 - DNA, 20 bp, Artificial sequence
  synthetic
ccaacttccaaaaaattgag

SEQ ID NO: 22611 - DNA, 20 bp, Artificial sequence
  synthetic
tggggtaaatagacattagt

SEQ ID NO: 22612 - DNA, 20 bp, Artificial sequence
  synthetic
gggatactctcaatcatcta

SEQ ID NO: 22613 - DNA, 20 bp, Artificial sequence
  synthetic
cagttcaaacaataaaaaac

SEQ ID NO: 22614 - DNA, 20 bp, Artificial sequence
  synthetic
ccactgtgctcgacacaacc

SEQ ID NO: 22615 - DNA, 20 bp, Artificial sequence
  synthetic
tagcagaaaaccgtgaccta

SEQ ID NO: 22616 - DNA, 20 bp, Artificial sequence
  synthetic
atatcatccatattgatttc

SEQ ID NO: 22617 - DNA, 20 bp, Artificial sequence
  synthetic
tcagaatctttggacatcca

SEQ ID NO: 22618 - DNA, 20 bp, Artificial sequence
  synthetic
gcagtgatgtattagatgaa

SEQ ID NO: 22619 - DNA, 20 bp, Artificial sequence
  synthetic
tgggtggtattgagggctgg

SEQ ID NO: 22620 - DNA, 20 bp, Artificial sequence
  synthetic
cagattatttgttagcatta

SEQ ID NO: 22621 - DNA, 20 bp, Artificial sequence
  synthetic
actgggtatatgcatccata

SEQ ID NO: 22622 - DNA, 20 bp, Artificial sequence
  synthetic
aacgaatcaggacgaaatag

SEQ ID NO: 22623 - DNA, 20 bp, Artificial sequence
  synthetic
ttgatggaaagcgatgctaa

SEQ ID NO: 22624 - DNA, 20 bp, Artificial sequence
  synthetic
caagaagatgacaaaagaat

SEQ ID NO: 22625 - DNA, 20 bp, Artificial sequence
  synthetic
aaacattgcaaaaatgatga

SEQ ID NO: 22626 - DNA, 20 bp, Artificial sequence
  synthetic
taaatacactgggaatgacc

SEQ ID NO: 22627 - DNA, 20 bp, Artificial sequence
  synthetic
ggttcagactgattccaaag

SEQ ID NO: 22628 - DNA, 20 bp, Artificial sequence
  synthetic
gtagattccatatcatataa

SEQ ID NO: 22629 - DNA, 20 bp, Artificial sequence
  synthetic
ctactaggtaacaagatcta

SEQ ID NO: 22630 - DNA, 20 bp, Artificial sequence
  synthetic
gtatatgataagtaatcagc

SEQ ID NO: 22631 - DNA, 20 bp, Artificial sequence
  synthetic
ccagaagaatttcttattga

SEQ ID NO: 22632 - DNA, 20 bp, Artificial sequence
  synthetic
gatatttgaatctggagaat

SEQ ID NO: 22633 - DNA, 20 bp, Artificial sequence
  synthetic
tggaatgttagatacgacaa

SEQ ID NO: 22634 - DNA, 20 bp, Artificial sequence
  synthetic
agtcagcagattcataacaa

SEQ ID NO: 22635 - DNA, 20 bp, Artificial sequence
  synthetic
atttaagaggttctgggatt

SEQ ID NO: 22636 - DNA, 20 bp, Artificial sequence
  synthetic
cactccgaattggtctagaa

SEQ ID NO: 22637 - DNA, 20 bp, Artificial sequence
  synthetic
agaatttttatcaactccag

SEQ ID NO: 22638 - DNA, 20 bp, Artificial sequence
  synthetic
tagagagtgtataggatcaa

SEQ ID NO: 22639 - DNA, 20 bp, Artificial sequence
  synthetic
gggacatcaagcagccatgc

SEQ ID NO: 22640 - DNA, 20 bp, Artificial sequence
  synthetic
aatgagccaagtaacaaatt

SEQ ID NO: 22641 - DNA, 20 bp, Artificial sequence
  synthetic
agattgtactgagagacagg

SEQ ID NO: 22642 - DNA, 20 bp, Artificial sequence
  synthetic
ttaaagccaggaatggatgg

SEQ ID NO: 22643 - DNA, 20 bp, Artificial sequence
  synthetic
gcatgggtaccagcacacaa

SEQ ID NO: 22644 - DNA, 20 bp, Artificial sequence
  synthetic
aagttcagaagtacacatcc

SEQ ID NO: 22645 - DNA, 20 bp, Artificial sequence
  synthetic
gaaactgacagaggatagat

SEQ ID NO: 22646 - DNA, 20 bp, Artificial sequence
  synthetic
ctgcttgtaccaattgctat

SEQ ID NO: 22647 - DNA, 20 bp, Artificial sequence
  synthetic
cttgatataataccaataga

SEQ ID NO: 22648 - DNA, 20 bp, Artificial sequence
  synthetic
tttggaaataataaaacaat

SEQ ID NO: 22649 - DNA, 20 bp, Artificial sequence
  synthetic
agtgacacaatcaccctccc

SEQ ID NO: 22650 - DNA, 20 bp, Artificial sequence
  synthetic
ggaagcactatgggcgcagc

SEQ ID NO: 22651 - DNA, 20 bp, Artificial sequence
  synthetic
gtactttctatagtgaatag

SEQ ID NO: 22652 - DNA, 20 bp, Artificial sequence
  synthetic
gatctgcggagcctgtgcct

SEQ ID NO: 22653 - DNA, 20 bp, Artificial sequence
  synthetic
tcatcacgtggcccgagagc

SEQ ID NO: 22654 - DNA, 20 bp, Artificial sequence
  synthetic
acagatttatatacttgata

SEQ ID NO: 22655 - DNA, 20 bp, Artificial sequence
  synthetic
cctaggcataatgggagaat

SEQ ID NO: 22656 - DNA, 20 bp, Artificial sequence
  synthetic
ttccaatcatccatgccagc

SEQ ID NO: 22657 - DNA, 20 bp, Artificial sequence
  synthetic
atactgaacaaactctgtga

SEQ ID NO: 22658 - DNA, 20 bp, Artificial sequence
  synthetic
cagcaagcccaccacaaaac

SEQ ID NO: 22659 - DNA, 20 bp, Artificial sequence
  synthetic
gagaactaccaaggtttatg

SEQ ID NO: 22660 - DNA, 20 bp, Artificial sequence
  synthetic
attatgtaaataagcaagaa

SEQ ID NO: 22661 - DNA, 20 bp, Artificial sequence
  synthetic
tttaatttatacacaaaatt

SEQ ID NO: 22662 - DNA, 20 bp, Artificial sequence
  synthetic
tataatcaattcttgacatg

SEQ ID NO: 22663 - DNA, 20 bp, Artificial sequence
  synthetic
aaactaaacacttatccttc

SEQ ID NO: 22664 - DNA, 20 bp, Artificial sequence
  synthetic
gaagctatatcactattgga

SEQ ID NO: 22665 - DNA, 20 bp, Artificial sequence
  synthetic
ctcttgtgttttcataaagg

SEQ ID NO: 22666 - DNA, 20 bp, Artificial sequence
  synthetic
gttgtgattgataaaattat

SEQ ID NO: 22667 - DNA, 20 bp, Artificial sequence
  synthetic
tttttaaggctgtacaatgg

SEQ ID NO: 22668 - DNA, 20 bp, Artificial sequence
  synthetic
tacttagtccttacaatagg

SEQ ID NO: 22669 - DNA, 20 bp, Artificial sequence
  synthetic
aaaaaaggaattaatactgc

SEQ ID NO: 22670 - DNA, 20 bp, Artificial sequence
  synthetic
ttggcttgcaaaggcgcgga

SEQ ID NO: 22671 - DNA, 20 bp, Artificial sequence
  synthetic
tcaacagcatctttggagga

SEQ ID NO: 22672 - DNA, 20 bp, Artificial sequence
  synthetic
tgatctggagtatccctgag

SEQ ID NO: 22673 - DNA, 20 bp, Artificial sequence
  synthetic
caggagtgatgggggccgcc

SEQ ID NO: 22674 - DNA, 20 bp, Artificial sequence
  synthetic
tggcggtggggattgcgttc

SEQ ID NO: 22675 - DNA, 20 bp, Artificial sequence
  synthetic
cactcacagaaataatgagg

SEQ ID NO: 22676 - DNA, 20 bp, Artificial sequence
  synthetic
gggcgcacgaggtgcaccag

SEQ ID NO: 22677 - DNA, 20 bp, Artificial sequence
  synthetic
tcagcagcatcgctcaggga

SEQ ID NO: 22678 - DNA, 20 bp, Artificial sequence
  synthetic
tgagtacgttggtgctggct

SEQ ID NO: 22679 - DNA, 20 bp, Artificial sequence
  synthetic
gccctgagcaggacaagatg

SEQ ID NO: 22680 - DNA, 20 bp, Artificial sequence
  synthetic
tgggtgtcgtctggtgtttc

SEQ ID NO: 22681 - DNA, 20 bp, Artificial sequence
  synthetic
tggcaggacatgttatgact

SEQ ID NO: 22682 - DNA, 20 bp, Artificial sequence
  synthetic
ggaagcgcaggctgaacaac

SEQ ID NO: 22683 - DNA, 20 bp, Artificial sequence
  synthetic
atcgcaccctcaagggagag

SEQ ID NO: 22684 - DNA, 20 bp, Artificial sequence
  synthetic
ctccataccgcccagaggta

SEQ ID NO: 22685 - DNA, 20 bp, Artificial sequence
  synthetic
ttgacacaaaagcacaggag

SEQ ID NO: 22686 - DNA, 20 bp, Artificial sequence
  synthetic
tcgaaagcacagtgcccctc

SEQ ID NO: 22687 - DNA, 20 bp, Artificial sequence
  synthetic
acccctgccctctcgcatta

SEQ ID NO: 22688 - DNA, 20 bp, Artificial sequence
  synthetic
cctccaacagccctcggctc

SEQ ID NO: 22689 - DNA, 20 bp, Artificial sequence
  synthetic
gagtccccagttcatgcaaa

SEQ ID NO: 22690 - DNA, 20 bp, Artificial sequence
  synthetic
caaggacaaagcccgggtcc

SEQ ID NO: 22691 - DNA, 20 bp, Artificial sequence
  synthetic
gtctccattgcaggcgcccc

SEQ ID NO: 22692 - DNA, 20 bp, Artificial sequence
  synthetic
tgcgtctacctacccttccg

SEQ ID NO: 22693 - DNA, 20 bp, Artificial sequence
  synthetic
cctccccgattattacccgt

SEQ ID NO: 22694 - DNA, 20 bp, Artificial sequence
  synthetic
accccgtctttccagtcaaa

SEQ ID NO: 22695 - DNA, 20 bp, Artificial sequence
  synthetic
tccaaatcccccttccaaaa

SEQ ID NO: 22696 - DNA, 20 bp, Artificial sequence
  synthetic
ccttccctatgtctactatc

SEQ ID NO: 22697 - DNA, 20 bp, Artificial sequence
  synthetic
aagttatatctcccaaccat

SEQ ID NO: 22698 - DNA, 20 bp, Artificial sequence
  synthetic
gatggcccctggtttggctg

SEQ ID NO: 22699 - DNA, 20 bp, Artificial sequence
  synthetic
tctccactcttaacgaatac

SEQ ID NO: 22700 - DNA, 20 bp, Artificial sequence
  synthetic
ctgaaactgtcagcgccctc

SEQ ID NO: 22701 - DNA, 20 bp, Artificial sequence
  synthetic
aaaggaccaatggcattgtt

SEQ ID NO: 22702 - DNA, 20 bp, Artificial sequence
  synthetic
tgcagtcttgcccaacctat

SEQ ID NO: 22703 - DNA, 20 bp, Artificial sequence
  synthetic
tgtggctcttctatgaccct

SEQ ID NO: 22704 - DNA, 20 bp, Artificial sequence
  synthetic
caactaactctacaaagtac

SEQ ID NO: 22705 - DNA, 20 bp, Artificial sequence
  synthetic
tggtctcactgttaccagcc

SEQ ID NO: 22706 - DNA, 20 bp, Artificial sequence
  synthetic
gcagggggaataaccggatc

SEQ ID NO: 22707 - DNA, 20 bp, Artificial sequence
  synthetic
acaatacccttcaaacccca

SEQ ID NO: 22708 - DNA, 20 bp, Artificial sequence
  synthetic
gcgaccatcccgtacatcct

SEQ ID NO: 22709 - DNA, 20 bp, Artificial sequence
  synthetic
tccaggtttcggacagagcc

SEQ ID NO: 22710 - DNA, 20 bp, Artificial sequence
  synthetic
cgttgtcggctctcctctcc

SEQ ID NO: 22711 - DNA, 20 bp, Artificial sequence
  synthetic
atacccaactctcggagacc

SEQ ID NO: 22712 - DNA, 20 bp, Artificial sequence
  synthetic
ctaccactctctcataacta

SEQ ID NO: 22713 - DNA, 20 bp, Artificial sequence
  synthetic
taggtagaatattgttttca

SEQ ID NO: 22714 - DNA, 20 bp, Artificial sequence
  synthetic
tgtcgtctccccctaagcaa

SEQ ID NO: 22715 - DNA, 20 bp, Artificial sequence
  synthetic
aagtaaagtatgattttgat

SEQ ID NO: 22716 - DNA, 20 bp, Artificial sequence
  synthetic
ctggacccgttcaatcgcgc

SEQ ID NO: 22717 - DNA, 20 bp, Artificial sequence
  synthetic
ccgcaaatcgtgttgaacaa

SEQ ID NO: 22718 - DNA, 20 bp, Artificial sequence
  synthetic
gtttatggttggtaggtgaa

SEQ ID NO: 22719 - DNA, 20 bp, Artificial sequence
  synthetic
aggttggaatttgggccgaa

SEQ ID NO: 22720 - DNA, 20 bp, Artificial sequence
  synthetic
ggaagttgtctgttcctaca

SEQ ID NO: 22721 - DNA, 20 bp, Artificial sequence
  synthetic
ttggtgaagaatttgatttt

SEQ ID NO: 22722 - DNA, 20 bp, Artificial sequence
  synthetic
gggactttggaaatttcgat

SEQ ID NO: 22723 - DNA, 20 bp, Artificial sequence
  synthetic
aatttcgttttagcccagaa

SEQ ID NO: 22724 - DNA, 20 bp, Artificial sequence
  synthetic
tgatggcgctgatacatcac

SEQ ID NO: 22725 - DNA, 20 bp, Artificial sequence
  synthetic
tagttttattccattttatt

SEQ ID NO: 22726 - DNA, 20 bp, Artificial sequence
  synthetic
tggtgttcatccaatgacta

SEQ ID NO: 22727 - DNA, 20 bp, Artificial sequence
  synthetic
gccctgcttacacgggtatt

SEQ ID NO: 22728 - DNA, 20 bp, Artificial sequence
  synthetic
ggtggtaagggtacgtctat

SEQ ID NO: 22729 - DNA, 20 bp, Artificial sequence
  synthetic
gagttgctacgcggcctggc

SEQ ID NO: 22730 - DNA, 20 bp, Artificial sequence
  synthetic
gtgctctttgcaccttctat

SEQ ID NO: 22731 - DNA, 20 bp, Artificial sequence
  synthetic
gttattggcacgcccttcag

SEQ ID NO: 22732 - DNA, 20 bp, Artificial sequence
  synthetic
gtgattcagtcagtaacgcc

SEQ ID NO: 22733 - DNA, 20 bp, Artificial sequence
  synthetic
cttacctaccgaccgtggag

SEQ ID NO: 22734 - DNA, 20 bp, Artificial sequence
  synthetic
caagaggtgcgctgccccta

SEQ ID NO: 22735 - DNA, 20 bp, Artificial sequence
  synthetic
tgacccacggtggcaaggag

SEQ ID NO: 22736 - DNA, 20 bp, Artificial sequence
  synthetic
tattcctgtttgagcacgct

SEQ ID NO: 22737 - DNA, 20 bp, Artificial sequence
  synthetic
gtaggggagacgaagtgctc

SEQ ID NO: 22738 - DNA, 20 bp, Artificial sequence
  synthetic
tggaaccttgcaaatgctca

SEQ ID NO: 22739 - DNA, 20 bp, Artificial sequence
  synthetic
gtacttatggaagattcatg

SEQ ID NO: 22740 - DNA, 20 bp, Artificial sequence
  synthetic
cgggggccccaatggccgca

SEQ ID NO: 22741 - DNA, 20 bp, Artificial sequence
  synthetic
taacaatttcactgcggaca

SEQ ID NO: 22742 - DNA, 20 bp, Artificial sequence
  synthetic
ccggggggtcgataaccagc

SEQ ID NO: 22743 - DNA, 20 bp, Artificial sequence
  synthetic
tctcttgggaggccccaatc

SEQ ID NO: 22744 - DNA, 20 bp, Artificial sequence
  synthetic
agcttcagtgtgcgaaggct

SEQ ID NO: 22745 - DNA, 20 bp, Artificial sequence
  synthetic
gcttcgacagcatgccaagc

SEQ ID NO: 22746 - DNA, 20 bp, Artificial sequence
  synthetic
ttgattcgtcaatcgacgaa

SEQ ID NO: 22747 - DNA, 20 bp, Artificial sequence
  synthetic
acttagaagtactagcaaaa

SEQ ID NO: 22748 - DNA, 20 bp, Artificial sequence
  synthetic
gatggactcggccattaggc

SEQ ID NO: 22749 - DNA, 20 bp, Artificial sequence
  synthetic
gggtgttgagcggtatgtca

SEQ ID NO: 22750 - DNA, 20 bp, Artificial sequence
  synthetic
tggcaccttcatgacaacag

SEQ ID NO: 22751 - DNA, 20 bp, Artificial sequence
  synthetic
cagtaatgacgatgtgctga

SEQ ID NO: 22752 - DNA, 20 bp, Artificial sequence
  synthetic
gagcatgattgagacccgca

SEQ ID NO: 22753 - DNA, 20 bp, Artificial sequence
  synthetic
ggtattcgcggacacggacg

SEQ ID NO: 22754 - DNA, 20 bp, Artificial sequence
  synthetic
tatctattactgcaaatcca

SEQ ID NO: 22755 - DNA, 20 bp, Artificial sequence
  synthetic
aaaggtttgccaaattcttg

SEQ ID NO: 22756 - DNA, 20 bp, Artificial sequence
  synthetic
ccatctagagaagcgcgtcc

SEQ ID NO: 22757 - DNA, 20 bp, Artificial sequence
  synthetic
ggcagtcattcagagtgtgt

SEQ ID NO: 22758 - DNA, 20 bp, Artificial sequence
  synthetic
cctgaaccttgctggcaggc

SEQ ID NO: 22759 - DNA, 20 bp, Artificial sequence
  synthetic
acaaggacaaattgaatata

SEQ ID NO: 22760 - DNA, 20 bp, Artificial sequence
  synthetic
ccgtttgatagaggcatcta

SEQ ID NO: 22761 - DNA, 20 bp, Artificial sequence
  synthetic
ttggtgaccccgacgtgatc

SEQ ID NO: 22762 - DNA, 20 bp, Artificial sequence
  synthetic
aacctaccgagaactcagag

SEQ ID NO: 22763 - DNA, 20 bp, Artificial sequence
  synthetic
caactccagacggttatagc

SEQ ID NO: 22764 - DNA, 20 bp, Artificial sequence
  synthetic
tgctttaggcagaagtcaca

SEQ ID NO: 22765 - DNA, 20 bp, Artificial sequence
  synthetic
gagaacttctacctggcggc

SEQ ID NO: 22766 - DNA, 20 bp, Artificial sequence
  synthetic
gaggagcactgtaagcccca

SEQ ID NO: 22767 - DNA, 20 bp, Artificial sequence
  synthetic
gagtacgttctgtctctcca

SEQ ID NO: 22768 - DNA, 20 bp, Artificial sequence
  synthetic
tgggacattcttcatgcttg

SEQ ID NO: 22769 - DNA, 20 bp, Artificial sequence
  synthetic
acagcacaaccctcacctat

SEQ ID NO: 22770 - DNA, 20 bp, Artificial sequence
  synthetic
cttctgcagaagatattaat

SEQ ID NO: 22771 - DNA, 20 bp, Artificial sequence
  synthetic
caggatgcaaaaattaaaca

SEQ ID NO: 22772 - DNA, 20 bp, Artificial sequence
  synthetic
acctgcttcttttgcaaaca

SEQ ID NO: 22773 - DNA, 20 bp, Artificial sequence
  synthetic
aatggccgcatggaccggtc

SEQ ID NO: 22774 - DNA, 20 bp, Artificial sequence
  synthetic
attcctatgttggtagatac

SEQ ID NO: 22775 - DNA, 20 bp, Artificial sequence
  synthetic
ctagaaaatcaaggaatatt

SEQ ID NO: 22776 - DNA, 20 bp, Artificial sequence
  synthetic
ccgcctcatgactgcgtttt

SEQ ID NO: 22777 - DNA, 20 bp, Artificial sequence
  synthetic
gttgaaggacgaccaacatg

SEQ ID NO: 22778 - DNA, 20 bp, Artificial sequence
  synthetic
agatcacggtacctaacagc

SEQ ID NO: 22779 - DNA, 20 bp, Artificial sequence
  synthetic
ctattactaccattcttgga

SEQ ID NO: 22780 - DNA, 20 bp, Artificial sequence
  synthetic
ttaaccaacatgctgaatac

SEQ ID NO: 22781 - DNA, 20 bp, Artificial sequence
  synthetic
agacaaaagaaatgggcaaa

SEQ ID NO: 22782 - DNA, 20 bp, Artificial sequence
  synthetic
tacattaaactatcttatcg

SEQ ID NO: 22783 - DNA, 20 bp, Artificial sequence
  synthetic
atcacgataaccacagccac

SEQ ID NO: 22784 - DNA, 20 bp, Artificial sequence
  synthetic
aaatgcacactgggtttagg

SEQ ID NO: 22785 - DNA, 20 bp, Artificial sequence
  synthetic
aggcctaaagtagaaataac

SEQ ID NO: 22786 - DNA, 20 bp, Artificial sequence
  synthetic
aaagtagaaataacaactga

SEQ ID NO: 22787 - DNA, 20 bp, Artificial sequence
  synthetic
tcctctccaattacagcaac

SEQ ID NO: 22788 - DNA, 20 bp, Artificial sequence
  synthetic
ggccgggagctggaatgctg

SEQ ID NO: 22789 - DNA, 20 bp, Artificial sequence
  synthetic
tggaggaggatataatttta

SEQ ID NO: 22790 - DNA, 20 bp, Artificial sequence
  synthetic
aggattattggattactgca

SEQ ID NO: 22791 - DNA, 20 bp, Artificial sequence
  synthetic
tccaggagagggtgtacagg

SEQ ID NO: 22792 - DNA, 20 bp, Artificial sequence
  synthetic
tacgtgcctgtggttataac

SEQ ID NO: 22793 - DNA, 20 bp, Artificial sequence
  synthetic
accaatgtcataaaggaatt

SEQ ID NO: 22794 - DNA, 20 bp, Artificial sequence
  synthetic
cggatcctactcgtcctgca

SEQ ID NO: 22795 - DNA, 20 bp, Artificial sequence
  synthetic
cgcgctatatgctgctcatt

SEQ ID NO: 22796 - DNA, 20 bp, Artificial sequence
  synthetic
tttatagaggttcccgaact

SEQ ID NO: 22797 - DNA, 20 bp, Artificial sequence
  synthetic
tgtcacgtcgtatagatttt

SEQ ID NO: 22798 - DNA, 20 bp, Artificial sequence
  synthetic
cggaaactgaaaagtcccgt

SEQ ID NO: 22799 - DNA, 20 bp, Artificial sequence
  synthetic
tcaattctttggatcgtaat

SEQ ID NO: 22800 - DNA, 20 bp, Artificial sequence
  synthetic
cgatatgtgtgggtgtcaac

SEQ ID NO: 22801 - DNA, 20 bp, Artificial sequence
  synthetic
tagctatttagctttactaa

SEQ ID NO: 22802 - DNA, 20 bp, Artificial sequence
  synthetic
tgaatccccgtcgtcatcca

SEQ ID NO: 22803 - DNA, 20 bp, Artificial sequence
  synthetic
ttacccttctaatgttgtta

SEQ ID NO: 22804 - DNA, 20 bp, Artificial sequence
  synthetic
ttattctccgttagtcgatt

SEQ ID NO: 22805 - DNA, 20 bp, Artificial sequence
  synthetic
gcagatccatgcgtgtaggt

SEQ ID NO: 22806 - DNA, 20 bp, Artificial sequence
  synthetic
tcgtcgtactgcttacgatt

SEQ ID NO: 22807 - DNA, 20 bp, Artificial sequence
  synthetic
aagtctacccccggcccgtc

SEQ ID NO: 22808 - DNA, 20 bp, Artificial sequence
  synthetic
agacgtgttcggggctcacc

SEQ ID NO: 22809 - DNA, 20 bp, Artificial sequence
  synthetic
ctcaggcgatgggaccgccg

SEQ ID NO: 22810 - DNA, 20 bp, Artificial sequence
  synthetic
tccctctacaatattggcct

SEQ ID NO: 22811 - DNA, 20 bp, Artificial sequence
  synthetic
aggaacgggaaagaattctc

SEQ ID NO: 22812 - DNA, 20 bp, Artificial sequence
  synthetic
caggtctcaaaggggcagct

SEQ ID NO: 22813 - DNA, 20 bp, Artificial sequence
  synthetic
gggcaagagaatgtccccga

SEQ ID NO: 22814 - DNA, 20 bp, Artificial sequence
  synthetic
aacccatgggaaaagtaggg

SEQ ID NO: 22815 - DNA, 20 bp, Artificial sequence
  synthetic
aactaaaggcccagatccag

SEQ ID NO: 22816 - DNA, 20 bp, Artificial sequence
  synthetic
gagccggcatgggactagcc

SEQ ID NO: 22817 - DNA, 20 bp, Artificial sequence
  synthetic
aggatgcctttttctgcctc

SEQ ID NO: 22818 - DNA, 20 bp, Artificial sequence
  synthetic
atctggggtacctactcaag

SEQ ID NO: 22819 - DNA, 20 bp, Artificial sequence
  synthetic
ccctaacaaaagagagcatc

SEQ ID NO: 22820 - DNA, 20 bp, Artificial sequence
  synthetic
atgaaattctctatggagga

SEQ ID NO: 22821 - DNA, 20 bp, Artificial sequence
  synthetic
acccgttccaggtcggggat

SEQ ID NO: 22822 - DNA, 20 bp, Artificial sequence
  synthetic
cagatgagtcctgggagctg

SEQ ID NO: 22823 - DNA, 20 bp, Artificial sequence
  synthetic
caaactcccacggtgagaaa

SEQ ID NO: 22824 - DNA, 20 bp, Artificial sequence
  synthetic
atagcctcatcaggagaggt

SEQ ID NO: 22825 - DNA, 20 bp, Artificial sequence
  synthetic
caattcatcaatgataggat

SEQ ID NO: 22826 - DNA, 20 bp, Artificial sequence
  synthetic
acaccccgacttgctgagtt

SEQ ID NO: 22827 - DNA, 20 bp, Artificial sequence
  synthetic
ttgaaaacagttattcatac

SEQ ID NO: 22828 - DNA, 20 bp, Artificial sequence
  synthetic
ttcttaactttaagtctatg

SEQ ID NO: 22829 - DNA, 20 bp, Artificial sequence
  synthetic
cctactttactggtgaatta

SEQ ID NO: 22830 - DNA, 20 bp, Artificial sequence
  synthetic
acaagccattacggacagtt

SEQ ID NO: 22831 - DNA, 20 bp, Artificial sequence
  synthetic
agacaaaaatgaaaacacaa

SEQ ID NO: 22832 - DNA, 20 bp, Artificial sequence
  synthetic
tgattgatgatttgggccaa

SEQ ID NO: 22833 - DNA, 20 bp, Artificial sequence
  synthetic
tattagattcaggtgctctg

SEQ ID NO: 22834 - DNA, 20 bp, Artificial sequence
  synthetic
acactagactagaagaacca

SEQ ID NO: 22835 - DNA, 20 bp, Artificial sequence
  synthetic
caaccatttttaatacatgt

SEQ ID NO: 22836 - DNA, 20 bp, Artificial sequence
  synthetic
ataagaatttttgtaccagc

SEQ ID NO: 22837 - DNA, 20 bp, Artificial sequence
  synthetic
aacgacccagacatagaagc

SEQ ID NO: 22838 - DNA, 20 bp, Artificial sequence
  synthetic
tatggactgaggatcaccga

SEQ ID NO: 22839 - DNA, 20 bp, Artificial sequence
  synthetic
ttctttgcgactatcagatt

SEQ ID NO: 22840 - DNA, 20 bp, Artificial sequence
  synthetic
ggtggttatccactcctgtg

SEQ ID NO: 22841 - DNA, 20 bp, Artificial sequence
  synthetic
aggcagtcagtgactttcaa

SEQ ID NO: 22842 - DNA, 20 bp, Artificial sequence
  synthetic
taggatcctttacaatctca

SEQ ID NO: 22843 - DNA, 20 bp, Artificial sequence
  synthetic
atcaagcatccaacaaccaa

SEQ ID NO: 22844 - DNA, 20 bp, Artificial sequence
  synthetic
tggacaaagagtgtcaaaca

SEQ ID NO: 22845 - DNA, 20 bp, Artificial sequence
  synthetic
gcctccagtcatcccggagt

SEQ ID NO: 22846 - DNA, 20 bp, Artificial sequence
  synthetic
cattgacactactcctgagg

SEQ ID NO: 22847 - DNA, 20 bp, Artificial sequence
  synthetic
aaattatcatgcagaccatc

SEQ ID NO: 22848 - DNA, 20 bp, Artificial sequence
  synthetic
tacacatcataatggccagt

SEQ ID NO: 22849 - DNA, 20 bp, Artificial sequence
  synthetic
agaagaacagctggggctac

SEQ ID NO: 22850 - DNA, 20 bp, Artificial sequence
  synthetic
ctaaaggggtgaaataaaac

SEQ ID NO: 22851 - DNA, 20 bp, Artificial sequence
  synthetic
ctgtgggatcatagttctgg

SEQ ID NO: 22852 - DNA, 20 bp, Artificial sequence
  synthetic
gtgcaccgggactgttatgg

SEQ ID NO: 22853 - DNA, 20 bp, Artificial sequence
  synthetic
cacagcaggtgttgccttat

SEQ ID NO: 22854 - DNA, 20 bp, Artificial sequence
  synthetic
aatagatcaaattagctgca

SEQ ID NO: 22855 - DNA, 20 bp, Artificial sequence
  synthetic
taacgataattcagaatgga

SEQ ID NO: 22856 - DNA, 20 bp, Artificial sequence
  synthetic
catcacaattcctgctaaca

SEQ ID NO: 22857 - DNA, 20 bp, Artificial sequence
  synthetic
gccttacggtccatcaggta

SEQ ID NO: 22858 - DNA, 20 bp, Artificial sequence
  synthetic
attaggcgatgttgataccg

SEQ ID NO: 22859 - DNA, 20 bp, Artificial sequence
  synthetic
atactaaatgtaatcaaact

SEQ ID NO: 22860 - DNA, 20 bp, Artificial sequence
  synthetic
gaaatacatgagtcaatcgc

SEQ ID NO: 22861 - DNA, 20 bp, Artificial sequence
  synthetic
gccaatcatgaaagcacacg

SEQ ID NO: 22862 - DNA, 20 bp, Artificial sequence
  synthetic
ctatcatatggaattcagtc

SEQ ID NO: 22863 - DNA, 20 bp, Artificial sequence
  synthetic
tgcagaaagacttgacgaaa

SEQ ID NO: 22864 - DNA, 20 bp, Artificial sequence
  synthetic
ttgtgcaaggcaagctcaat

SEQ ID NO: 22865 - DNA, 20 bp, Artificial sequence
  synthetic
aataagatcaggattgaaaa

SEQ ID NO: 22866 - DNA, 20 bp, Artificial sequence
  synthetic
gaataaagagcactcatcca

SEQ ID NO: 22867 - DNA, 20 bp, Artificial sequence
  synthetic
ttcagtcaagtgggcatttg

SEQ ID NO: 22868 - DNA, 20 bp, Artificial sequence
  synthetic
aatcttatcaatgaatacta

SEQ ID NO: 22869 - DNA, 20 bp, Artificial sequence
  synthetic
gagaaaagttttgattctag

SEQ ID NO: 22870 - DNA, 20 bp, Artificial sequence
  synthetic
ctccattcagcttcttcgga

SEQ ID NO: 22871 - DNA, 20 bp, Artificial sequence
  synthetic
ccgccctcccacatcctccc

SEQ ID NO: 22872 - DNA, 20 bp, Artificial sequence
  synthetic
cgctcccaatctcggccgcg

SEQ ID NO: 22873 - DNA, 20 bp, Artificial sequence
  synthetic
tggtgtaaggttcatgtgcc

SEQ ID NO: 22874 - DNA, 20 bp, Artificial sequence
  synthetic
tctgtgctcgctgctgtggc

SEQ ID NO: 22875 - DNA, 20 bp, Artificial sequence
  synthetic
ttggctctcctctctcttcc

SEQ ID NO: 22876 - DNA, 20 bp, Artificial sequence
  synthetic
ttcacccgcggctggaacat

SEQ ID NO: 22877 - DNA, 20 bp, Artificial sequence
  synthetic
tacaacacccactccatgtg

SEQ ID NO: 22878 - DNA, 20 bp, Artificial sequence
  synthetic
tatgaaagcaacaccgctac

SEQ ID NO: 22879 - DNA, 20 bp, Artificial sequence
  synthetic
tctttccacggtctccgcta

SEQ ID NO: 22880 - DNA, 20 bp, Artificial sequence
  synthetic
gcccaccggcctggtctcat

SEQ ID NO: 22881 - DNA, 20 bp, Artificial sequence
  synthetic
ttcactggctccgctcagca

SEQ ID NO: 22882 - DNA, 20 bp, Artificial sequence
  synthetic
tcccaaaccctcaccgaaga

SEQ ID NO: 22883 - DNA, 20 bp, Artificial sequence
  synthetic
aaccctgccaccatgcttgt

SEQ ID NO: 22884 - DNA, 20 bp, Artificial sequence
  synthetic
tcatacttcggatgggagga

SEQ ID NO: 22885 - DNA, 20 bp, Artificial sequence
  synthetic
gacggcagtgccaaacagat

SEQ ID NO: 22886 - DNA, 20 bp, Artificial sequence
  synthetic
gtcagctccatcactggcga

SEQ ID NO: 22887 - DNA, 20 bp, Artificial sequence
  synthetic
ttggtctccatcgcccagga

SEQ ID NO: 22888 - DNA, 20 bp, Artificial sequence
  synthetic
gcttcactcctcgctcaaac

SEQ ID NO: 22889 - DNA, 20 bp, Artificial sequence
  synthetic
ctcgtctcctctgccccctt

SEQ ID NO: 22890 - DNA, 20 bp, Artificial sequence
  synthetic
caagccatcgcaaacaacac

SEQ ID NO: 22891 - DNA, 20 bp, Artificial sequence
  synthetic
ggcgcccatccccaccccac

SEQ ID NO: 22892 - DNA, 20 bp, Artificial sequence
  synthetic
aaccggatgtcccgcttgca

SEQ ID NO: 22893 - DNA, 20 bp, Artificial sequence
  synthetic
atgctcctcggtggtctcat

SEQ ID NO: 22894 - DNA, 20 bp, Artificial sequence
  synthetic
ttcacccttgttgctgacca

SEQ ID NO: 22895 - DNA, 20 bp, Artificial sequence
  synthetic
atctgtgtcctctctgccct

SEQ ID NO: 22896 - DNA, 20 bp, Artificial sequence
  synthetic
caggatttcccacccacgtc

SEQ ID NO: 22897 - DNA, 20 bp, Artificial sequence
  synthetic
tagttagttagaaccctttg

SEQ ID NO: 22898 - DNA, 20 bp, Artificial sequence
  synthetic
aagccatggttgtactgcac

SEQ ID NO: 22899 - DNA, 20 bp, Artificial sequence
  synthetic
ataaacctcttgctgattgc

SEQ ID NO: 22900 - DNA, 20 bp, Artificial sequence
  synthetic
catacctgttgtccttgtat

SEQ ID NO: 22901 - DNA, 20 bp, Artificial sequence
  synthetic
taggggggcaaccggtgact

SEQ ID NO: 22902 - DNA, 20 bp, Artificial sequence
  synthetic
ttcctcaagggttcaagaat

SEQ ID NO: 22903 - DNA, 20 bp, Artificial sequence
  synthetic
ctttgggcaataaggggtac

SEQ ID NO: 22904 - DNA, 20 bp, Artificial sequence
  synthetic
tcaaggatgcagggaagcta

SEQ ID NO: 22905 - DNA, 20 bp, Artificial sequence
  synthetic
ttaaccctgctaccttgctc

SEQ ID NO: 22906 - DNA, 20 bp, Artificial sequence
  synthetic
gaggaaaaactatcatgcct

SEQ ID NO: 22907 - DNA, 20 bp, Artificial sequence
  synthetic
gtgctcaaatcaacgccgga

SEQ ID NO: 22908 - DNA, 20 bp, Artificial sequence
  synthetic
tggatgtaaaactacagata

SEQ ID NO: 22909 - DNA, 20 bp, Artificial sequence
  synthetic
tcccaaacggattgggaccg

SEQ ID NO: 22910 - DNA, 20 bp, Artificial sequence
  synthetic
ccccccatcctgcctatcta

SEQ ID NO: 22911 - DNA, 20 bp, Artificial sequence
  synthetic
taacactggactcaccccat

SEQ ID NO: 22912 - DNA, 20 bp, Artificial sequence
  synthetic
agtcttacaaaacagacggg

SEQ ID NO: 22913 - DNA, 20 bp, Artificial sequence
  synthetic
gggatggtttgaaggatggt

SEQ ID NO: 22914 - DNA, 20 bp, Artificial sequence
  synthetic
gttcccatgagatacaagga

SEQ ID NO: 22915 - DNA, 20 bp, Artificial sequence
  synthetic
ctttgctgagacttgaccgc

SEQ ID NO: 22916 - DNA, 20 bp, Artificial sequence
  synthetic
ccaagtacactacccactag

SEQ ID NO: 22917 - DNA, 20 bp, Artificial sequence
  synthetic
acccaagattggtcccgaga

SEQ ID NO: 22918 - DNA, 20 bp, Artificial sequence
  synthetic
atggctagggctgcattggc

SEQ ID NO: 22919 - DNA, 20 bp, Artificial sequence
  synthetic
gaggcagtggatcattggga

SEQ ID NO: 22920 - DNA, 20 bp, Artificial sequence
  synthetic
gctatagtcatcaccaccaa

SEQ ID NO: 22921 - DNA, 20 bp, Artificial sequence
  synthetic
ttctcacatctaaaaatgga

SEQ ID NO: 22922 - DNA, 20 bp, Artificial sequence
  synthetic
atggcgggatctgcgctcgt

SEQ ID NO: 22923 - DNA, 20 bp, Artificial sequence
  synthetic
caacggcgacaacttggtct

SEQ ID NO: 22924 - DNA, 20 bp, Artificial sequence
  synthetic
ggatggggcttttgggtcag

SEQ ID NO: 22925 - DNA, 20 bp, Artificial sequence
  synthetic
cttgaagaaggttgccctga

SEQ ID NO: 22926 - DNA, 20 bp, Artificial sequence
  synthetic
gccggccacgagattgtgag

SEQ ID NO: 22927 - DNA, 20 bp, Artificial sequence
  synthetic
aaaaggaagaatgatgattg

SEQ ID NO: 22928 - DNA, 20 bp, Artificial sequence
  synthetic
ctactatggggcgccgatct

SEQ ID NO: 22929 - DNA, 20 bp, Artificial sequence
  synthetic
gcagattatacagcatggga

SEQ ID NO: 22930 - DNA, 20 bp, Artificial sequence
  synthetic
ccatctggattcccatgtac

SEQ ID NO: 22931 - DNA, 20 bp, Artificial sequence
  synthetic
atcttctggacccgcgggcc

SEQ ID NO: 22932 - DNA, 20 bp, Artificial sequence
  synthetic
caatgtccagagtgtgcagt

SEQ ID NO: 22933 - DNA, 20 bp, Artificial sequence
  synthetic
ccccattgggtttccagacc

SEQ ID NO: 22934 - DNA, 20 bp, Artificial sequence
  synthetic
ctggatttcccccccatcac

SEQ ID NO: 22935 - DNA, 20 bp, Artificial sequence
  synthetic
ctgggagcgggcatacaggt

SEQ ID NO: 22936 - DNA, 20 bp, Artificial sequence
  synthetic
cgtgctgggggtttgaccag

SEQ ID NO: 22937 - DNA, 20 bp, Artificial sequence
  synthetic
gttttagccagcactacagc

SEQ ID NO: 22938 - DNA, 20 bp, Artificial sequence
  synthetic
caggcctatcagaaacgaat

SEQ ID NO: 22939 - DNA, 20 bp, Artificial sequence
  synthetic
ggagcaattgagctcagtgt

SEQ ID NO: 22940 - DNA, 20 bp, Artificial sequence
  synthetic
caaagtaagagatcaagctg

SEQ ID NO: 22941 - DNA, 20 bp, Artificial sequence
  synthetic
ccagttcactggtgcttttg

SEQ ID NO: 22942 - DNA, 20 bp, Artificial sequence
  synthetic
cttactgaatgacaggcatt

SEQ ID NO: 22943 - DNA, 20 bp, Artificial sequence
  synthetic
aggtccagataatggagcag

SEQ ID NO: 22944 - DNA, 20 bp, Artificial sequence
  synthetic
gggacgacctaaagaaaaaa

SEQ ID NO: 22945 - DNA, 20 bp, Artificial sequence
  synthetic
ctaggaggtctggagccgca

SEQ ID NO: 22946 - DNA, 20 bp, Artificial sequence
  synthetic
tcaaagggacgaaggtggtc

SEQ ID NO: 22947 - DNA, 20 bp, Artificial sequence
  synthetic
ccgaactttctttgaccatc

SEQ ID NO: 22948 - DNA, 20 bp, Artificial sequence
  synthetic
aagctggactgctggtctcc

SEQ ID NO: 22949 - DNA, 20 bp, Artificial sequence
  synthetic
gtcatgaaggagagggaata

SEQ ID NO: 22950 - DNA, 20 bp, Artificial sequence
  synthetic
tccagtcacttcaacaaatt

SEQ ID NO: 22951 - DNA, 20 bp, Artificial sequence
  synthetic
cggtatttaacagcttgtat

SEQ ID NO: 22952 - DNA, 20 bp, Artificial sequence
  synthetic
gaacatgctgggaacagatg

SEQ ID NO: 22953 - DNA, 20 bp, Artificial sequence
  synthetic
tagacatccttaagcagaac

SEQ ID NO: 22954 - DNA, 20 bp, Artificial sequence
  synthetic
agataagagtgcatgaggga

SEQ ID NO: 22955 - DNA, 20 bp, Artificial sequence
  synthetic
tgacaataacttactcatcg

SEQ ID NO: 22956 - DNA, 20 bp, Artificial sequence
  synthetic
acaggagatatgggccagca

SEQ ID NO: 22957 - DNA, 20 bp, Artificial sequence
  synthetic
ttgatgagaggattgtcctc

SEQ ID NO: 22958 - DNA, 20 bp, Artificial sequence
  synthetic
agcaacatgacgcaacgagt

SEQ ID NO: 22959 - DNA, 20 bp, Artificial sequence
  synthetic
aagccttcattggacatctc

SEQ ID NO: 22960 - DNA, 20 bp, Artificial sequence
  synthetic
tattctgatagaggctgggg

SEQ ID NO: 22961 - DNA, 20 bp, Artificial sequence
  synthetic
gccccctgcaggattccagt

SEQ ID NO: 22962 - DNA, 20 bp, Artificial sequence
  synthetic
ggcaagagagagctcaagtg

SEQ ID NO: 22963 - DNA, 20 bp, Artificial sequence
  synthetic
tccccagggaggaagaatgg

SEQ ID NO: 22964 - DNA, 20 bp, Artificial sequence
  synthetic
agatccaccacggatagcgg

SEQ ID NO: 22965 - DNA, 20 bp, Artificial sequence
  synthetic
catgagatgaacaatggagg

SEQ ID NO: 22966 - DNA, 20 bp, Artificial sequence
  synthetic
gatgaagcccattttttgga

SEQ ID NO: 22967 - DNA, 20 bp, Artificial sequence
  synthetic
gggcgcattgggagaaatcc

SEQ ID NO: 22968 - DNA, 20 bp, Artificial sequence
  synthetic
ccagtttcccctggtgaaat

SEQ ID NO: 22969 - DNA, 20 bp, Artificial sequence
  synthetic
gacagcggtgaaacagtgaa

SEQ ID NO: 22970 - DNA, 20 bp, Artificial sequence
  synthetic
gatttcctggctaaaaaagg

SEQ ID NO: 22971 - DNA, 20 bp, Artificial sequence
  synthetic
gacaaccaagtggcatacct

SEQ ID NO: 22972 - DNA, 20 bp, Artificial sequence
  synthetic
gcctggacagtgtacgttgg

SEQ ID NO: 22973 - DNA, 20 bp, Artificial sequence
  synthetic
ctggtcagtggctggaattc

SEQ ID NO: 22974 - DNA, 20 bp, Artificial sequence
  synthetic
gttgacattgaggaagctcc

SEQ ID NO: 22975 - DNA, 20 bp, Artificial sequence
  synthetic
aagcgacagtttgagttgta

SEQ ID NO: 22976 - DNA, 20 bp, Artificial sequence
  synthetic
ccagtgaaatgtgacaccct

SEQ ID NO: 22977 - DNA, 20 bp, Artificial sequence
  synthetic
cttgagtttgaggccctggg

SEQ ID NO: 22978 - DNA, 20 bp, Artificial sequence
  synthetic
atcacagaggcagaccttga

SEQ ID NO: 22979 - DNA, 20 bp, Artificial sequence
  synthetic
ctgaagaggatggcggtgag

SEQ ID NO: 22980 - DNA, 20 bp, Artificial sequence
  synthetic
ttccatgaactacagctgaa

SEQ ID NO: 22981 - DNA, 20 bp, Artificial sequence
  synthetic
atggtgaaaaaatggagaga

SEQ ID NO: 22982 - DNA, 20 bp, Artificial sequence
  synthetic
gacaggtattctgtggatgc

SEQ ID NO: 22983 - DNA, 20 bp, Artificial sequence
  synthetic
cgggataaaaactacggatg

SEQ ID NO: 22984 - DNA, 20 bp, Artificial sequence
  synthetic
acatataaacaaaaaccagc

SEQ ID NO: 22985 - DNA, 20 bp, Artificial sequence
  synthetic
cggagaggtaatgtgaatgg

SEQ ID NO: 22986 - DNA, 20 bp, Artificial sequence
  synthetic
tggatatggctgatgaacaa

SEQ ID NO: 22987 - DNA, 20 bp, Artificial sequence
  synthetic
ggtgttgtactggacaggcc

SEQ ID NO: 22988 - DNA, 20 bp, Artificial sequence
  synthetic
aagcaattagggatccttgg

SEQ ID NO: 22989 - DNA, 20 bp, Artificial sequence
  synthetic
accagtgctgagtttatgca

SEQ ID NO: 22990 - DNA, 20 bp, Artificial sequence
  synthetic
tttccatcaaggcataagag

SEQ ID NO: 22991 - DNA, 20 bp, Artificial sequence
  synthetic
cagataacattggccactgg

SEQ ID NO: 22992 - DNA, 20 bp, Artificial sequence
  synthetic
ggagatatgaaggaaggtga

SEQ ID NO: 22993 - DNA, 20 bp, Artificial sequence
  synthetic
aggtttgctgaaaatcttag

SEQ ID NO: 22994 - DNA, 20 bp, Artificial sequence
  synthetic
gagtcaggtgtgacattgcc

SEQ ID NO: 22995 - DNA, 20 bp, Artificial sequence
  synthetic
gaggtcctcaacaacctcct

SEQ ID NO: 22996 - DNA, 20 bp, Artificial sequence
  synthetic
tacacatacctcaatgcaag

SEQ ID NO: 22997 - DNA, 20 bp, Artificial sequence
  synthetic
aaggaattagctgtgggaga

SEQ ID NO: 22998 - DNA, 20 bp, Artificial sequence
  synthetic
tatgctacaagttccttgaa

SEQ ID NO: 22999 - DNA, 20 bp, Artificial sequence
  synthetic
tatcaagatcttgtcgatag

SEQ ID NO: 23000 - DNA, 20 bp, Artificial sequence
  synthetic
aacaaaggttctacctcaaa

SEQ ID NO: 23001 - DNA, 20 bp, Artificial sequence
  synthetic
aagtgccctccatgtagtaa

SEQ ID NO: 23002 - DNA, 20 bp, Artificial sequence
  synthetic
ggctcaacaatggcctctgc

SEQ ID NO: 23003 - DNA, 20 bp, Artificial sequence
  synthetic
cccggctatgaaggtaaaac

SEQ ID NO: 23004 - DNA, 20 bp, Artificial sequence
  synthetic
gcatatagatttgaggacat

SEQ ID NO: 23005 - DNA, 20 bp, Artificial sequence
  synthetic
gcgacggatccgttatccgc

SEQ ID NO: 23006 - DNA, 20 bp, Artificial sequence
  synthetic
catgggacgctagttgtgaa

SEQ ID NO: 23007 - DNA, 20 bp, Artificial sequence
  synthetic
tccgggtacaccgtgcatgt

SEQ ID NO: 23008 - DNA, 20 bp, Artificial sequence
  synthetic
atagatgatagtttcaccga

SEQ ID NO: 23009 - DNA, 20 bp, Artificial sequence
  synthetic
caggggttaggtcagatgct

SEQ ID NO: 23010 - DNA, 20 bp, Artificial sequence
  synthetic
tctgatacagtgcaaaccag

SEQ ID NO: 23011 - DNA, 20 bp, Artificial sequence
  synthetic
gtccagttacggaggaaatt

SEQ ID NO: 23012 - DNA, 20 bp, Artificial sequence
  synthetic
gcatctctaaatgacttcgg

SEQ ID NO: 23013 - DNA, 20 bp, Artificial sequence
  synthetic
acgcttacacccctctccac

SEQ ID NO: 23014 - DNA, 20 bp, Artificial sequence
  synthetic
gcccagggcaccgattcaat

SEQ ID NO: 23015 - DNA, 20 bp, Artificial sequence
  synthetic
cttgggtgtgatgcttcacc

SEQ ID NO: 23016 - DNA, 20 bp, Artificial sequence
  synthetic
ctggaggagaaaggaatcct

SEQ ID NO: 23017 - DNA, 20 bp, Artificial sequence
  synthetic
caaggaccagggttcgatta

SEQ ID NO: 23018 - DNA, 20 bp, Artificial sequence
  synthetic
aaaacaaaggttgagcaggg

SEQ ID NO: 23019 - DNA, 20 bp, Artificial sequence
  synthetic
gcaggcatgcaaaatcatat

SEQ ID NO: 23020 - DNA, 20 bp, Artificial sequence
  synthetic
accataaataatggaactcc

SEQ ID NO: 23021 - DNA, 20 bp, Artificial sequence
  synthetic
caacaaggcactgttgacaa

SEQ ID NO: 23022 - DNA, 20 bp, Artificial sequence
  synthetic
tttagcaggacggaaagtga

SEQ ID NO: 23023 - DNA, 20 bp, Artificial sequence
  synthetic
gacggcgtgcatgctgtcct

SEQ ID NO: 23024 - DNA, 20 bp, Artificial sequence
  synthetic
aatttaagagtgtaactcaa

SEQ ID NO: 23025 - DNA, 20 bp, Artificial sequence
  synthetic
ccgctgtctcattagttcaa

SEQ ID NO: 23026 - DNA, 20 bp, Artificial sequence
  synthetic
tgtccctagacggattggat

SEQ ID NO: 23027 - DNA, 20 bp, Artificial sequence
  synthetic
acctttgcacctgggcctgt

SEQ ID NO: 23028 - DNA, 20 bp, Artificial sequence
  synthetic
gcagacaagataagagagtc

SEQ ID NO: 23029 - DNA, 20 bp, Artificial sequence
  synthetic
gccccagaattagttgcttt

SEQ ID NO: 23030 - DNA, 20 bp, Artificial sequence
  synthetic
ttagttgatgaccttgctct

SEQ ID NO: 23031 - DNA, 20 bp, Artificial sequence
  synthetic
ttagatttccaaacaataat

SEQ ID NO: 23032 - DNA, 20 bp, Artificial sequence
  synthetic
ctaccacaaccattcaaccg

SEQ ID NO: 23033 - DNA, 20 bp, Artificial sequence
  synthetic
atcatcccctttgcgcgtac

SEQ ID NO: 23034 - DNA, 20 bp, Artificial sequence
  synthetic
tctcctcgtggaggaatcga

SEQ ID NO: 23035 - DNA, 20 bp, Artificial sequence
  synthetic
gtgagcaagatgtgcttaac

SEQ ID NO: 23036 - DNA, 20 bp, Artificial sequence
  synthetic
tttgttcatatatctaatga

SEQ ID NO: 23037 - DNA, 20 bp, Artificial sequence
  synthetic
tgcatcaatctggatgtcat

SEQ ID NO: 23038 - DNA, 20 bp, Artificial sequence
  synthetic
gatagagttctaaatctagt

SEQ ID NO: 23039 - DNA, 20 bp, Artificial sequence
  synthetic
ttcaatctaagttcatccga

SEQ ID NO: 23040 - DNA, 20 bp, Artificial sequence
  synthetic
gagtacattattcacaaggt

SEQ ID NO: 23041 - DNA, 20 bp, Artificial sequence
  synthetic
gacaatgatatacctgatta

SEQ ID NO: 23042 - DNA, 20 bp, Artificial sequence
  synthetic
aagtcaccaaaaggttccac

SEQ ID NO: 23043 - DNA, 20 bp, Artificial sequence
  synthetic
gtgagagttcaatactcacc

SEQ ID NO: 23044 - DNA, 20 bp, Artificial sequence
  synthetic
agtactggggcttgatcctc

SEQ ID NO: 23045 - DNA, 20 bp, Artificial sequence
  synthetic
tgaccagaatacagaaaaca

SEQ ID NO: 23046 - DNA, 20 bp, Artificial sequence
  synthetic
caatagctgactgtaaaaaa

SEQ ID NO: 23047 - DNA, 20 bp, Artificial sequence
  synthetic
tgctgcattctgatcaagga

SEQ ID NO: 23048 - DNA, 20 bp, Artificial sequence
  synthetic
ctacaaagtggtacccactt

SEQ ID NO: 23049 - DNA, 20 bp, Artificial sequence
  synthetic
atgactaagccattgcctct

SEQ ID NO: 23050 - DNA, 20 bp, Artificial sequence
  synthetic
gacaaggagagggttttggg

SEQ ID NO: 23051 - DNA, 20 bp, Artificial sequence
  synthetic
tcaactcaagaccaatatat

SEQ ID NO: 23052 - DNA, 20 bp, Artificial sequence
  synthetic
aaggaagaaacatataggaa

SEQ ID NO: 23053 - DNA, 20 bp, Artificial sequence
  synthetic
gggacctcatatgatttgga

SEQ ID NO: 23054 - DNA, 20 bp, Artificial sequence
  synthetic
gaaatagttaaccaagactg

SEQ ID NO: 23055 - DNA, 20 bp, Artificial sequence
  synthetic
agatttcagattcagctctt

SEQ ID NO: 23056 - DNA, 20 bp, Artificial sequence
  synthetic
cctcatcataggccactaca

SEQ ID NO: 23057 - DNA, 20 bp, Artificial sequence
  synthetic
tcgtgaggacccttatgtta

SEQ ID NO: 23058 - DNA, 20 bp, Artificial sequence
  synthetic
ggttttaagatgcttccgca

SEQ ID NO: 23059 - DNA, 20 bp, Artificial sequence
  synthetic
tcaggggagacagacctttg

SEQ ID NO: 23060 - DNA, 20 bp, Artificial sequence
  synthetic
taatatgctatctacagtat

SEQ ID NO: 23061 - DNA, 20 bp, Artificial sequence
  synthetic
ccacttggggccgaataacc

SEQ ID NO: 23062 - DNA, 20 bp, Artificial sequence
  synthetic
gtggatttgcaagagcagtg

SEQ ID NO: 23063 - DNA, 20 bp, Artificial sequence
  synthetic
atttcaaaaccattgaggaa

SEQ ID NO: 23064 - DNA, 20 bp, Artificial sequence
  synthetic
ccttagctaaggaatgtcta

SEQ ID NO: 23065 - DNA, 20 bp, Artificial sequence
  synthetic
taataccaatcaccaacaga

SEQ ID NO: 23066 - DNA, 20 bp, Artificial sequence
  synthetic
ccacacattatgtttctcag

SEQ ID NO: 23067 - DNA, 20 bp, Artificial sequence
  synthetic
cttttgccggaagcacacta

SEQ ID NO: 23068 - DNA, 20 bp, Artificial sequence
  synthetic
cacaaacgcatcaaatgccc

SEQ ID NO: 23069 - DNA, 20 bp, Artificial sequence
  synthetic
cttgataataagagaacctt

SEQ ID NO: 23070 - DNA, 20 bp, Artificial sequence
  synthetic
catagaatgtgcctgtagag

SEQ ID NO: 23071 - DNA, 20 bp, Artificial sequence
  synthetic
gcttggaggcatcaaaggag

SEQ ID NO: 23072 - DNA, 20 bp, Artificial sequence
  synthetic
tatgctttttaaaacccaaa

SEQ ID NO: 23073 - DNA, 20 bp, Artificial sequence
  synthetic
ggcaataaacagagaggtgt

SEQ ID NO: 23074 - DNA, 20 bp, Artificial sequence
  synthetic
gaataaagactcacaacaag

SEQ ID NO: 23075 - DNA, 20 bp, Artificial sequence
  synthetic
aaaccattttagtgtaacat

SEQ ID NO: 23076 - DNA, 20 bp, Artificial sequence
  synthetic
cttggagatttgggaagagc

SEQ ID NO: 23077 - DNA, 20 bp, Artificial sequence
  synthetic
aacatagctccatacccctt

SEQ ID NO: 23078 - DNA, 20 bp, Artificial sequence
  synthetic
cttactgttgtagggttttg

SEQ ID NO: 23079 - DNA, 20 bp, Artificial sequence
  synthetic
gatggaaaaattgttaatat

SEQ ID NO: 23080 - DNA, 20 bp, Artificial sequence
  synthetic
ataaccaatgaagtatccat

SEQ ID NO: 23081 - DNA, 20 bp, Artificial sequence
  synthetic
ttcctaaattactacttgta

SEQ ID NO: 23082 - DNA, 20 bp, Artificial sequence
  synthetic
atattgggtagttgtagcag

SEQ ID NO: 23083 - DNA, 20 bp, Artificial sequence
  synthetic
aatccacaaccatttgttaa

SEQ ID NO: 23084 - DNA, 20 bp, Artificial sequence
  synthetic
ctatatctatttacaataac

SEQ ID NO: 23085 - DNA, 20 bp, Artificial sequence
  synthetic
atgactacacgagacagtga

SEQ ID NO: 23086 - DNA, 20 bp, Artificial sequence
  synthetic
ggtcagtttctctcctttgc

SEQ ID NO: 23087 - DNA, 20 bp, Artificial sequence
  synthetic
ctccatcctcttgcaaggac

SEQ ID NO: 23088 - DNA, 20 bp, Artificial sequence
  synthetic
catcagaaaaagaacgaaat

SEQ ID NO: 23089 - DNA, 20 bp, Artificial sequence
  synthetic
aatcctggccatcaagatga

SEQ ID NO: 23090 - DNA, 20 bp, Artificial sequence
  synthetic
agagatcactctgaaaagaa

SEQ ID NO: 23091 - DNA, 20 bp, Artificial sequence
  synthetic
tcaaaacgacagaatgccag

SEQ ID NO: 23092 - DNA, 20 bp, Artificial sequence
  synthetic
agcttgccagaaaagcttgc

SEQ ID NO: 23093 - DNA, 20 bp, Artificial sequence
  synthetic
tacgttacattaatgataca

SEQ ID NO: 23094 - DNA, 20 bp, Artificial sequence
  synthetic
gctaatgaagcaaattccaa

SEQ ID NO: 23095 - DNA, 20 bp, Artificial sequence
  synthetic
tcccctcaggctcctgcgaa

SEQ ID NO: 23096 - DNA, 20 bp, Artificial sequence
  synthetic
cgaagtgccagaaactctgg

SEQ ID NO: 23097 - DNA, 20 bp, Artificial sequence
  synthetic
accaaaccaggtccggacaa

SEQ ID NO: 23098 - DNA, 20 bp, Artificial sequence
  synthetic
ttaatctgtgggttgagaca

SEQ ID NO: 23099 - DNA, 20 bp, Artificial sequence
  synthetic
aaagttctgctgtcgttgtt

SEQ ID NO: 23100 - DNA, 20 bp, Artificial sequence
  synthetic
ctccttttagcaaagtacta

SEQ ID NO: 23101 - DNA, 20 bp, Artificial sequence
  synthetic
aactacgcaactgtaaactc

SEQ ID NO: 23102 - DNA, 20 bp, Artificial sequence
  synthetic
aacatgccacagttagaggg

SEQ ID NO: 23103 - DNA, 20 bp, Artificial sequence
  synthetic
gctcagctgtgatgggtgac

SEQ ID NO: 23104 - DNA, 20 bp, Artificial sequence
  synthetic
gacatatctttccttgcagg

SEQ ID NO: 23105 - DNA, 20 bp, Artificial sequence
  synthetic
tttggctgaaaccctacgaa

SEQ ID NO: 23106 - DNA, 20 bp, Artificial sequence
  synthetic
tgaccccttcacattactca

SEQ ID NO: 23107 - DNA, 20 bp, Artificial sequence
  synthetic
ttatttcagatagcaacaat

SEQ ID NO: 23108 - DNA, 20 bp, Artificial sequence
  synthetic
gcacaaacaacagtgatggt

SEQ ID NO: 23109 - DNA, 20 bp, Artificial sequence
  synthetic
gtgctggtgccttactattg

SEQ ID NO: 23110 - DNA, 20 bp, Artificial sequence
  synthetic
actcagcaagccaaataaca

SEQ ID NO: 23111 - DNA, 20 bp, Artificial sequence
  synthetic
gagaaaaaggtcaacgataa

SEQ ID NO: 23112 - DNA, 20 bp, Artificial sequence
  synthetic
agccaaggaagtggctctgt

SEQ ID NO: 23113 - DNA, 20 bp, Artificial sequence
  synthetic
gtttggaaaaggaggagttg

SEQ ID NO: 23114 - DNA, 20 bp, Artificial sequence
  synthetic
acatcttaagtgcaaagtcc

SEQ ID NO: 23115 - DNA, 20 bp, Artificial sequence
  synthetic
aagagatgtaaacaaggaaa

SEQ ID NO: 23116 - DNA, 20 bp, Artificial sequence
  synthetic
cattggcaagatgtttgagt

SEQ ID NO: 23117 - DNA, 20 bp, Artificial sequence
  synthetic
tagaatcctaattgggttct

SEQ ID NO: 23118 - DNA, 20 bp, Artificial sequence
  synthetic
aatagacggaccagacacct

SEQ ID NO: 23119 - DNA, 20 bp, Artificial sequence
  synthetic
agctgtgcatgctgacatgg

SEQ ID NO: 23120 - DNA, 20 bp, Artificial sequence
  synthetic
cctgaccttgtttgtggaag

SEQ ID NO: 23121 - DNA, 20 bp, Artificial sequence
  synthetic
ccacctagccatcatggcag

SEQ ID NO: 23122 - DNA, 20 bp, Artificial sequence
  synthetic
aaaagccgcactgtctgaag

SEQ ID NO: 23123 - DNA, 20 bp, Artificial sequence
  synthetic
tgtgaaatcagaacacacag

SEQ ID NO: 23124 - DNA, 20 bp, Artificial sequence
  synthetic
ggaaatgggagaggcagcag

SEQ ID NO: 23125 - DNA, 20 bp, Artificial sequence
  synthetic
caacctatctctagcagcca

SEQ ID NO: 23126 - DNA, 20 bp, Artificial sequence
  synthetic
aataataggcccaggattgc

SEQ ID NO: 23127 - DNA, 20 bp, Artificial sequence
  synthetic
tccaatggtgactcagttag

SEQ ID NO: 23128 - DNA, 20 bp, Artificial sequence
  synthetic
gtgcacaagggaagagttca

SEQ ID NO: 23129 - DNA, 20 bp, Artificial sequence
  synthetic
cgctcatcaccagtggatga

SEQ ID NO: 23130 - DNA, 20 bp, Artificial sequence
  synthetic
ttgtgccacggtttgagcaa

SEQ ID NO: 23131 - DNA, 20 bp, Artificial sequence
  synthetic
ttttccaattcaaattacct

SEQ ID NO: 23132 - DNA, 20 bp, Artificial sequence
  synthetic
aatggtcatacttacgtttg

SEQ ID NO: 23133 - DNA, 20 bp, Artificial sequence
  synthetic
agtgtggattgctttgttgc

SEQ ID NO: 23134 - DNA, 20 bp, Artificial sequence
  synthetic
attagtaccggttggtttga

SEQ ID NO: 23135 - DNA, 20 bp, Artificial sequence
  synthetic
tcagctgttgctgtcgtggg

SEQ ID NO: 23136 - DNA, 20 bp, Artificial sequence
  synthetic
tatagtaacgagtcttggtt

SEQ ID NO: 23137 - DNA, 20 bp, Artificial sequence
  synthetic
tttaaaacatatgcttttga

SEQ ID NO: 23138 - DNA, 20 bp, Artificial sequence
  synthetic
attgaagaagttgaactttt

SEQ ID NO: 23139 - DNA, 20 bp, Artificial sequence
  synthetic
atttttgacattgagacagt

SEQ ID NO: 23140 - DNA, 20 bp, Artificial sequence
  synthetic
attgttttgtttactgactc

SEQ ID NO: 23141 - DNA, 20 bp, Artificial sequence
  synthetic
gttgtgccatccgaaaagga

SEQ ID NO: 23142 - DNA, 20 bp, Artificial sequence
  synthetic
ccccattttatttcacaagg

SEQ ID NO: 23143 - DNA, 20 bp, Artificial sequence
  synthetic
attatagtcagtgtcgaaca

SEQ ID NO: 23144 - DNA, 20 bp, Artificial sequence
  synthetic
ttgtactcagtagttttgct

SEQ ID NO: 23145 - DNA, 20 bp, Artificial sequence
  synthetic
gttgtgtggaagcatataac

SEQ ID NO: 23146 - DNA, 20 bp, Artificial sequence
  synthetic
gtgcaacgttcattttatgt

SEQ ID NO: 23147 - DNA, 20 bp, Artificial sequence
  synthetic
tgttataacacagcgcttat

SEQ ID NO: 23148 - DNA, 20 bp, Artificial sequence
  synthetic
tgttatgcctatttagcaaa

SEQ ID NO: 23149 - DNA, 20 bp, Artificial sequence
  synthetic
ggtgcgtgtggttcccctgg

SEQ ID NO: 23150 - DNA, 20 bp, Artificial sequence
  synthetic
attattgtggctgctattca

SEQ ID NO: 23151 - DNA, 20 bp, Artificial sequence
  synthetic
tgtacacattggtgcactta

SEQ ID NO: 23152 - DNA, 20 bp, Artificial sequence
  synthetic
aattcaaaggagtgggcata

SEQ ID NO: 23153 - DNA, 20 bp, Artificial sequence
  synthetic
gcattcatgtatgcatatgt

SEQ ID NO: 23154 - DNA, 20 bp, Artificial sequence
  synthetic
agaggtgctgttttgggtta

SEQ ID NO: 23155 - DNA, 20 bp, Artificial sequence
  synthetic
atgttgactaatggttctgg

SEQ ID NO: 23156 - DNA, 20 bp, Artificial sequence
  synthetic
gtcaagacttcaaaactttt

SEQ ID NO: 23157 - DNA, 20 bp, Artificial sequence
  synthetic
atgatcctaaattgatggga

SEQ ID NO: 23158 - DNA, 20 bp, Artificial sequence
  synthetic
tttttgtggatgacatcact

SEQ ID NO: 23159 - DNA, 20 bp, Artificial sequence
  synthetic
tggagtctttttctgttaca

SEQ ID NO: 23160 - DNA, 20 bp, Artificial sequence
  synthetic
gcactaagtgcgcctatgat

SEQ ID NO: 23161 - DNA, 20 bp, Artificial sequence
  synthetic
atgttagtgatgcttatgca

SEQ ID NO: 23162 - DNA, 20 bp, Artificial sequence
  synthetic
ctataggacccgatgtcttt

SEQ ID NO: 23163 - DNA, 20 bp, Artificial sequence
  synthetic
ataggcgtcaacttgatgtt

SEQ ID NO: 23164 - DNA, 20 bp, Artificial sequence
  synthetic
ctggtagtcatagtttgttc

SEQ ID NO: 23165 - DNA, 20 bp, Artificial sequence
  synthetic
ctaatgaaaatgccataaac

SEQ ID NO: 23166 - DNA, 20 bp, Artificial sequence
  synthetic
gttcatttgttggtgctgat

SEQ ID NO: 23167 - DNA, 20 bp, Artificial sequence
  synthetic
attttgtttctgtattgaag

SEQ ID NO: 23168 - DNA, 20 bp, Artificial sequence
  synthetic
ctttttggactatgttttgc

SEQ ID NO: 23169 - DNA, 20 bp, Artificial sequence
  synthetic
tttgttttgcttgttgcata

SEQ ID NO: 23170 - DNA, 20 bp, Artificial sequence
  synthetic
tcgctacctgtttatcataa

SEQ ID NO: 23171 - DNA, 20 bp, Artificial sequence
  synthetic
tacgttgctgtttatgccaa

SEQ ID NO: 23172 - DNA, 20 bp, Artificial sequence
  synthetic
agcgccaggctggagtctgc

SEQ ID NO: 23173 - DNA, 20 bp, Artificial sequence
  synthetic
agcaaacttgttacttctgg

SEQ ID NO: 23174 - DNA, 20 bp, Artificial sequence
  synthetic
gatgctattacacaaacttc

SEQ ID NO: 23175 - DNA, 20 bp, Artificial sequence
  synthetic
aattattatagaatcacatc

SEQ ID NO: 23176 - DNA, 20 bp, Artificial sequence
  synthetic
ccacatttaccaatcatata

SEQ ID NO: 23177 - DNA, 20 bp, Artificial sequence
  synthetic
ggacactataaatactccag

SEQ ID NO: 23178 - DNA, 20 bp, Artificial sequence
  synthetic
atgtacttcgcaaacagttt

SEQ ID NO: 23179 - DNA, 20 bp, Artificial sequence
  synthetic
tgtgcccaaagaccatccac

SEQ ID NO: 23180 - DNA, 20 bp, Artificial sequence
  synthetic
acaggtagtgacggaaagct

SEQ ID NO: 23181 - DNA, 20 bp, Artificial sequence
  synthetic
aagccagataggatcaacaa

SEQ ID NO: 23182 - DNA, 20 bp, Artificial sequence
  synthetic
aataaaccaccagaatctag

SEQ ID NO: 23183 - DNA, 20 bp, Artificial sequence
  synthetic
ttgcatgggatctggccgga

SEQ ID NO: 23184 - DNA, 20 bp, Artificial sequence
  synthetic
ttacgagcgctgagggattt

SEQ ID NO: 23185 - DNA, 20 bp, Artificial sequence
  synthetic
acatgtgtgaaaggtgaacc

SEQ ID NO: 23186 - DNA, 20 bp, Artificial sequence
  synthetic
ggcgttgtaatcagcacaga

SEQ ID NO: 23187 - DNA, 20 bp, Artificial sequence
  synthetic
gtgacctacatagttctaac

SEQ ID NO: 23188 - DNA, 20 bp, Artificial sequence
  synthetic
caatctggtgaaggggttta

SEQ ID NO: 23189 - DNA, 20 bp, Artificial sequence
  synthetic
tctgagtatggagttaaaac

SEQ ID NO: 23190 - DNA, 20 bp, Artificial sequence
  synthetic
gacagtctgatgattacaca

SEQ ID NO: 23191 - DNA, 20 bp, Artificial sequence
  synthetic
gaggtgactgatagttacga

SEQ ID NO: 23192 - DNA, 20 bp, Artificial sequence
  synthetic
acggaggggaaggagacaga

SEQ ID NO: 23193 - DNA, 20 bp, Artificial sequence
  synthetic
gaaccggctttggccactct

SEQ ID NO: 23194 - DNA, 20 bp, Artificial sequence
  synthetic
gaaataaagccagtgataag

SEQ ID NO: 23195 - DNA, 20 bp, Artificial sequence
  synthetic
cccttgtttgaagagctcct

SEQ ID NO: 23196 - DNA, 20 bp, Artificial sequence
  synthetic
ctgaaaaaaggcagaaacat

SEQ ID NO: 23197 - DNA, 20 bp, Artificial sequence
  synthetic
atacaaaagtactatttcaa

SEQ ID NO: 23198 - DNA, 20 bp, Artificial sequence
  synthetic
accatagcatatgagaaagc

SEQ ID NO: 23199 - DNA, 20 bp, Artificial sequence
  synthetic
ctaactcagcaatggctaac

SEQ ID NO: 23200 - DNA, 20 bp, Artificial sequence
  synthetic
ggactaagttcagatcaagt

SEQ ID NO: 23201 - DNA, 20 bp, Artificial sequence
  synthetic
agacagtcagttaccttcaa

SEQ ID NO: 23202 - DNA, 20 bp, Artificial sequence
  synthetic
gatccagcaatcagcaacag

SEQ ID NO: 23203 - DNA, 20 bp, Artificial sequence
  synthetic
tacctcttacctcatttctt

SEQ ID NO: 23204 - DNA, 20 bp, Artificial sequence
  synthetic
gtctgatcctgcaaaagact

SEQ ID NO: 23205 - DNA, 20 bp, Artificial sequence
  synthetic
agcagtgaaggaagaaccac

SEQ ID NO: 23206 - DNA, 20 bp, Artificial sequence
  synthetic
aagcccggataaaactgaga

SEQ ID NO: 23207 - DNA, 20 bp, Artificial sequence
  synthetic
tgttcgaggatcacccccct

SEQ ID NO: 23208 - DNA, 20 bp, Artificial sequence
  synthetic
cttcccgcacgacactgatc

SEQ ID NO: 23209 - DNA, 20 bp, Artificial sequence
  synthetic
tctaacaacaatctcccaca

SEQ ID NO: 23210 - DNA, 20 bp, Artificial sequence
  synthetic
ctctgttccctcaaagttac

SEQ ID NO: 23211 - DNA, 20 bp, Artificial sequence
  synthetic
atcagcaaacggctgtttgc

SEQ ID NO: 23212 - DNA, 20 bp, Artificial sequence
  synthetic
tcaggcattcggtggaaatt

SEQ ID NO: 23213 - DNA, 20 bp, Artificial sequence
  synthetic
gatttggtgcatatcattgg

SEQ ID NO: 23214 - DNA, 20 bp, Artificial sequence
  synthetic
gaatcttatctgcattttca

SEQ ID NO: 23215 - DNA, 20 bp, Artificial sequence
  synthetic
tacagatcagaagattcggt

SEQ ID NO: 23216 - DNA, 20 bp, Artificial sequence
  synthetic
tcttgaatatgcccctataa

SEQ ID NO: 23217 - DNA, 20 bp, Artificial sequence
  synthetic
aagaagattggttgacgttt

SEQ ID NO: 23218 - DNA, 20 bp, Artificial sequence
  synthetic
gcgtgcatgtcaagtcatag

SEQ ID NO: 23219 - DNA, 20 bp, Artificial sequence
  synthetic
aatggctatatttgctgaac

SEQ ID NO: 23220 - DNA, 20 bp, Artificial sequence
  synthetic
aaagaaagagatctgtgcaa

SEQ ID NO: 23221 - DNA, 20 bp, Artificial sequence
  synthetic
aatgtcaagatgttgctttt

SEQ ID NO: 23222 - DNA, 20 bp, Artificial sequence
  synthetic
gagaatgattgatcacagta

SEQ ID NO: 23223 - DNA, 20 bp, Artificial sequence
  synthetic
attgagatctcacatgtgga

SEQ ID NO: 23224 - DNA, 20 bp, Artificial sequence
  synthetic
attggatcaggtagatagag

SEQ ID NO: 23225 - DNA, 20 bp, Artificial sequence
  synthetic
tgaggaacttcatgatgtcc

SEQ ID NO: 23226 - DNA, 20 bp, Artificial sequence
  synthetic
agtttcaggaaatgttgtta

SEQ ID NO: 23227 - DNA, 20 bp, Artificial sequence
  synthetic
tttagtggcacgtaattatg

SEQ ID NO: 23228 - DNA, 20 bp, Artificial sequence
  synthetic
aaatttgttagatcagctac

SEQ ID NO: 23229 - DNA, 20 bp, Artificial sequence
  synthetic
cacattgaaccatgtgaata

SEQ ID NO: 23230 - DNA, 20 bp, Artificial sequence
  synthetic
tggtatattgtcatttatag

SEQ ID NO: 23231 - DNA, 20 bp, Artificial sequence
  synthetic
aattctttacgggaagagtc

SEQ ID NO: 23232 - DNA, 20 bp, Artificial sequence
  synthetic
aaagccaaatcctgagttat

SEQ ID NO: 23233 - DNA, 20 bp, Artificial sequence
  synthetic
tgcattcagacggcgtttag

SEQ ID NO: 23234 - DNA, 20 bp, Artificial sequence
  synthetic
atacaagatcactccggaga

SEQ ID NO: 23235 - DNA, 20 bp, Artificial sequence
  synthetic
catgttcatcccagccagtg

SEQ ID NO: 23236 - DNA, 20 bp, Artificial sequence
  synthetic
gagcgccgagcgttcagcac

SEQ ID NO: 23237 - DNA, 20 bp, Artificial sequence
  synthetic
ccatggatgtttccccgttc

SEQ ID NO: 23238 - DNA, 20 bp, Artificial sequence
  synthetic
gaattctcagattttatcac

SEQ ID NO: 23239 - DNA, 20 bp, Artificial sequence
  synthetic
tactctcatcaactgtgtat

SEQ ID NO: 23240 - DNA, 20 bp, Artificial sequence
  synthetic
ggagtggtttgctatttagc

SEQ ID NO: 23241 - DNA, 20 bp, Artificial sequence
  synthetic
ctaattccaggaggtagtgt

SEQ ID NO: 23242 - DNA, 20 bp, Artificial sequence
  synthetic
tctgtgacatcttcagtata

SEQ ID NO: 23243 - DNA, 20 bp, Artificial sequence
  synthetic
aacaatgccattgatcccac

SEQ ID NO: 23244 - DNA, 20 bp, Artificial sequence
  synthetic
caaccaatagaaagtatcct

SEQ ID NO: 23245 - DNA, 20 bp, Artificial sequence
  synthetic
acggtcgcattgcaattcgt

SEQ ID NO: 23246 - DNA, 20 bp, Artificial sequence
  synthetic
gacacatctacaatgttgac

SEQ ID NO: 23247 - DNA, 20 bp, Artificial sequence
  synthetic
agcttgccttattatagtcc

SEQ ID NO: 23248 - DNA, 20 bp, Artificial sequence
  synthetic
tttggacctgccgaattggc

SEQ ID NO: 23249 - DNA, 20 bp, Artificial sequence
  synthetic
tttgagccccaacgccttgg

SEQ ID NO: 23250 - DNA, 20 bp, Artificial sequence
  synthetic
tgccaatcggagggcgacag

SEQ ID NO: 23251 - DNA, 20 bp, Artificial sequence
  synthetic
ctaggggctaaggatgtcct

SEQ ID NO: 23252 - DNA, 20 bp, Artificial sequence
  synthetic
gacaatggcaggcaacatgg

SEQ ID NO: 23253 - DNA, 20 bp, Artificial sequence
  synthetic
agtcaaaatggcttcttcat

SEQ ID NO: 23254 - DNA, 20 bp, Artificial sequence
  synthetic
caattctggtacaatcgtga

SEQ ID NO: 23255 - DNA, 20 bp, Artificial sequence
  synthetic
tctctacccacaccagtttc

SEQ ID NO: 23256 - DNA, 20 bp, Artificial sequence
  synthetic
aaccatgaccataaccccca

SEQ ID NO: 23257 - DNA, 20 bp, Artificial sequence
  synthetic
gtttactgactttttgcagg

SEQ ID NO: 23258 - DNA, 20 bp, Artificial sequence
  synthetic
tttggctctcaattacaccc

SEQ ID NO: 23259 - DNA, 20 bp, Artificial sequence
  synthetic
ttctagctttaaatttgtta

SEQ ID NO: 23260 - DNA, 20 bp, Artificial sequence
  synthetic
gaacgcccgccccttgacgc

SEQ ID NO: 23261 - DNA, 20 bp, Artificial sequence
  synthetic
cgaatccaacccagggccta

SEQ ID NO: 23262 - DNA, 20 bp, Artificial sequence
  synthetic
ggacggtgaaccagaagttc

SEQ ID NO: 23263 - DNA, 20 bp, Artificial sequence
  synthetic
agacgaacagtataagacag

SEQ ID NO: 23264 - DNA, 20 bp, Artificial sequence
  synthetic
tttttctcttgtgatttatt

SEQ ID NO: 23265 - DNA, 20 bp, Artificial sequence
  synthetic
agtggatgtgattgatcaat

SEQ ID NO: 23266 - DNA, 20 bp, Artificial sequence
  synthetic
tcacggtacttacattggat

SEQ ID NO: 23267 - DNA, 20 bp, Artificial sequence
  synthetic
caatggacccatttcagagt

SEQ ID NO: 23268 - DNA, 20 bp, Artificial sequence
  synthetic
caactacgaggaaggtgacc

SEQ ID NO: 23269 - DNA, 20 bp, Artificial sequence
  synthetic
aaggctcttccgcccgtttg

SEQ ID NO: 23270 - DNA, 20 bp, Artificial sequence
  synthetic
ccgttaccctaaaattccct

SEQ ID NO: 23271 - DNA, 20 bp, Artificial sequence
  synthetic
acattcctgatacccttaat

SEQ ID NO: 23272 - DNA, 20 bp, Artificial sequence
  synthetic
tggtgggagacattggcaag

SEQ ID NO: 23273 - DNA, 20 bp, Artificial sequence
  synthetic
caaggaaacagcagggagct

SEQ ID NO: 23274 - DNA, 20 bp, Artificial sequence
  synthetic
tcaacccccccataccgcaa

SEQ ID NO: 23275 - DNA, 20 bp, Artificial sequence
  synthetic
ccaaaacccgccaaaaacga

SEQ ID NO: 23276 - DNA, 20 bp, Artificial sequence
  synthetic
atctgcttctgcatgatgca

SEQ ID NO: 23277 - DNA, 20 bp, Artificial sequence
  synthetic
cctatgtaatccgttatcac

SEQ ID NO: 23278 - DNA, 20 bp, Artificial sequence
  synthetic
ttgaaaggctctctatctta

SEQ ID NO: 23279 - DNA, 20 bp, Artificial sequence
  synthetic
aagcccccttcacaataatg

SEQ ID NO: 23280 - DNA, 20 bp, Artificial sequence
  synthetic
agttatcacccctgaacttg

SEQ ID NO: 23281 - DNA, 20 bp, Artificial sequence
  synthetic
aaaagcccttgataaggatg

SEQ ID NO: 23282 - DNA, 20 bp, Artificial sequence
  synthetic
tcctatgcccaatccattta

SEQ ID NO: 23283 - DNA, 20 bp, Artificial sequence
  synthetic
gaggttaattaaatgtggtg

SEQ ID NO: 23284 - DNA, 20 bp, Artificial sequence
  synthetic
atcttgttgtgttagaagtg

SEQ ID NO: 23285 - DNA, 20 bp, Artificial sequence
  synthetic
actaggagtgtcatccacag

SEQ ID NO: 23286 - DNA, 20 bp, Artificial sequence
  synthetic
tagtggagagaatcctccac

SEQ ID NO: 23287 - DNA, 20 bp, Artificial sequence
  synthetic
agttgcattcataatacata

SEQ ID NO: 23288 - DNA, 20 bp, Artificial sequence
  synthetic
tactcttcacaatgacggat

SEQ ID NO: 23289 - DNA, 20 bp, Artificial sequence
  synthetic
ggaggaagaactaggtgtga

SEQ ID NO: 23290 - DNA, 20 bp, Artificial sequence
  synthetic
caagaactggacaaatgaca

SEQ ID NO: 23291 - DNA, 20 bp, Artificial sequence
  synthetic
ggcaaacaataaacgagaca

SEQ ID NO: 23292 - DNA, 20 bp, Artificial sequence
  synthetic
tacaagcccacagaaattgg

SEQ ID NO: 23293 - DNA, 20 bp, Artificial sequence
  synthetic
attaccaacccaagtccaga

SEQ ID NO: 23294 - DNA, 20 bp, Artificial sequence
  synthetic
catggtagattcgatccatg

SEQ ID NO: 23295 - DNA, 20 bp, Artificial sequence
  synthetic
ggatgtaaatccacatatga

SEQ ID NO: 23296 - DNA, 20 bp, Artificial sequence
  synthetic
cccattagctctaaatcgta

SEQ ID NO: 23297 - DNA, 20 bp, Artificial sequence
  synthetic
atctgccacaaatttcctag

SEQ ID NO: 23298 - DNA, 20 bp, Artificial sequence
  synthetic
cagacaagaagtaatatcaa

SEQ ID NO: 23299 - DNA, 20 bp, Artificial sequence
  synthetic
ttcatcaaacttaatcactc

SEQ ID NO: 23300 - DNA, 20 bp, Artificial sequence
  synthetic
aaggggttatcagttatgct

SEQ ID NO: 23301 - DNA, 20 bp, Artificial sequence
  synthetic
tgtaggaagtgggataaaaa

SEQ ID NO: 23302 - DNA, 20 bp, Artificial sequence
  synthetic
tggtgaggatgtatataata

SEQ ID NO: 23303 - DNA, 20 bp, Artificial sequence
  synthetic
ttcaaatgggtattgggatg

SEQ ID NO: 23304 - DNA, 20 bp, Artificial sequence
  synthetic
tgccatacgtatcccttatt

SEQ ID NO: 23305 - DNA, 20 bp, Artificial sequence
  synthetic
cttgtgtagtttggcagaga

SEQ ID NO: 23306 - DNA, 20 bp, Artificial sequence
  synthetic
agtattaagagatacaatct

SEQ ID NO: 23307 - DNA, 20 bp, Artificial sequence
  synthetic
ggatggaccatgggtgtgat

SEQ ID NO: 23308 - DNA, 20 bp, Artificial sequence
  synthetic
ctaccatcatttgcaaccaa

SEQ ID NO: 23309 - DNA, 20 bp, Artificial sequence
  synthetic
atggccagcaaagaattctg

SEQ ID NO: 23310 - DNA, 20 bp, Artificial sequence
  synthetic
agtattgtgggctgcgctaa

SEQ ID NO: 23311 - DNA, 20 bp, Artificial sequence
  synthetic
caaggaactctgatcactac

SEQ ID NO: 23312 - DNA, 20 bp, Artificial sequence
  synthetic
cataaaacaattgtcgttgg

SEQ ID NO: 23313 - DNA, 20 bp, Artificial sequence
  synthetic
ccagatgatccagagacatt

SEQ ID NO: 23314 - DNA, 20 bp, Artificial sequence
  synthetic
ccccttaaattcaccatgga

SEQ ID NO: 23315 - DNA, 20 bp, Artificial sequence
  synthetic
atgctgcttggccttatgtt

SEQ ID NO: 23316 - DNA, 20 bp, Artificial sequence
  synthetic
gtgggaatgatagcaacaga

SEQ ID NO: 23317 - DNA, 20 bp, Artificial sequence
  synthetic
agaattacagcagcctccat

SEQ ID NO: 23318 - DNA, 20 bp, Artificial sequence
  synthetic
atggcaaaagtccttagagg

SEQ ID NO: 23319 - DNA, 20 bp, Artificial sequence
  synthetic
ttgaagcctgttgagaaagg

SEQ ID NO: 23320 - DNA, 20 bp, Artificial sequence
  synthetic
aaagtggcttcagatggcaa

SEQ ID NO: 23321 - DNA, 20 bp, Artificial sequence
  synthetic
cttcttactgtgatgcaagc

SEQ ID NO: 23322 - DNA, 20 bp, Artificial sequence
  synthetic
aaactggacacattgaatgg

SEQ ID NO: 23323 - DNA, 20 bp, Artificial sequence
  synthetic
gaaccatgggcaatgcttga

SEQ ID NO: 23324 - DNA, 20 bp, Artificial sequence
  synthetic
catgcggtctccagaggaac

SEQ ID NO: 23325 - DNA, 20 bp, Artificial sequence
  synthetic
atcaaggctgagaaatcagg

SEQ ID NO: 23326 - DNA, 20 bp, Artificial sequence
  synthetic
ttcatccaaaaagtaagatc

SEQ ID NO: 23327 - DNA, 20 bp, Artificial sequence
  synthetic
gcaacttttgaggacttcgg

SEQ ID NO: 23328 - DNA, 20 bp, Artificial sequence
  synthetic
ggctgtctagccaaggcgta

SEQ ID NO: 23329 - DNA, 20 bp, Artificial sequence
  synthetic
cctctgcattcttgtaaata

SEQ ID NO: 23330 - DNA, 20 bp, Artificial sequence
  synthetic
tcctccggactctgctaaac

SEQ ID NO: 23331 - DNA, 20 bp, Artificial sequence
  synthetic
acaggctaaaacgatcgctg

SEQ ID NO: 23332 - DNA, 20 bp, Artificial sequence
  synthetic
gcttcagtgatagaggctgg

SEQ ID NO: 23333 - DNA, 20 bp, Artificial sequence
  synthetic
ctagtaactcttaccatctc

SEQ ID NO: 23334 - DNA, 20 bp, Artificial sequence
  synthetic
actggtttctggaagatcag

SEQ ID NO: 23335 - DNA, 20 bp, Artificial sequence
  synthetic
ccacccaaggaggggtaaca

SEQ ID NO: 23336 - DNA, 20 bp, Artificial sequence
  synthetic
gagttctctctgtgatgttg

SEQ ID NO: 23337 - DNA, 20 bp, Artificial sequence
  synthetic
ttttggattccttgggcttt

SEQ ID NO: 23338 - DNA, 20 bp, Artificial sequence
  synthetic
gagcagccatttgcaaaaat

SEQ ID NO: 23339 - DNA, 20 bp, Artificial sequence
  synthetic
acatctgtgggaggaaaatc

SEQ ID NO: 23340 - DNA, 20 bp, Artificial sequence
  synthetic
cacaaccaaagacacttgaa

SEQ ID NO: 23341 - DNA, 20 bp, Artificial sequence
  synthetic
agatggaaagtgctctcaaa

SEQ ID NO: 23342 - DNA, 20 bp, Artificial sequence
  synthetic
gttatgaatggataacagac

SEQ ID NO: 23343 - DNA, 20 bp, Artificial sequence
  synthetic
tactcaccactgacatttcg

SEQ ID NO: 23344 - DNA, 20 bp, Artificial sequence
  synthetic
cagtggttagtggattaaca

SEQ ID NO: 23345 - DNA, 20 bp, Artificial sequence
  synthetic
gccgcggcggctggagctac

SEQ ID NO: 23346 - DNA, 20 bp, Artificial sequence
  synthetic
ccaggttttggaatatggtg

SEQ ID NO: 23347 - DNA, 20 bp, Artificial sequence
  synthetic
tggtaaacgcatgtgatgaa

SEQ ID NO: 23348 - DNA, 20 bp, Artificial sequence
  synthetic
tggtcgtcccctgcaggagt

SEQ ID NO: 23349 - DNA, 20 bp, Artificial sequence
  synthetic
ccagaggacaagacatgtgt

SEQ ID NO: 23350 - DNA, 20 bp, Artificial sequence
  synthetic
gagcaacttgggccaaactc

SEQ ID NO: 23351 - DNA, 20 bp, Artificial sequence
  synthetic
gtaagaggaacaccaggacc

SEQ ID NO: 23352 - DNA, 20 bp, Artificial sequence
  synthetic
tgctctatggatttgggaac

SEQ ID NO: 23353 - DNA, 20 bp, Artificial sequence
  synthetic
tgtgtaagcgaggtttcagt

SEQ ID NO: 23354 - DNA, 20 bp, Artificial sequence
  synthetic
atgaaatctccaagtccaac

SEQ ID NO: 23355 - DNA, 20 bp, Artificial sequence
  synthetic
agtacacaggtgaaggagcc

SEQ ID NO: 23356 - DNA, 20 bp, Artificial sequence
  synthetic
agctgacttgtggggatgga

SEQ ID NO: 23357 - DNA, 20 bp, Artificial sequence
  synthetic
ggaagccatggggtattatg

SEQ ID NO: 23358 - DNA, 20 bp, Artificial sequence
  synthetic
tgggggctgctgtggccaag

SEQ ID NO: 23359 - DNA, 20 bp, Artificial sequence
  synthetic
tagaagtcaagaagttgagc

SEQ ID NO: 23360 - DNA, 20 bp, Artificial sequence
  synthetic
aaaccgaacctgaagtgctg

SEQ ID NO: 23361 - DNA, 20 bp, Artificial sequence
  synthetic
agatggagcaggcactcaga

SEQ ID NO: 23362 - DNA, 20 bp, Artificial sequence
  synthetic
cagacccctctagcattgcg

SEQ ID NO: 23363 - DNA, 20 bp, Artificial sequence
  synthetic
gacgtcaagctgagtacgtc

SEQ ID NO: 23364 - DNA, 20 bp, Artificial sequence
  synthetic
taactgctggctcagcggtt

SEQ ID NO: 23365 - DNA, 20 bp, Artificial sequence
  synthetic
ccgctgttgtcgctaatgaa

SEQ ID NO: 23366 - DNA, 20 bp, Artificial sequence
  synthetic
acgaaattgacagagccgaa

SEQ ID NO: 23367 - DNA, 20 bp, Artificial sequence
  synthetic
atcatgttgtcaagcttctg

SEQ ID NO: 23368 - DNA, 20 bp, Artificial sequence
  synthetic
ttggcaaagctctgacatgg

SEQ ID NO: 23369 - DNA, 20 bp, Artificial sequence
  synthetic
atgaattggttggacggtca

SEQ ID NO: 23370 - DNA, 20 bp, Artificial sequence
  synthetic
gagcgcagtgggcaaaacta

SEQ ID NO: 23371 - DNA, 20 bp, Artificial sequence
  synthetic
gtcaccaaatatagatttgg

SEQ ID NO: 23372 - DNA, 20 bp, Artificial sequence
  synthetic
tttgcgtcttgatatgctgt

SEQ ID NO: 23373 - DNA, 20 bp, Artificial sequence
  synthetic
aaggacttgcccagaaaagg

SEQ ID NO: 23374 - DNA, 20 bp, Artificial sequence
  synthetic
ggtagaaccactggcagtga

SEQ ID NO: 23375 - DNA, 20 bp, Artificial sequence
  synthetic
aggagcttacacggaatatg

SEQ ID NO: 23376 - DNA, 20 bp, Artificial sequence
  synthetic
ttcaacatagaaccctggat

SEQ ID NO: 23377 - DNA, 20 bp, Artificial sequence
  synthetic
aacttctccttcgcaggtac

SEQ ID NO: 23378 - DNA, 20 bp, Artificial sequence
  synthetic
ctggtacttagggcattgag

SEQ ID NO: 23379 - DNA, 20 bp, Artificial sequence
  synthetic
gcactggcaaggagtaaaag

SEQ ID NO: 23380 - DNA, 20 bp, Artificial sequence
  synthetic
aagatacactggcgggcctt

SEQ ID NO: 23381 - DNA, 20 bp, Artificial sequence
  synthetic
caactagtctgccccatagg

SEQ ID NO: 23382 - DNA, 20 bp, Artificial sequence
  synthetic
aacagggaaggtgttgaaat

SEQ ID NO: 23383 - DNA, 20 bp, Artificial sequence
  synthetic
atctgtctataccactgctt

SEQ ID NO: 23384 - DNA, 20 bp, Artificial sequence
  synthetic
cccatgctcatccctttagt

SEQ ID NO: 23385 - DNA, 20 bp, Artificial sequence
  synthetic
gcagcagtgttccttataag

SEQ ID NO: 23386 - DNA, 20 bp, Artificial sequence
  synthetic
ctagcggactttgaagagag

SEQ ID NO: 23387 - DNA, 20 bp, Artificial sequence
  synthetic
gacttttgggcagagtcaag

SEQ ID NO: 23388 - DNA, 20 bp, Artificial sequence
  synthetic
aagaagatcacaagtcatga

SEQ ID NO: 23389 - DNA, 20 bp, Artificial sequence
  synthetic
aaggtagggaagaatgaagg

SEQ ID NO: 23390 - DNA, 20 bp, Artificial sequence
  synthetic
tcctatggatacttctgcca

SEQ ID NO: 23391 - DNA, 20 bp, Artificial sequence
  synthetic
gtcgagacagcaaagaaatt

SEQ ID NO: 23392 - DNA, 20 bp, Artificial sequence
  synthetic
taccattatgatctgctaca

SEQ ID NO: 23393 - DNA, 20 bp, Artificial sequence
  synthetic
tacatctatgccacggaaga

SEQ ID NO: 23394 - DNA, 20 bp, Artificial sequence
  synthetic
gcactatccaaaagacacat

SEQ ID NO: 23395 - DNA, 20 bp, Artificial sequence
  synthetic
actataaaaccgtgtttagg

SEQ ID NO: 23396 - DNA, 20 bp, Artificial sequence
  synthetic
gctacggatgacacaaagat

SEQ ID NO: 23397 - DNA, 20 bp, Artificial sequence
  synthetic
gttgtgagggcccaaacaga

SEQ ID NO: 23398 - DNA, 20 bp, Artificial sequence
  synthetic
gtgaagaaagaatgggatca

SEQ ID NO: 23399 - DNA, 20 bp, Artificial sequence
  synthetic
cccgtaagatgggctgacca

SEQ ID NO: 23400 - DNA, 20 bp, Artificial sequence
  synthetic
ctaagtatcactaagagacc

SEQ ID NO: 23401 - DNA, 20 bp, Artificial sequence
  synthetic
actttatgtaaatgcaaggc

SEQ ID NO: 23402 - DNA, 20 bp, Artificial sequence
  synthetic
caagtagagtagttagagtt

SEQ ID NO: 23403 - DNA, 20 bp, Artificial sequence
  synthetic
tgagatgctacgtggacgag

SEQ ID NO: 23404 - DNA, 20 bp, Artificial sequence
  synthetic
cctggctagggaagcaattg

SEQ ID NO: 23405 - DNA, 20 bp, Artificial sequence
  synthetic
tactaagggccataagggac

SEQ ID NO: 23406 - DNA, 20 bp, Artificial sequence
  synthetic
ggacgtgcatgagaggtgaa

SEQ ID NO: 23407 - DNA, 20 bp, Artificial sequence
  synthetic
gtggagtcgtgatcagcaaa

SEQ ID NO: 23408 - DNA, 20 bp, Artificial sequence
  synthetic
tggttgtctacatgatcctg

SEQ ID NO: 23409 - DNA, 20 bp, Artificial sequence
  synthetic
tctttcatgctatgaccaac

SEQ ID NO: 23410 - DNA, 20 bp, Artificial sequence
  synthetic
ccacataccctttgataata

SEQ ID NO: 23411 - DNA, 20 bp, Artificial sequence
  synthetic
aagccgtatatctgttcccc

SEQ ID NO: 23412 - DNA, 20 bp, Artificial sequence
  synthetic
atgaggaagaggtctatggg

SEQ ID NO: 23413 - DNA, 20 bp, Artificial sequence
  synthetic
gagtgaaaacggactcaggt

SEQ ID NO: 23414 - DNA, 20 bp, Artificial sequence
  synthetic
gaggggagtttaagcagatc

SEQ ID NO: 23415 - DNA, 20 bp, Artificial sequence
  synthetic
taggaaaaattcacaggttt

SEQ ID NO: 23416 - DNA, 20 bp, Artificial sequence
  synthetic
tgatcacgcaactagaaatc

SEQ ID NO: 23417 - DNA, 20 bp, Artificial sequence
  synthetic
acagctatgacagctattcg

SEQ ID NO: 23418 - DNA, 20 bp, Artificial sequence
  synthetic
aagaaactgagctaaaagaa

SEQ ID NO: 23419 - DNA, 20 bp, Artificial sequence
  synthetic
ctgcaaccgacttagttgta

SEQ ID NO: 23420 - DNA, 20 bp, Artificial sequence
  synthetic
ttgcttgtctgccctacgct

SEQ ID NO: 23421 - DNA, 20 bp, Artificial sequence
  synthetic
gagtcgtcaccaggtgcaga

SEQ ID NO: 23422 - DNA, 20 bp, Artificial sequence
  synthetic
gggatgaacccaaccacaaa

SEQ ID NO: 23423 - DNA, 20 bp, Artificial sequence
  synthetic
tcccggaacgaactgtaaca

SEQ ID NO: 23424 - DNA, 20 bp, Artificial sequence
  synthetic
ccaaaaatatgaccaccggg

SEQ ID NO: 23425 - DNA, 20 bp, Artificial sequence
  synthetic
tggtgataggttccaataag

SEQ ID NO: 23426 - DNA, 20 bp, Artificial sequence
  synthetic
aagaacttctgctacagtgc

SEQ ID NO: 23427 - DNA, 20 bp, Artificial sequence
  synthetic
agcttatagaagagtacaac

SEQ ID NO: 23428 - DNA, 20 bp, Artificial sequence
  synthetic
gaagacctatcaagtattac

SEQ ID NO: 23429 - DNA, 20 bp, Artificial sequence
  synthetic
caggaaaggtctacttgcaa

SEQ ID NO: 23430 - DNA, 20 bp, Artificial sequence
  synthetic
tcgtgctgtcgcgcatgctg

SEQ ID NO: 23431 - DNA, 20 bp, Artificial sequence
  synthetic
acatgggagagtggtgtgaa

SEQ ID NO: 23432 - DNA, 20 bp, Artificial sequence
  synthetic
tcctcttggcgttgagtcta

SEQ ID NO: 23433 - DNA, 20 bp, Artificial sequence
  synthetic
acatttttcaggaaagcccg

SEQ ID NO: 23434 - DNA, 20 bp, Artificial sequence
  synthetic
ttggattcatccctaagatg

SEQ ID NO: 23435 - DNA, 20 bp, Artificial sequence
  synthetic
gctgtggagaagggcttgtt

SEQ ID NO: 23436 - DNA, 20 bp, Artificial sequence
  synthetic
ctccggaactcaacttggtg

SEQ ID NO: 23437 - DNA, 20 bp, Artificial sequence
  synthetic
ccgtgaagaatggaaaagcc

SEQ ID NO: 23438 - DNA, 20 bp, Artificial sequence
  synthetic
tccacttggaattgggacca

SEQ ID NO: 23439 - DNA, 20 bp, Artificial sequence
  synthetic
gtgaggtaagcttgaaggtc

SEQ ID NO: 23440 - DNA, 20 bp, Artificial sequence
  synthetic
aatgccagccaggaaagctg

SEQ ID NO: 23441 - DNA, 20 bp, Artificial sequence
  synthetic
aggtggccataatggatgag

SEQ ID NO: 23442 - DNA, 20 bp, Artificial sequence
  synthetic
aacccattcccgaaggagag

SEQ ID NO: 23443 - DNA, 20 bp, Artificial sequence
  synthetic
aacgcagagggcgagttgga

SEQ ID NO: 23444 - DNA, 20 bp, Artificial sequence
  synthetic
atggtccaggcggcgaactg

SEQ ID NO: 23445 - DNA, 20 bp, Artificial sequence
  synthetic
gagaggataaccgactggcc

SEQ ID NO: 23446 - DNA, 20 bp, Artificial sequence
  synthetic
ctgcccgatcctggggaact

SEQ ID NO: 23447 - DNA, 20 bp, Artificial sequence
  synthetic
tggcactcggtgtgacctct

SEQ ID NO: 23448 - DNA, 20 bp, Artificial sequence
  synthetic
agatcatcaaccccattccg

SEQ ID NO: 23449 - DNA, 20 bp, Artificial sequence
  synthetic
actcatgcaccaaagaagaa

SEQ ID NO: 23450 - DNA, 20 bp, Artificial sequence
  synthetic
ggagagaccagaggggatca

SEQ ID NO: 23451 - DNA, 20 bp, Artificial sequence
  synthetic
gagaccttcgcacccttggt

SEQ ID NO: 23452 - DNA, 20 bp, Artificial sequence
  synthetic
cccccgagcataactcggga

SEQ ID NO: 23453 - DNA, 20 bp, Artificial sequence
  synthetic
gggatttttccgcctcctat

SEQ ID NO: 23454 - DNA, 20 bp, Artificial sequence
  synthetic
ttgcgggtccaaatgccaaa

SEQ ID NO: 23455 - DNA, 20 bp, Artificial sequence
  synthetic
gtaggcctgcaccgccgagg

SEQ ID NO: 23456 - DNA, 20 bp, Artificial sequence
  synthetic
ggcacttgtgtcattcttgc

SEQ ID NO: 23457 - DNA, 20 bp, Artificial sequence
  synthetic
tccaggcgctccgtgctgat

SEQ ID NO: 23458 - DNA, 20 bp, Artificial sequence
  synthetic
gacctgaaccatcagtggtt

SEQ ID NO: 23459 - DNA, 20 bp, Artificial sequence
  synthetic
gacacagagcgaatggagct

SEQ ID NO: 23460 - DNA, 20 bp, Artificial sequence
  synthetic
atggccatgtggagaagctc

SEQ ID NO: 23461 - DNA, 20 bp, Artificial sequence
  synthetic
gcgtcggtgagaagcactac

SEQ ID NO: 23462 - DNA, 20 bp, Artificial sequence
  synthetic
gtagcagtcggtctggtgtt

SEQ ID NO: 23463 - DNA, 20 bp, Artificial sequence
  synthetic
ggcattccagtgaagggtct

SEQ ID NO: 23464 - DNA, 20 bp, Artificial sequence
  synthetic
accatttcggagatgcttgg

SEQ ID NO: 23465 - DNA, 20 bp, Artificial sequence
  synthetic
gtgctacacaccatgtggca

SEQ ID NO: 23466 - DNA, 20 bp, Artificial sequence
  synthetic
gtcagcagcatagcacaggg

SEQ ID NO: 23467 - DNA, 20 bp, Artificial sequence
  synthetic
gggagacaaaactgggaggt

SEQ ID NO: 23468 - DNA, 20 bp, Artificial sequence
  synthetic
atagccagtgaggagagaca

SEQ ID NO: 23469 - DNA, 20 bp, Artificial sequence
  synthetic
tttgacaaggagtactcaag

SEQ ID NO: 23470 - DNA, 20 bp, Artificial sequence
  synthetic
accgcgtctgctgcacagcg

SEQ ID NO: 23471 - DNA, 20 bp, Artificial sequence
  synthetic
ctgggagttgtctggtgttt

SEQ ID NO: 23472 - DNA, 20 bp, Artificial sequence
  synthetic
aatttggacatccagccggc

SEQ ID NO: 23473 - DNA, 20 bp, Artificial sequence
  synthetic
atgcagttgctgagacctga

SEQ ID NO: 23474 - DNA, 20 bp, Artificial sequence
  synthetic
gcaggcatggatgtgttctc

SEQ ID NO: 23475 - DNA, 20 bp, Artificial sequence
  synthetic
gctccttatcgtcccgaggt

SEQ ID NO: 23476 - DNA, 20 bp, Artificial sequence
  synthetic
agctacttccacaggaggga

SEQ ID NO: 23477 - DNA, 20 bp, Artificial sequence
  synthetic
caacacacaagaaaaatggt

SEQ ID NO: 23478 - DNA, 20 bp, Artificial sequence
  synthetic
caggccacgaagggtatttg

SEQ ID NO: 23479 - DNA, 20 bp, Artificial sequence
  synthetic
acccctgtaagtagttgatc

SEQ ID NO: 23480 - DNA, 20 bp, Artificial sequence
  synthetic
gaaaagttttgaaacttttc

SEQ ID NO: 23481 - DNA, 20 bp, Artificial sequence
  synthetic
ccgcagagaacttgcaatcg

SEQ ID NO: 23482 - DNA, 20 bp, Artificial sequence
  synthetic
taacaatagaaccatcggaa

SEQ ID NO: 23483 - DNA, 20 bp, Artificial sequence
  synthetic
agcaaagtgtttttaacgcc

SEQ ID NO: 23484 - DNA, 20 bp, Artificial sequence
  synthetic
ttgaaacagcgtgtgaagga

SEQ ID NO: 23485 - DNA, 20 bp, Artificial sequence
  synthetic
gtatttttgtaaatatagct

SEQ ID NO: 23486 - DNA, 20 bp, Artificial sequence
  synthetic
atagtccattagtaagtaag

SEQ ID NO: 23487 - DNA, 20 bp, Artificial sequence
  synthetic
cctccccaactaccatttgg

SEQ ID NO: 23488 - DNA, 20 bp, Artificial sequence
  synthetic
tcaatgaagggtgggtaggc

SEQ ID NO: 23489 - DNA, 20 bp, Artificial sequence
  synthetic
caaccctaagtgtaatagcg

SEQ ID NO: 23490 - DNA, 20 bp, Artificial sequence
  synthetic
tgcgtataactctggtatca

SEQ ID NO: 23491 - DNA, 20 bp, Artificial sequence
  synthetic
ttgaatcggatttgaaaaat

SEQ ID NO: 23492 - DNA, 20 bp, Artificial sequence
  synthetic
gcttcccaagtggaagagtt

SEQ ID NO: 23493 - DNA, 20 bp, Artificial sequence
  synthetic
tcggatcgactgaagaagat

SEQ ID NO: 23494 - DNA, 20 bp, Artificial sequence
  synthetic
aggataaagatgcgactgtg

SEQ ID NO: 23495 - DNA, 20 bp, Artificial sequence
  synthetic
agaagtaagaaaattcctag

SEQ ID NO: 23496 - DNA, 20 bp, Artificial sequence
  synthetic
acgaatctcaaacctagttt

SEQ ID NO: 23497 - DNA, 20 bp, Artificial sequence
  synthetic
tatgacaagttagatggttt

SEQ ID NO: 23498 - DNA, 20 bp, Artificial sequence
  synthetic
ccgcatgttcaactcgacat

SEQ ID NO: 23499 - DNA, 20 bp, Artificial sequence
  synthetic
cagaaaggttctgatatctt

SEQ ID NO: 23500 - DNA, 20 bp, Artificial sequence
  synthetic
ggtaatgttgatggtgtaga

SEQ ID NO: 23501 - DNA, 20 bp, Artificial sequence
  synthetic
gatactctgtggtcaactgc

SEQ ID NO: 23502 - DNA, 20 bp, Artificial sequence
  synthetic
agacctgaaatcaaccctct

SEQ ID NO: 23503 - DNA, 20 bp, Artificial sequence
  synthetic
gagtgccctaacagcaccgg

SEQ ID NO: 23504 - DNA, 20 bp, Artificial sequence
  synthetic
gcgtaattcactcactaccg

SEQ ID NO: 23505 - DNA, 20 bp, Artificial sequence
  synthetic
tgagttcgcaagaatctctt

SEQ ID NO: 23506 - DNA, 20 bp, Artificial sequence
  synthetic
caaaagtacactatcttatc

SEQ ID NO: 23507 - DNA, 20 bp, Artificial sequence
  synthetic
atctgcatgggagtattcac

SEQ ID NO: 23508 - DNA, 20 bp, Artificial sequence
  synthetic
agctcataaaacaagagctt

SEQ ID NO: 23509 - DNA, 20 bp, Artificial sequence
  synthetic
tgcttatttaaaaagaagtt

SEQ ID NO: 23510 - DNA, 20 bp, Artificial sequence
  synthetic
ctggttttacatcttttagt

SEQ ID NO: 23511 - DNA, 20 bp, Artificial sequence
  synthetic
atgaatacgtctatcgtgta

SEQ ID NO: 23512 - DNA, 20 bp, Artificial sequence
  synthetic
ttcttgattcttcctgaggg

SEQ ID NO: 23513 - DNA, 20 bp, Artificial sequence
  synthetic
ttaagattcttgacctcaca

SEQ ID NO: 23514 - DNA, 20 bp, Artificial sequence
  synthetic
cacaaagtggccctgttatg

SEQ ID NO: 23515 - DNA, 20 bp, Artificial sequence
  synthetic
ttacaatgagctttatgaga

SEQ ID NO: 23516 - DNA, 20 bp, Artificial sequence
  synthetic
caaaacacatggaaaatgct

SEQ ID NO: 23517 - DNA, 20 bp, Artificial sequence
  synthetic
attttggtgatgctaaaata

SEQ ID NO: 23518 - DNA, 20 bp, Artificial sequence
  synthetic
attgttatactttcgtggaa

SEQ ID NO: 23519 - DNA, 20 bp, Artificial sequence
  synthetic
ggatacctggagaagactat

SEQ ID NO: 23520 - DNA, 20 bp, Artificial sequence
  synthetic
cgagacaagggaagatattg

SEQ ID NO: 23521 - DNA, 20 bp, Artificial sequence
  synthetic
tagaccatatttccgtgggg

SEQ ID NO: 23522 - DNA, 20 bp, Artificial sequence
  synthetic
acattgtaactaatgtattc

SEQ ID NO: 23523 - DNA, 20 bp, Artificial sequence
  synthetic
tttcaggttatgagtagttt

SEQ ID NO: 23524 - DNA, 20 bp, Artificial sequence
  synthetic
ccttatgcattccatggaca

SEQ ID NO: 23525 - DNA, 20 bp, Artificial sequence
  synthetic
catttacctttcctcaaatc

SEQ ID NO: 23526 - DNA, 20 bp, Artificial sequence
  synthetic
aagggagtcgcagagttcca

SEQ ID NO: 23527 - DNA, 20 bp, Artificial sequence
  synthetic
tccatctttatcggtacgcc

SEQ ID NO: 23528 - DNA, 20 bp, Artificial sequence
  synthetic
tgagctcctttagagggagg

SEQ ID NO: 23529 - DNA, 20 bp, Artificial sequence
  synthetic
caaccaacaacatcaactcc

SEQ ID NO: 23530 - DNA, 20 bp, Artificial sequence
  synthetic
tggaaaactctctaccgaca

SEQ ID NO: 23531 - DNA, 20 bp, Artificial sequence
  synthetic
ttatggcaggaaaatctctg

SEQ ID NO: 23532 - DNA, 20 bp, Artificial sequence
  synthetic
aagttggcaaagaacttgaa

SEQ ID NO: 23533 - DNA, 20 bp, Artificial sequence
  synthetic
gtcgtgcatatcagtggcta

SEQ ID NO: 23534 - DNA, 20 bp, Artificial sequence
  synthetic
atatcaaagataccatgagt

SEQ ID NO: 23535 - DNA, 20 bp, Artificial sequence
  synthetic
ttatttacgaaatgctaaac

SEQ ID NO: 23536 - DNA, 20 bp, Artificial sequence
  synthetic
aattgtatacagccaatttc

SEQ ID NO: 23537 - DNA, 20 bp, Artificial sequence
  synthetic
aagcagagagaacgcaagag

SEQ ID NO: 23538 - DNA, 20 bp, Artificial sequence
  synthetic
ctgcagtgacgaccacagtt

SEQ ID NO: 23539 - DNA, 20 bp, Artificial sequence
  synthetic
cacttcagtaggggctgtac

SEQ ID NO: 23540 - DNA, 20 bp, Artificial sequence
  synthetic
agcggattacccctagtggt

SEQ ID NO: 23541 - DNA, 20 bp, Artificial sequence
  synthetic
catgggggcagtctcgttat

SEQ ID NO: 23542 - DNA, 20 bp, Artificial sequence
  synthetic
tactcgacttggattttcag

SEQ ID NO: 23543 - DNA, 20 bp, Artificial sequence
  synthetic
tctcacctgttaattgggtt

SEQ ID NO: 23544 - DNA, 20 bp, Artificial sequence
  synthetic
aaggcgcctacacacaggat

SEQ ID NO: 23545 - DNA, 20 bp, Artificial sequence
  synthetic
ccggacttggttctctcttc

SEQ ID NO: 23546 - DNA, 20 bp, Artificial sequence
  synthetic
caggccctgacattgagttg

SEQ ID NO: 23547 - DNA, 20 bp, Artificial sequence
  synthetic
ctcttctttcattgcttgct

SEQ ID NO: 23548 - DNA, 20 bp, Artificial sequence
  synthetic
agattttggtgcggcttttg

SEQ ID NO: 23549 - DNA, 20 bp, Artificial sequence
  synthetic
tctggaaaattgctgagaat

SEQ ID NO: 23550 - DNA, 20 bp, Artificial sequence
  synthetic
tgaaacaaatcacggcagtt

SEQ ID NO: 23551 - DNA, 20 bp, Artificial sequence
  synthetic
agctctcattagtgaaaacc

SEQ ID NO: 23552 - DNA, 20 bp, Artificial sequence
  synthetic
tgcatggcacattcaaggtt

SEQ ID NO: 23553 - DNA, 20 bp, Artificial sequence
  synthetic
atcccagtcccttgaatggt

SEQ ID NO: 23554 - DNA, 20 bp, Artificial sequence
  synthetic
aaccgcaagcaattgcctgt

SEQ ID NO: 23555 - DNA, 20 bp, Artificial sequence
  synthetic
tgctcgtaatgagagcacat

SEQ ID NO: 23556 - DNA, 20 bp, Artificial sequence
  synthetic
ctactgctgtgaagaatgtc

SEQ ID NO: 23557 - DNA, 20 bp, Artificial sequence
  synthetic
tgcgagcagactctactagc

SEQ ID NO: 23558 - DNA, 20 bp, Artificial sequence
  synthetic
tatgactttgagtcattggg

SEQ ID NO: 23559 - DNA, 20 bp, Artificial sequence
  synthetic
cctcattcacaatcacacgg

SEQ ID NO: 23560 - DNA, 20 bp, Artificial sequence
  synthetic
gctgcgccaaaaacgcgcga

SEQ ID NO: 23561 - DNA, 20 bp, Artificial sequence
  synthetic
tcccctgtggacatgcatgt

SEQ ID NO: 23562 - DNA, 20 bp, Artificial sequence
  synthetic
ttcttctccgacttggagtt

SEQ ID NO: 23563 - DNA, 20 bp, Artificial sequence
  synthetic
tctatattgctgacatctga

SEQ ID NO: 23564 - DNA, 20 bp, Artificial sequence
  synthetic
tttaaacttgcaacactggc

SEQ ID NO: 23565 - DNA, 20 bp, Artificial sequence
  synthetic
aaaggcctcttttccctgct

SEQ ID NO: 23566 - DNA, 20 bp, Artificial sequence
  synthetic
tcccctgttgttatttgtac

SEQ ID NO: 23567 - DNA, 20 bp, Artificial sequence
  synthetic
tcgtggtctgacttgtttaa

SEQ ID NO: 23568 - DNA, 20 bp, Artificial sequence
  synthetic
cctgcccgcatcattggcat

SEQ ID NO: 23569 - DNA, 20 bp, Artificial sequence
  synthetic
cgggtctttgcccgtattgg

SEQ ID NO: 23570 - DNA, 20 bp, Artificial sequence
  synthetic
tttgtggcaaagtttcatga

SEQ ID NO: 23571 - DNA, 20 bp, Artificial sequence
  synthetic
attcttgcagctatgatgaa

SEQ ID NO: 23572 - DNA, 20 bp, Artificial sequence
  synthetic
gaaccagaacagtatgagcg

SEQ ID NO: 23573 - DNA, 20 bp, Artificial sequence
  synthetic
ttacgtttcagcttgcacag

SEQ ID NO: 23574 - DNA, 20 bp, Artificial sequence
  synthetic
ctgatttcctgcaagtagct

SEQ ID NO: 23575 - DNA, 20 bp, Artificial sequence
  synthetic
ttcagtacacccagtataga

SEQ ID NO: 23576 - DNA, 20 bp, Artificial sequence
  synthetic
acataacagcagaatttgtg

SEQ ID NO: 23577 - DNA, 20 bp, Artificial sequence
  synthetic
gggatgttgaacttaacccc

SEQ ID NO: 23578 - DNA, 20 bp, Artificial sequence
  synthetic
agtccgaagatggagaaccg

SEQ ID NO: 23579 - DNA, 20 bp, Artificial sequence
  synthetic
aggggatttcctccactctc

SEQ ID NO: 23580 - DNA, 20 bp, Artificial sequence
  synthetic
ttagcgcagatgatcagtat

SEQ ID NO: 23581 - DNA, 20 bp, Artificial sequence
  synthetic
cttttcattttaaggaaact

SEQ ID NO: 23582 - DNA, 20 bp, Artificial sequence
  synthetic
tggaggcagtggatgtaatt

SEQ ID NO: 23583 - DNA, 20 bp, Artificial sequence
  synthetic
gcgacgtggaaccagccgtc

SEQ ID NO: 23584 - DNA, 20 bp, Artificial sequence
  synthetic
gtactgacaatggaatcatt

SEQ ID NO: 23585 - DNA, 20 bp, Artificial sequence
  synthetic
ctaacaatggattaggcatt

SEQ ID NO: 23586 - DNA, 20 bp, Artificial sequence
  synthetic
gcggctggccgtctgtactt

SEQ ID NO: 23587 - DNA, 20 bp, Artificial sequence
  synthetic
caacactggagtgatcaatt

SEQ ID NO: 23588 - DNA, 20 bp, Artificial sequence
  synthetic
gtttgtgacccttagggccc

SEQ ID NO: 23589 - DNA, 20 bp, Artificial sequence
  synthetic
cacttttgatgatacagata

SEQ ID NO: 23590 - DNA, 20 bp, Artificial sequence
  synthetic
ccactgtccctgggctattg

SEQ ID NO: 23591 - DNA, 20 bp, Artificial sequence
  synthetic
taacgcaccaatgccaacca

SEQ ID NO: 23592 - DNA, 20 bp, Artificial sequence
  synthetic
aaacatggattctccacttc

SEQ ID NO: 23593 - DNA, 20 bp, Artificial sequence
  synthetic
tgacccgcaatacttgcggt

SEQ ID NO: 23594 - DNA, 20 bp, Artificial sequence
  synthetic
ccctgatgaactgaaccctt

SEQ ID NO: 23595 - DNA, 20 bp, Artificial sequence
  synthetic
catgtttcctgaatttgacc

SEQ ID NO: 23596 - DNA, 20 bp, Artificial sequence
  synthetic
agccaatatggaaatggaaa

SEQ ID NO: 23597 - DNA, 20 bp, Artificial sequence
  synthetic
cagttatatctggtctggtg

SEQ ID NO: 23598 - DNA, 20 bp, Artificial sequence
  synthetic
agatggtgccataggtgcag

SEQ ID NO: 23599 - DNA, 20 bp, Artificial sequence
  synthetic
aggatcagctgttggagtta

SEQ ID NO: 23600 - DNA, 20 bp, Artificial sequence
  synthetic
ttcctatattgattctctct

SEQ ID NO: 23601 - DNA, 20 bp, Artificial sequence
  synthetic
tagtctcgtgcgaccagtca

SEQ ID NO: 23602 - DNA, 20 bp, Artificial sequence
  synthetic
gctggatatgaaatccccag

SEQ ID NO: 23603 - DNA, 20 bp, Artificial sequence
  synthetic
ctgatagggtcgcggctggc

SEQ ID NO: 23604 - DNA, 20 bp, Artificial sequence
  synthetic
ctcagacatgattatgaaag

SEQ ID NO: 23605 - DNA, 20 bp, Artificial sequence
  synthetic
taattcttgcataacaacac

SEQ ID NO: 23606 - DNA, 20 bp, Artificial sequence
  synthetic
tgcatataccccacctggtg

SEQ ID NO: 23607 - DNA, 20 bp, Artificial sequence
  synthetic
atgggtaactgtattccagc

SEQ ID NO: 23608 - DNA, 20 bp, Artificial sequence
  synthetic
agcctcatttagaataccat

SEQ ID NO: 23609 - DNA, 20 bp, Artificial sequence
  synthetic
gaccaaatgggctaactatt

SEQ ID NO: 23610 - DNA, 20 bp, Artificial sequence
  synthetic
ctttactacttacttaaagg

SEQ ID NO: 23611 - DNA, 20 bp, Artificial sequence
  synthetic
accgttaaccgcccacctac

SEQ ID NO: 23612 - DNA, 20 bp, Artificial sequence
  synthetic
tctttaatcaatcttatggt

SEQ ID NO: 23613 - DNA, 20 bp, Artificial sequence
  synthetic
taatatcaattattatagag

SEQ ID NO: 23614 - DNA, 20 bp, Artificial sequence
  synthetic
ggtgtctaatgctgataggg

SEQ ID NO: 23615 - DNA, 20 bp, Artificial sequence
  synthetic
ccaagggctgccagtactca

SEQ ID NO: 23616 - DNA, 20 bp, Artificial sequence
  synthetic
gatttcgcaagacggatttc

SEQ ID NO: 23617 - DNA, 20 bp, Artificial sequence
  synthetic
gaacataaagactgttacca

SEQ ID NO: 23618 - DNA, 20 bp, Artificial sequence
  synthetic
ccgagattattgcagacgaa

SEQ ID NO: 23619 - DNA, 20 bp, Artificial sequence
  synthetic
tagggttcttggcatacatg

SEQ ID NO: 23620 - DNA, 20 bp, Artificial sequence
  synthetic
gatgatagcatatggtgatg

SEQ ID NO: 23621 - DNA, 20 bp, Artificial sequence
  synthetic
agatgagagatttcctttcc

SEQ ID NO: 23622 - DNA, 20 bp, Artificial sequence
  synthetic
cacagaaccatcctaaccat

SEQ ID NO: 23623 - DNA, 20 bp, Artificial sequence
  synthetic
gtgtatccgtcttggcacac

SEQ ID NO: 23624 - DNA, 20 bp, Artificial sequence
  synthetic
tattgatcagcgtgagtgga

SEQ ID NO: 23625 - DNA, 20 bp, Artificial sequence
  synthetic
ggcagggggtctcatagcag

SEQ ID NO: 23626 - DNA, 20 bp, Artificial sequence
  synthetic
cattgtcaatttggctaatt

SEQ ID NO: 23627 - DNA, 20 bp, Artificial sequence
  synthetic
gccaggcactcagatctggt

SEQ ID NO: 23628 - DNA, 20 bp, Artificial sequence
  synthetic
gtccctctggccttatgcaa

SEQ ID NO: 23629 - DNA, 20 bp, Artificial sequence
  synthetic
ccaactgtatcgtggttctc

SEQ ID NO: 23630 - DNA, 20 bp, Artificial sequence
  synthetic
acgcatagataggacactca

SEQ ID NO: 23631 - DNA, 20 bp, Artificial sequence
  synthetic
caactcaccattcattatag

SEQ ID NO: 23632 - DNA, 20 bp, Artificial sequence
  synthetic
caatcacttttctactgagg

SEQ ID NO: 23633 - DNA, 20 bp, Artificial sequence
  synthetic
caagaccagagccatagagg

SEQ ID NO: 23634 - DNA, 20 bp, Artificial sequence
  synthetic
tgtccatggttctatgccat

SEQ ID NO: 23635 - DNA, 20 bp, Artificial sequence
  synthetic
tatttctgaggagactgttt

SEQ ID NO: 23636 - DNA, 20 bp, Artificial sequence
  synthetic
tccaacttacaaagagctgg

SEQ ID NO: 23637 - DNA, 20 bp, Artificial sequence
  synthetic
tttccgcctgcctggtcgtt

SEQ ID NO: 23638 - DNA, 20 bp, Artificial sequence
  synthetic
acaggctaaggatgcccttc

SEQ ID NO: 23639 - DNA, 20 bp, Artificial sequence
  synthetic
acctttcttcgactgggtct

SEQ ID NO: 23640 - DNA, 20 bp, Artificial sequence
  synthetic
ggtatgcatggttgacggta

SEQ ID NO: 23641 - DNA, 20 bp, Artificial sequence
  synthetic
ggaccgcatcctcaccacga

SEQ ID NO: 23642 - DNA, 20 bp, Artificial sequence
  synthetic
aatctacggacatgtgtaca

SEQ ID NO: 23643 - DNA, 20 bp, Artificial sequence
  synthetic
tgcagcacactgttaccatt

SEQ ID NO: 23644 - DNA, 20 bp, Artificial sequence
  synthetic
tctccttgaccgcagcacac

SEQ ID NO: 23645 - DNA, 20 bp, Artificial sequence
  synthetic
cggtgcgccacgcacaaccc

SEQ ID NO: 23646 - DNA, 20 bp, Artificial sequence
  synthetic
ggcgcggaaatactcttccg

SEQ ID NO: 23647 - DNA, 20 bp, Artificial sequence
  synthetic
ccggttggtgaccgcatttg

SEQ ID NO: 23648 - DNA, 20 bp, Artificial sequence
  synthetic
gcgtgatctcaatgatccgt

SEQ ID NO: 23649 - DNA, 20 bp, Artificial sequence
  synthetic
tggccaaggtaaaagtttcc

SEQ ID NO: 23650 - DNA, 20 bp, Artificial sequence
  synthetic
cttcaagtacttcgcccaaa

SEQ ID NO: 23651 - DNA, 20 bp, Artificial sequence
  synthetic
tcaaccaccaattctcaacg

SEQ ID NO: 23652 - DNA, 20 bp, Artificial sequence
  synthetic
accatacgaggggccagtga

SEQ ID NO: 23653 - DNA, 20 bp, Artificial sequence
  synthetic
accacaccacgaggggttaa

SEQ ID NO: 23654 - DNA, 20 bp, Artificial sequence
  synthetic
ccattttgcccagtacaaaa

SEQ ID NO: 23655 - DNA, 20 bp, Artificial sequence
  synthetic
tgattacgatctggactttg

SEQ ID NO: 23656 - DNA, 20 bp, Artificial sequence
  synthetic
gcgttgggtgaacgccgtgt

SEQ ID NO: 23657 - DNA, 20 bp, Artificial sequence
  synthetic
ctaaaggagctgtggctata

SEQ ID NO: 23658 - DNA, 20 bp, Artificial sequence
  synthetic
tgtgtgtcgatttcaacaat

SEQ ID NO: 23659 - DNA, 20 bp, Artificial sequence
  synthetic
aagtttgtggattcatgggg

SEQ ID NO: 23660 - DNA, 20 bp, Artificial sequence
  synthetic
tgacaacattccttaaacat

SEQ ID NO: 23661 - DNA, 20 bp, Artificial sequence
  synthetic
taactttaattggtcttgat

SEQ ID NO: 23662 - DNA, 20 bp, Artificial sequence
  synthetic
actgggttgattgtaacact

SEQ ID NO: 23663 - DNA, 20 bp, Artificial sequence
  synthetic
taataacgtcaattgtctca

SEQ ID NO: 23664 - DNA, 20 bp, Artificial sequence
  synthetic
atggcactctcaccacccaa

SEQ ID NO: 23665 - DNA, 20 bp, Artificial sequence
  synthetic
tgggtgagaacccttccttt

SEQ ID NO: 23666 - DNA, 20 bp, Artificial sequence
  synthetic
gttgtgaattgttctcaatt

SEQ ID NO: 23667 - DNA, 20 bp, Artificial sequence
  synthetic
tagttgtggaaacagtttgt

SEQ ID NO: 23668 - DNA, 20 bp, Artificial sequence
  synthetic
gggaaattggagacttattt

SEQ ID NO: 23669 - DNA, 20 bp, Artificial sequence
  synthetic
atgaacaggtgctacatgct

SEQ ID NO: 23670 - DNA, 20 bp, Artificial sequence
  synthetic
agaagttcaaatgggttcaa

SEQ ID NO: 23671 - DNA, 20 bp, Artificial sequence
  synthetic
acaccaatgagagatcaaat

SEQ ID NO: 23672 - DNA, 20 bp, Artificial sequence
  synthetic
tttccgcctacttggtcgtc

SEQ ID NO: 23673 - DNA, 20 bp, Artificial sequence
  synthetic
gttctaccgtcgttcccgac

SEQ ID NO: 23674 - DNA, 20 bp, Artificial sequence
  synthetic
tagcggagcatggtggccgt

SEQ ID NO: 23675 - DNA, 20 bp, Artificial sequence
  synthetic
atgcccttcaggtaccccga

SEQ ID NO: 23676 - DNA, 20 bp, Artificial sequence
  synthetic
tctgctatacgctctcagag

SEQ ID NO: 23677 - DNA, 20 bp, Artificial sequence
  synthetic
cctcgaatgggtctacgact

SEQ ID NO: 23678 - DNA, 20 bp, Artificial sequence
  synthetic
cgatcaagaaccattcaacg

SEQ ID NO: 23679 - DNA, 20 bp, Artificial sequence
  synthetic
cagtgacccgtttgggcggt

SEQ ID NO: 23680 - DNA, 20 bp, Artificial sequence
  synthetic
gctagctagtgctggcaaag

SEQ ID NO: 23681 - DNA, 20 bp, Artificial sequence
  synthetic
cgtgaaagtcaagccaaagg

SEQ ID NO: 23682 - DNA, 20 bp, Artificial sequence
  synthetic
actggacaacactaccaacc

SEQ ID NO: 23683 - DNA, 20 bp, Artificial sequence
  synthetic
caccttcgtggtaaagaaga

SEQ ID NO: 23684 - DNA, 20 bp, Artificial sequence
  synthetic
tgacatcaacgacatatttg

SEQ ID NO: 23685 - DNA, 20 bp, Artificial sequence
  synthetic
atacaaggaggccaaggaat

SEQ ID NO: 23686 - DNA, 20 bp, Artificial sequence
  synthetic
gaacgttctcgcgcaggcaa

SEQ ID NO: 23687 - DNA, 20 bp, Artificial sequence
  synthetic
atccaccacggggttcatcc

SEQ ID NO: 23688 - DNA, 20 bp, Artificial sequence
  synthetic
agacgggtacaagatcaaca

SEQ ID NO: 23689 - DNA, 20 bp, Artificial sequence
  synthetic
cgacgtaactcttggcgacg

SEQ ID NO: 23690 - DNA, 20 bp, Artificial sequence
  synthetic
cgacaagatcatgttggacg

SEQ ID NO: 23691 - DNA, 20 bp, Artificial sequence
  synthetic
gaagggaacccccgtcgtcg

SEQ ID NO: 23692 - DNA, 20 bp, Artificial sequence
  synthetic
ccacgtgatgcgcaaaacca

SEQ ID NO: 23693 - DNA, 20 bp, Artificial sequence
  synthetic
cgccctgatcgacttcgaaa

SEQ ID NO: 23694 - DNA, 20 bp, Artificial sequence
  synthetic
acacattctctacaccagaa

SEQ ID NO: 23695 - DNA, 20 bp, Artificial sequence
  synthetic
aagcatcatcaacacaattt

SEQ ID NO: 23696 - DNA, 20 bp, Artificial sequence
  synthetic
gtgcggctccggtccctgga

SEQ ID NO: 23697 - DNA, 20 bp, Artificial sequence
  synthetic
ggaggttctctaccaggagt

SEQ ID NO: 23698 - DNA, 20 bp, Artificial sequence
  synthetic
ccttcttttttcctttcttt

SEQ ID NO: 23699 - DNA, 20 bp, Artificial sequence
  synthetic
cggtgtgggttctcttcagc

SEQ ID NO: 23700 - DNA, 20 bp, Artificial sequence
  synthetic
tacagtatgagtgtgttact

SEQ ID NO: 23701 - DNA, 20 bp, Artificial sequence
  synthetic
caacactgtggctgaaatgg

SEQ ID NO: 23702 - DNA, 20 bp, Artificial sequence
  synthetic
tgaagctaaagggaacaact

SEQ ID NO: 23703 - DNA, 20 bp, Artificial sequence
  synthetic
gaagtttgattacatcaaat

SEQ ID NO: 23704 - DNA, 20 bp, Artificial sequence
  synthetic
aggacccagaaacattcctg

SEQ ID NO: 23705 - DNA, 20 bp, Artificial sequence
  synthetic
atgaagtgaatggaactgtg

SEQ ID NO: 23706 - DNA, 20 bp, Artificial sequence
  synthetic
aacaaaacaagtgtccctgg

SEQ ID NO: 23707 - DNA, 20 bp, Artificial sequence
  synthetic
aagggaattggggaccttcc

SEQ ID NO: 23708 - DNA, 20 bp, Artificial sequence
  synthetic
ctgggtttgctgtagggttc

SEQ ID NO: 23709 - DNA, 20 bp, Artificial sequence
  synthetic
gacagagttatctctatgtc

SEQ ID NO: 23710 - DNA, 20 bp, Artificial sequence
  synthetic
ttcttttctttctttttcag

SEQ ID NO: 23711 - DNA, 20 bp, Artificial sequence
  synthetic
gaagtctgattgatgtgatg

SEQ ID NO: 23712 - DNA, 20 bp, Artificial sequence
  synthetic
ggattgcgaaaaccttaagg

SEQ ID NO: 23713 - DNA, 20 bp, Artificial sequence
  synthetic
aagatttggctgggttcata

SEQ ID NO: 23714 - DNA, 20 bp, Artificial sequence
  synthetic
ttttgatatcatttattttg

SEQ ID NO: 23715 - DNA, 20 bp, Artificial sequence
  synthetic
ctcaaactagtcctagtgtg

SEQ ID NO: 23716 - DNA, 20 bp, Artificial sequence
  synthetic
gaaaggagagtgcaatggaa

SEQ ID NO: 23717 - DNA, 20 bp, Artificial sequence
  synthetic
tgtggaaaccttcagcaggt

SEQ ID NO: 23718 - DNA, 20 bp, Artificial sequence
  synthetic
ctgcttgtttagctaaggca

SEQ ID NO: 23719 - DNA, 20 bp, Artificial sequence
  synthetic
gctcaatgggtgtgacgacc

SEQ ID NO: 23720 - DNA, 20 bp, Artificial sequence
  synthetic
catctctggtatcaaatttc

SEQ ID NO: 23721 - DNA, 20 bp, Artificial sequence
  synthetic
ccaaactagcatcaactata

SEQ ID NO: 23722 - DNA, 20 bp, Artificial sequence
  synthetic
acacagaactattttcagca

SEQ ID NO: 23723 - DNA, 20 bp, Artificial sequence
  synthetic
cttggagctgggacccaagt

SEQ ID NO: 23724 - DNA, 20 bp, Artificial sequence
  synthetic
aaattgagaatcccagacaa

SEQ ID NO: 23725 - DNA, 20 bp, Artificial sequence
  synthetic
atgctggaataacaccagca

SEQ ID NO: 23726 - DNA, 20 bp, Artificial sequence
  synthetic
gctacaaaggagtaagctgt

SEQ ID NO: 23727 - DNA, 20 bp, Artificial sequence
  synthetic
ccatgcaaatatgaagtgcg

SEQ ID NO: 23728 - DNA, 20 bp, Artificial sequence
  synthetic
actaataaactatatgaaac

SEQ ID NO: 23729 - DNA, 20 bp, Artificial sequence
  synthetic
attgaaggatggtgtcaaaa

SEQ ID NO: 23730 - DNA, 20 bp, Artificial sequence
  synthetic
cgcttagcagtaaaaatgct

SEQ ID NO: 23731 - DNA, 20 bp, Artificial sequence
  synthetic
atcaatagaacagcagttac

SEQ ID NO: 23732 - DNA, 20 bp, Artificial sequence
  synthetic
ttactcaacaagatctgtct

SEQ ID NO: 23733 - DNA, 20 bp, Artificial sequence
  synthetic
ttatgtagttggggatctca

SEQ ID NO: 23734 - DNA, 20 bp, Artificial sequence
  synthetic
gaaggagcaggaaattggat

SEQ ID NO: 23735 - DNA, 20 bp, Artificial sequence
  synthetic
attgggaagatcaaggaaac

SEQ ID NO: 23736 - DNA, 20 bp, Artificial sequence
  synthetic
tttctctcatttgcgagttt

SEQ ID NO: 23737 - DNA, 20 bp, Artificial sequence
  synthetic
ttcttgattaaatatttact

SEQ ID NO: 23738 - DNA, 20 bp, Artificial sequence
  synthetic
cctttggcccgaacagccaa

SEQ ID NO: 23739 - DNA, 20 bp, Artificial sequence
  synthetic
gatcatctggaggatgatcc

SEQ ID NO: 23740 - DNA, 20 bp, Artificial sequence
  synthetic
acgaccgccaatcgaagact

SEQ ID NO: 23741 - DNA, 20 bp, Artificial sequence
  synthetic
gtaccagatgctgtgcaaga

SEQ ID NO: 23742 - DNA, 20 bp, Artificial sequence
  synthetic
tgctcttcgtcctgggctct

SEQ ID NO: 23743 - DNA, 20 bp, Artificial sequence
  synthetic
atttcgttcaggtgtgcctc

SEQ ID NO: 23744 - DNA, 20 bp, Artificial sequence
  synthetic
gatcagagcccggcgggaac

SEQ ID NO: 23745 - DNA, 20 bp, Artificial sequence
  synthetic
gcgaacccaatgacaaccac

SEQ ID NO: 23746 - DNA, 20 bp, Artificial sequence
  synthetic
tccgcccagagcccacagac

SEQ ID NO: 23747 - DNA, 20 bp, Artificial sequence
  synthetic
acaggaccaagctgattctg

SEQ ID NO: 23748 - DNA, 20 bp, Artificial sequence
  synthetic
cttggggagacaaaaagagg

SEQ ID NO: 23749 - DNA, 20 bp, Artificial sequence
  synthetic
tcaaaacaaatgactttgct

SEQ ID NO: 23750 - DNA, 20 bp, Artificial sequence
  synthetic
tatcacgttaaagatttaga

SEQ ID NO: 23751 - DNA, 20 bp, Artificial sequence
  synthetic
tgggcggcttccatttttac

SEQ ID NO: 23752 - DNA, 20 bp, Artificial sequence
  synthetic
tcatgatgcagcctttcttg

SEQ ID NO: 23753 - DNA, 20 bp, Artificial sequence
  synthetic
aagggtgccggaacaatttc

SEQ ID NO: 23754 - DNA, 20 bp, Artificial sequence
  synthetic
aaccgtattgtctgtttttc

SEQ ID NO: 23755 - DNA, 20 bp, Artificial sequence
  synthetic
caggacaccgagtggtaaac

SEQ ID NO: 23756 - DNA, 20 bp, Artificial sequence
  synthetic
tgatatagaaggaatattat

SEQ ID NO: 23757 - DNA, 20 bp, Artificial sequence
  synthetic
tgttatcagagatgctttgc

SEQ ID NO: 23758 - DNA, 20 bp, Artificial sequence
  synthetic
gtcgtcagttattagacatt

SEQ ID NO: 23759 - DNA, 20 bp, Artificial sequence
  synthetic
gtataaaataaatttaatta

SEQ ID NO: 23760 - DNA, 20 bp, Artificial sequence
  synthetic
aagatttgtgtcttaattag

SEQ ID NO: 23761 - DNA, 20 bp, Artificial sequence
  synthetic
gttgacattgacgttcacca

SEQ ID NO: 23762 - DNA, 20 bp, Artificial sequence
  synthetic
agaacagtgttgaccctaac

SEQ ID NO: 23763 - DNA, 20 bp, Artificial sequence
  synthetic
aatggtgtgtgctgctaatc

SEQ ID NO: 23764 - DNA, 20 bp, Artificial sequence
  synthetic
agcttcgaaaggtaccgggc

SEQ ID NO: 23765 - DNA, 20 bp, Artificial sequence
  synthetic
tgcttattcttactgtaatg

SEQ ID NO: 23766 - DNA, 20 bp, Artificial sequence
  synthetic
caaatcctgataatatcatg

SEQ ID NO: 23767 - DNA, 20 bp, Artificial sequence
  synthetic
atttaacttactatgatact

SEQ ID NO: 23768 - DNA, 20 bp, Artificial sequence
  synthetic
atatttcatagggagtgaag

SEQ ID NO: 23769 - DNA, 20 bp, Artificial sequence
  synthetic
aatgatcgatccagtttata

SEQ ID NO: 23770 - DNA, 20 bp, Artificial sequence
  synthetic
attcaacttagttgatgatg

SEQ ID NO: 23771 - DNA, 20 bp, Artificial sequence
  synthetic
caagggtggtacatcatctg

SEQ ID NO: 23772 - DNA, 20 bp, Artificial sequence
  synthetic
tgttaggttattaagttcaa

SEQ ID NO: 23773 - DNA, 20 bp, Artificial sequence
  synthetic
agtgtacaagacgttagatg

SEQ ID NO: 23774 - DNA, 20 bp, Artificial sequence
  synthetic
cataacatccagcttgtcaa

SEQ ID NO: 23775 - DNA, 20 bp, Artificial sequence
  synthetic
catattcaaacccaaaacag

SEQ ID NO: 23776 - DNA, 20 bp, Artificial sequence
  synthetic
ataaattaaagttatttgaa

SEQ ID NO: 23777 - DNA, 20 bp, Artificial sequence
  synthetic
cctcatattacttcaaaaaa

SEQ ID NO: 23778 - DNA, 20 bp, Artificial sequence
  synthetic
cacggtacagaagcctaatt

SEQ ID NO: 23779 - DNA, 20 bp, Artificial sequence
  synthetic
tgactattgatggaactaca

SEQ ID NO: 23780 - DNA, 20 bp, Artificial sequence
  synthetic
gagtgtatattaaagaccca

SEQ ID NO: 23781 - DNA, 20 bp, Artificial sequence
  synthetic
cagcgagaaggatatcttcg

SEQ ID NO: 23782 - DNA, 20 bp, Artificial sequence
  synthetic
tgactttgttaacgccatca

SEQ ID NO: 23783 - DNA, 20 bp, Artificial sequence
  synthetic
aattaacaggattcgtgaga

SEQ ID NO: 23784 - DNA, 20 bp, Artificial sequence
  synthetic
taagcaaaatatcgctggat

SEQ ID NO: 23785 - DNA, 20 bp, Artificial sequence
  synthetic
taaaccgtaagtaaattatc

SEQ ID NO: 23786 - DNA, 20 bp, Artificial sequence
  synthetic
caacgcagaggtggtgtttg

SEQ ID NO: 23787 - DNA, 20 bp, Artificial sequence
  synthetic
cagttgaatgttgaagtcaa

SEQ ID NO: 23788 - DNA, 20 bp, Artificial sequence
  synthetic
ggatcacgttatatgtctgc

SEQ ID NO: 23789 - DNA, 20 bp, Artificial sequence
  synthetic
gttattgttaatgaaagcac

SEQ ID NO: 23790 - DNA, 20 bp, Artificial sequence
  synthetic
attctcatctcagaatgaga

SEQ ID NO: 23791 - DNA, 20 bp, Artificial sequence
  synthetic
cattagtgcgtgtttatcac

SEQ ID NO: 23792 - DNA, 20 bp, Artificial sequence
  synthetic
gctattgtgggcttgtcggg

SEQ ID NO: 23793 - DNA, 20 bp, Artificial sequence
  synthetic
ttctcgccacagacatgggg

SEQ ID NO: 23794 - DNA, 20 bp, Artificial sequence
  synthetic
tgtcgattccagtgcatgct

SEQ ID NO: 23795 - DNA, 20 bp, Artificial sequence
  synthetic
ggttcattgtcataacagtg

SEQ ID NO: 23796 - DNA, 20 bp, Artificial sequence
  synthetic
atcgaaaaacggcatctttt

SEQ ID NO: 23797 - DNA, 20 bp, Artificial sequence
  synthetic
acatagagggcagtaagtac

SEQ ID NO: 23798 - DNA, 20 bp, Artificial sequence
  synthetic
ttggaggagtgggatttctc

SEQ ID NO: 23799 - DNA, 20 bp, Artificial sequence
  synthetic
tggagctacgttgtggtgag

SEQ ID NO: 23800 - DNA, 20 bp, Artificial sequence
  synthetic
gacgtgtggaggctgtgctc

SEQ ID NO: 23801 - DNA, 20 bp, Artificial sequence
  synthetic
gtgtcccagaatcgccacgg

SEQ ID NO: 23802 - DNA, 20 bp, Artificial sequence
  synthetic
tgggggctgcagtcaagagc

SEQ ID NO: 23803 - DNA, 20 bp, Artificial sequence
  synthetic
taagtgaaggtggagtccct

SEQ ID NO: 23804 - DNA, 20 bp, Artificial sequence
  synthetic
aggcctcactgagcaacatt

SEQ ID NO: 23805 - DNA, 20 bp, Artificial sequence
  synthetic
ccacggcaatggcggtctgg

SEQ ID NO: 23806 - DNA, 20 bp, Artificial sequence
  synthetic
tggtgggcgtcatgctcact

SEQ ID NO: 23807 - DNA, 20 bp, Artificial sequence
  synthetic
atgaggggggagaggtcaat

SEQ ID NO: 23808 - DNA, 20 bp, Artificial sequence
  synthetic
agatgctgagctcggggcga

SEQ ID NO: 23809 - DNA, 20 bp, Artificial sequence
  synthetic
ccatgtggcacgtcacaagg

SEQ ID NO: 23810 - DNA, 20 bp, Artificial sequence
  synthetic
agacacaccaatgtcagccg

SEQ ID NO: 23811 - DNA, 20 bp, Artificial sequence
  synthetic
tagttcttgcccctacccgg

SEQ ID NO: 23812 - DNA, 20 bp, Artificial sequence
  synthetic
cagctcaacgccggggcagg

SEQ ID NO: 23813 - DNA, 20 bp, Artificial sequence
  synthetic
agatgaagatgccagaagtg

SEQ ID NO: 23814 - DNA, 20 bp, Artificial sequence
  synthetic
tgtggtgctttgtggcaaga

SEQ ID NO: 23815 - DNA, 20 bp, Artificial sequence
  synthetic
gaagtagcgatgataataga

SEQ ID NO: 23816 - DNA, 20 bp, Artificial sequence
  synthetic
tccagccagcacgatcctgg

SEQ ID NO: 23817 - DNA, 20 bp, Artificial sequence
  synthetic
tccatcccgagactgagaca

SEQ ID NO: 23818 - DNA, 20 bp, Artificial sequence
  synthetic
ggctgaatggttgctctagg

SEQ ID NO: 23819 - DNA, 20 bp, Artificial sequence
  synthetic
gaccagaggtacttgaggct

SEQ ID NO: 23820 - DNA, 20 bp, Artificial sequence
  synthetic
accagcggggacctgccaag

SEQ ID NO: 23821 - DNA, 20 bp, Artificial sequence
  synthetic
taactagaagagaccaacgt

SEQ ID NO: 23822 - DNA, 20 bp, Artificial sequence
  synthetic
ctcaccatttccatgagctg

SEQ ID NO: 23823 - DNA, 20 bp, Artificial sequence
  synthetic
acaggagggatctgagaacg

SEQ ID NO: 23824 - DNA, 20 bp, Artificial sequence
  synthetic
cgggaagctggtcgctcccg

SEQ ID NO: 23825 - DNA, 20 bp, Artificial sequence
  synthetic
gaactgggaggttatgaagg

SEQ ID NO: 23826 - DNA, 20 bp, Artificial sequence
  synthetic
gatgttgaaagctattgcta

SEQ ID NO: 23827 - DNA, 20 bp, Artificial sequence
  synthetic
ggacatgacatacgcacaag

SEQ ID NO: 23828 - DNA, 20 bp, Artificial sequence
  synthetic
taacgacccggaactattgg

SEQ ID NO: 23829 - DNA, 20 bp, Artificial sequence
  synthetic
aatcttagctgcacagaatc

SEQ ID NO: 23830 - DNA, 20 bp, Artificial sequence
  synthetic
agtttaccgcaatcttttca

SEQ ID NO: 23831 - DNA, 20 bp, Artificial sequence
  synthetic
ctcgttttttgagcatactt

SEQ ID NO: 23832 - DNA, 20 bp, Artificial sequence
  synthetic
tccaagctgggcgtttatta

SEQ ID NO: 23833 - DNA, 20 bp, Artificial sequence
  synthetic
ctgacacagatgtaacgttc

SEQ ID NO: 23834 - DNA, 20 bp, Artificial sequence
  synthetic
ttgttgaagtttctggagca

SEQ ID NO: 23835 - DNA, 20 bp, Artificial sequence
  synthetic
gtgaagtaggagaatctagt

SEQ ID NO: 23836 - DNA, 20 bp, Artificial sequence
  synthetic
aagctaatgctggtccagtt

SEQ ID NO: 23837 - DNA, 20 bp, Artificial sequence
  synthetic
aacttctggcacgttccacc

SEQ ID NO: 23838 - DNA, 20 bp, Artificial sequence
  synthetic
cgtagtgattgtaagatcct

SEQ ID NO: 23839 - DNA, 20 bp, Artificial sequence
  synthetic
tccctgtgatcagtatcaac

SEQ ID NO: 23840 - DNA, 20 bp, Artificial sequence
  synthetic
tcttacgtggaccccgcggt

SEQ ID NO: 23841 - DNA, 20 bp, Artificial sequence
  synthetic
tctggtgttcttgaccccaa

SEQ ID NO: 23842 - DNA, 20 bp, Artificial sequence
  synthetic
tcttcccacatctccaaact

SEQ ID NO: 23843 - DNA, 20 bp, Artificial sequence
  synthetic
accgccccagtggtcgtcgc

SEQ ID NO: 23844 - DNA, 20 bp, Artificial sequence
  synthetic
aacaccctagccaaccccac

SEQ ID NO: 23845 - DNA, 20 bp, Artificial sequence
  synthetic
caggtggtggtgaacggtac

SEQ ID NO: 23846 - DNA, 20 bp, Artificial sequence
  synthetic
ggttgcacacccaataccac

SEQ ID NO: 23847 - DNA, 20 bp, Artificial sequence
  synthetic
tgctactcaccgccaagcgg

SEQ ID NO: 23848 - DNA, 20 bp, Artificial sequence
  synthetic
ccctatgacgccacctctcc

SEQ ID NO: 23849 - DNA, 20 bp, Artificial sequence
  synthetic
gatgtgctcaacaccacgct

SEQ ID NO: 23850 - DNA, 20 bp, Artificial sequence
  synthetic
aagacgaacgccatcgtcaa

SEQ ID NO: 23851 - DNA, 20 bp, Artificial sequence
  synthetic
agcgatggaacacgccagat

SEQ ID NO: 23852 - DNA, 20 bp, Artificial sequence
  synthetic
gtctctaacatcaccggtgt

SEQ ID NO: 23853 - DNA, 20 bp, Artificial sequence
  synthetic
agaaacaccactctgggcgc

SEQ ID NO: 23854 - DNA, 20 bp, Artificial sequence
  synthetic
tccctccttgcctctgtcct

SEQ ID NO: 23855 - DNA, 20 bp, Artificial sequence
  synthetic
gctaggttggatcgggcctc

SEQ ID NO: 23856 - DNA, 20 bp, Artificial sequence
  synthetic
tattcgggcatgcctcaact

SEQ ID NO: 23857 - DNA, 20 bp, Artificial sequence
  synthetic
cgctttctgggctcccaccc

SEQ ID NO: 23858 - DNA, 20 bp, Artificial sequence
  synthetic
tcctgcgcattcagaattgt

SEQ ID NO: 23859 - DNA, 20 bp, Artificial sequence
  synthetic
ccactgttcgtcctggtaga

SEQ ID NO: 23860 - DNA, 20 bp, Artificial sequence
  synthetic
agacaagcttttcactatcc

SEQ ID NO: 23861 - DNA, 20 bp, Artificial sequence
  synthetic
cactactcaagaggcagcga

SEQ ID NO: 23862 - DNA, 20 bp, Artificial sequence
  synthetic
acttccagacgcactgacag

SEQ ID NO: 23863 - DNA, 20 bp, Artificial sequence
  synthetic
ttcctaccagttcctcacta

SEQ ID NO: 23864 - DNA, 20 bp, Artificial sequence
  synthetic
aacggggaagctgctgttag

SEQ ID NO: 23865 - DNA, 20 bp, Artificial sequence
  synthetic
caatacaaacacagtatcag

SEQ ID NO: 23866 - DNA, 20 bp, Artificial sequence
  synthetic
tagattcagcgtcccgtttg

SEQ ID NO: 23867 - DNA, 20 bp, Artificial sequence
  synthetic
gggccagggagtggttggat

SEQ ID NO: 23868 - DNA, 20 bp, Artificial sequence
  synthetic
tgacggtatggtggagaggt

SEQ ID NO: 23869 - DNA, 20 bp, Artificial sequence
  synthetic
tttaccattactggaagcgc

SEQ ID NO: 23870 - DNA, 20 bp, Artificial sequence
  synthetic
gcagcaggccgtggtagtta

SEQ ID NO: 23871 - DNA, 20 bp, Artificial sequence
  synthetic
taagaaacatgggtttccag

SEQ ID NO: 23872 - DNA, 20 bp, Artificial sequence
  synthetic
cattgagatgccagaggaaa

SEQ ID NO: 23873 - DNA, 20 bp, Artificial sequence
  synthetic
gcagagctcttcacttacca

SEQ ID NO: 23874 - DNA, 20 bp, Artificial sequence
  synthetic
caccccttctcttacgggag

SEQ ID NO: 23875 - DNA, 20 bp, Artificial sequence
  synthetic
tgacttgatatgaccaagag

SEQ ID NO: 23876 - DNA, 20 bp, Artificial sequence
  synthetic
cgtatggcgcatgctcatgg

SEQ ID NO: 23877 - DNA, 20 bp, Artificial sequence
  synthetic
ctaagatggcaatctatgag

SEQ ID NO: 23878 - DNA, 20 bp, Artificial sequence
  synthetic
ataaacataaaggtgagact

SEQ ID NO: 23879 - DNA, 20 bp, Artificial sequence
  synthetic
gagagtggacatgccccttg

SEQ ID NO: 23880 - DNA, 20 bp, Artificial sequence
  synthetic
aacagcaaaacaatgacttc

SEQ ID NO: 23881 - DNA, 20 bp, Artificial sequence
  synthetic
ataattttgttactttagta

SEQ ID NO: 23882 - DNA, 20 bp, Artificial sequence
  synthetic
cagactcaattccatctgct

SEQ ID NO: 23883 - DNA, 20 bp, Artificial sequence
  synthetic
ttataacctcatatcatgct

SEQ ID NO: 23884 - DNA, 20 bp, Artificial sequence
  synthetic
ttagagatcaccaacagaga

SEQ ID NO: 23885 - DNA, 20 bp, Artificial sequence
  synthetic
tgttttccattcttgttaag

SEQ ID NO: 23886 - DNA, 20 bp, Artificial sequence
  synthetic
tccctgtttgtacatccact

SEQ ID NO: 23887 - DNA, 20 bp, Artificial sequence
  synthetic
caatggggataaggaagaga

SEQ ID NO: 23888 - DNA, 20 bp, Artificial sequence
  synthetic
ccatttttaattctatcatt

SEQ ID NO: 23889 - DNA, 20 bp, Artificial sequence
  synthetic
tcacaatgaccccagctgat

SEQ ID NO: 23890 - DNA, 20 bp, Artificial sequence
  synthetic
caacacaggaacatgtgaca

SEQ ID NO: 23891 - DNA, 20 bp, Artificial sequence
  synthetic
acaaattttaaagatggttt

SEQ ID NO: 23892 - DNA, 20 bp, Artificial sequence
  synthetic
ggccgaatttgaacaagttt

SEQ ID NO: 23893 - DNA, 20 bp, Artificial sequence
  synthetic
atcaggagataatatgactc

SEQ ID NO: 23894 - DNA, 20 bp, Artificial sequence
  synthetic
atatatattgcgacaaggat

SEQ ID NO: 23895 - DNA, 20 bp, Artificial sequence
  synthetic
tacatttagtaaaatagatg

SEQ ID NO: 23896 - DNA, 20 bp, Artificial sequence
  synthetic
gaaaggaactaaaggaaaac

SEQ ID NO: 23897 - DNA, 20 bp, Artificial sequence
  synthetic
tggagatgataatgtaatta

SEQ ID NO: 23898 - DNA, 20 bp, Artificial sequence
  synthetic
taccaatgtacataacacga

SEQ ID NO: 23899 - DNA, 20 bp, Artificial sequence
  synthetic
acaacgccccgttctcattg

SEQ ID NO: 23900 - DNA, 20 bp, Artificial sequence
  synthetic
tttccaattagacaattcag

SEQ ID NO: 23901 - DNA, 20 bp, Artificial sequence
  synthetic
gtggttagataacatatctc

SEQ ID NO: 23902 - DNA, 20 bp, Artificial sequence
  synthetic
agtgggaatgccttgctact

SEQ ID NO: 23903 - DNA, 20 bp, Artificial sequence
  synthetic
acagtataacaatagagaga

SEQ ID NO: 23904 - DNA, 20 bp, Artificial sequence
  synthetic
ggagaatttggcgtcaagcg

SEQ ID NO: 23905 - DNA, 20 bp, Artificial sequence
  synthetic
cagcacaaagagcaatgatg

SEQ ID NO: 23906 - DNA, 20 bp, Artificial sequence
  synthetic
ttgagagggaagggtactct

SEQ ID NO: 23907 - DNA, 20 bp, Artificial sequence
  synthetic
gtgtacagcccactttctca

SEQ ID NO: 23908 - DNA, 20 bp, Artificial sequence
  synthetic
tatagtggagcggattctgg

SEQ ID NO: 23909 - DNA, 20 bp, Artificial sequence
  synthetic
ctcaactggtgcgcttgcca

SEQ ID NO: 23910 - DNA, 20 bp, Artificial sequence
  synthetic
cagaatggtactagccagca

SEQ ID NO: 23911 - DNA, 20 bp, Artificial sequence
  synthetic
acaagcctgggacatcccct

SEQ ID NO: 23912 - DNA, 20 bp, Artificial sequence
  synthetic
tggccaggactagtcgctgg

SEQ ID NO: 23913 - DNA, 20 bp, Artificial sequence
  synthetic
tacatgtttgtgtcactggg

SEQ ID NO: 23914 - DNA, 20 bp, Artificial sequence
  synthetic
gaacttgctgggagcagatg

SEQ ID NO: 23915 - DNA, 20 bp, Artificial sequence
  synthetic
gcaaggagacgtagtgttgg

SEQ ID NO: 23916 - DNA, 20 bp, Artificial sequence
  synthetic
gacccaaggtcgccagactt

SEQ ID NO: 23917 - DNA, 20 bp, Artificial sequence
  synthetic
agagctctcctttacagtta

SEQ ID NO: 23918 - DNA, 20 bp, Artificial sequence
  synthetic
caagctagttggaatcaaca

SEQ ID NO: 23919 - DNA, 20 bp, Artificial sequence
  synthetic
ggcaggactgttggtttcag

SEQ ID NO: 23920 - DNA, 20 bp, Artificial sequence
  synthetic
ggtaatgccagcccatggtc

SEQ ID NO: 23921 - DNA, 20 bp, Artificial sequence
  synthetic
cagttcatatcggaggccag

SEQ ID NO: 23922 - DNA, 20 bp, Artificial sequence
  synthetic
ggcatgtgaattgaccgatt

SEQ ID NO: 23923 - DNA, 20 bp, Artificial sequence
  synthetic
atctcttcaacagattgaga

SEQ ID NO: 23924 - DNA, 20 bp, Artificial sequence
  synthetic
cgcctacttggtcgtcagcg

SEQ ID NO: 23925 - DNA, 20 bp, Artificial sequence
  synthetic
gagcatgacggccgtgggaa

SEQ ID NO: 23926 - DNA, 20 bp, Artificial sequence
  synthetic
ggacggcacggacatgtgcc

SEQ ID NO: 23927 - DNA, 20 bp, Artificial sequence
  synthetic
agaaccactcaacggagaat

SEQ ID NO: 23928 - DNA, 20 bp, Artificial sequence
  synthetic
tattagcggaggctccaacg

SEQ ID NO: 23929 - DNA, 20 bp, Artificial sequence
  synthetic
atcgtttggacactgtcact

SEQ ID NO: 23930 - DNA, 20 bp, Artificial sequence
  synthetic
acttgacacgcggcagaagt

SEQ ID NO: 23931 - DNA, 20 bp, Artificial sequence
  synthetic
gtgggacactggtcttaatt

SEQ ID NO: 23932 - DNA, 20 bp, Artificial sequence
  synthetic
ctccttcaactacggtgctg

SEQ ID NO: 23933 - DNA, 20 bp, Artificial sequence
  synthetic
gaagaagatctccgactcgc

SEQ ID NO: 23934 - DNA, 20 bp, Artificial sequence
  synthetic
taaggagtggctcgacaacg

SEQ ID NO: 23935 - DNA, 20 bp, Artificial sequence
  synthetic
ggaggtgattgaccgggttg

SEQ ID NO: 23936 - DNA, 20 bp, Artificial sequence
  synthetic
accctacgccgggccgctcg

SEQ ID NO: 23937 - DNA, 20 bp, Artificial sequence
  synthetic
tttgaaagtgaaagctaaga

SEQ ID NO: 23938 - DNA, 20 bp, Artificial sequence
  synthetic
tcttttcgctgagaagtatg

SEQ ID NO: 23939 - DNA, 20 bp, Artificial sequence
  synthetic
ctgtggaggagctgttctcg

SEQ ID NO: 23940 - DNA, 20 bp, Artificial sequence
  synthetic
agatgtggaagagcgtgtgc

SEQ ID NO: 23941 - DNA, 20 bp, Artificial sequence
  synthetic
ccaggggaagcgccgcggcg

SEQ ID NO: 23942 - DNA, 20 bp, Artificial sequence
  synthetic
gtctggctgttccgcaacta

SEQ ID NO: 23943 - DNA, 20 bp, Artificial sequence
  synthetic
ccacttcaaatctcttggcc

SEQ ID NO: 23944 - DNA, 20 bp, Artificial sequence
  synthetic
ctttgcacgccgtgggacca

SEQ ID NO: 23945 - DNA, 20 bp, Artificial sequence
  synthetic
ggtgctatggagtgcccaac

SEQ ID NO: 23946 - DNA, 20 bp, Artificial sequence
  synthetic
gcccaacggcaggagaagcc

SEQ ID NO: 23947 - DNA, 20 bp, Artificial sequence
  synthetic
ggaaccaagaaggatccctg

SEQ ID NO: 23948 - DNA, 20 bp, Artificial sequence
  synthetic
aaacattctcaaatggcgca

SEQ ID NO: 23949 - DNA, 20 bp, Artificial sequence
  synthetic
gggaatgtctttggcctcca

SEQ ID NO: 23950 - DNA, 20 bp, Artificial sequence
  synthetic
tgtcaactgtgcacccagct

SEQ ID NO: 23951 - DNA, 20 bp, Artificial sequence
  synthetic
ccgctcttcttaggaaatgt

SEQ ID NO: 23952 - DNA, 20 bp, Artificial sequence
  synthetic
caagtgatccattcccggag

SEQ ID NO: 23953 - DNA, 20 bp, Artificial sequence
  synthetic
ataacatggaaatccctgga

SEQ ID NO: 23954 - DNA, 20 bp, Artificial sequence
  synthetic
agtacgcaacaacaacacga

SEQ ID NO: 23955 - DNA, 20 bp, Artificial sequence
  synthetic
taacgacattgtgcttggga

SEQ ID NO: 23956 - DNA, 20 bp, Artificial sequence
  synthetic
gagcggctgccctttttcag

SEQ ID NO: 23957 - DNA, 20 bp, Artificial sequence
  synthetic
caaatcgcagaggtggcaca

SEQ ID NO: 23958 - DNA, 20 bp, Artificial sequence
  synthetic
caataatgagaacaactcta

SEQ ID NO: 23959 - DNA, 20 bp, Artificial sequence
  synthetic
gagaagagtacaagaagacc

SEQ ID NO: 23960 - DNA, 20 bp, Artificial sequence
  synthetic
tgactgacacaacaccattt

SEQ ID NO: 23961 - DNA, 20 bp, Artificial sequence
  synthetic
agaagaaaccatctgaattt

SEQ ID NO: 23962 - DNA, 20 bp, Artificial sequence
  synthetic
tggttagagagactgcccca

SEQ ID NO: 23963 - DNA, 20 bp, Artificial sequence
  synthetic
ttcctcacactgtacaaaag

SEQ ID NO: 23964 - DNA, 20 bp, Artificial sequence
  synthetic
ttgccacagcttggcagact

SEQ ID NO: 23965 - DNA, 20 bp, Artificial sequence
  synthetic
ggtggctttacatattgagc

SEQ ID NO: 23966 - DNA, 20 bp, Artificial sequence
  synthetic
gcatggattttgcaatatgt

SEQ ID NO: 23967 - DNA, 20 bp, Artificial sequence
  synthetic
atgaaacccacagtgggagg

SEQ ID NO: 23968 - DNA, 20 bp, Artificial sequence
  synthetic
catggcaggttcacagagat

SEQ ID NO: 23969 - DNA, 20 bp, Artificial sequence
  synthetic
gggaactaaaacaccagtgg

SEQ ID NO: 23970 - DNA, 20 bp, Artificial sequence
  synthetic
tggacactgaaagaatggaa

SEQ ID NO: 23971 - DNA, 20 bp, Artificial sequence
  synthetic
atggagagctgctcagcgaa

SEQ ID NO: 23972 - DNA, 20 bp, Artificial sequence
  synthetic
ttattgctgtgggggtgaca

SEQ ID NO: 23973 - DNA, 20 bp, Artificial sequence
  synthetic
ttggtctgccgagcgcaaac

SEQ ID NO: 23974 - DNA, 20 bp, Artificial sequence
  synthetic
gcgtcctccacacaatgtgg

SEQ ID NO: 23975 - DNA, 20 bp, Artificial sequence
  synthetic
gaagagctcatgaagtgcat

SEQ ID NO: 23976 - DNA, 20 bp, Artificial sequence
  synthetic
cctttgaaaaagactattcc

SEQ ID NO: 23977 - DNA, 20 bp, Artificial sequence
  synthetic
tgacaggaatgtcaggggtt

SEQ ID NO: 23978 - DNA, 20 bp, Artificial sequence
  synthetic
ctggcaagcagaggagcagc

SEQ ID NO: 23979 - DNA, 20 bp, Artificial sequence
  synthetic
gagtggctggacacgtcctg

SEQ ID NO: 23980 - DNA, 20 bp, Artificial sequence
  synthetic
atcccatggtggacggagat

SEQ ID NO: 23981 - DNA, 20 bp, Artificial sequence
  synthetic
cagggcagcttatcaggcct

SEQ ID NO: 23982 - DNA, 20 bp, Artificial sequence
  synthetic
gggctggaatgaatgtgttt

SEQ ID NO: 23983 - DNA, 20 bp, Artificial sequence
  synthetic
accgaacgtggcagtactgg

SEQ ID NO: 23984 - DNA, 20 bp, Artificial sequence
  synthetic
cggacgacacagccggatgg

SEQ ID NO: 23985 - DNA, 20 bp, Artificial sequence
  synthetic
gtgaccacggagaagaacgc

SEQ ID NO: 23986 - DNA, 20 bp, Artificial sequence
  synthetic
ttcccttctgctcgcaccat

SEQ ID NO: 23987 - DNA, 20 bp, Artificial sequence
  synthetic
ggcaacacgccagtgagagt

SEQ ID NO: 23988 - DNA, 20 bp, Artificial sequence
  synthetic
gtcacatggagagaggactc

SEQ ID NO: 23989 - DNA, 20 bp, Artificial sequence
  synthetic
caacggcatctctcggacag

SEQ ID NO: 23990 - DNA, 20 bp, Artificial sequence
  synthetic
accgttgtgtgccccaagtg

SEQ ID NO: 23991 - DNA, 20 bp, Artificial sequence
  synthetic
ttggcaccatcacgctcacg

SEQ ID NO: 23992 - DNA, 20 bp, Artificial sequence
  synthetic
gaattacaactgctaatgaa

SEQ ID NO: 23993 - DNA, 20 bp, Artificial sequence
  synthetic
tcccgagtagctggctggtc

SEQ ID NO: 23994 - DNA, 20 bp, Artificial sequence
  synthetic
caactctctttgggtcattt

SEQ ID NO: 23995 - DNA, 20 bp, Artificial sequence
  synthetic
tggaggagccaataggagat

SEQ ID NO: 23996 - DNA, 20 bp, Artificial sequence
  synthetic
cgaaaacacgggtttctaca

SEQ ID NO: 23997 - DNA, 20 bp, Artificial sequence
  synthetic
tcggggcctacaacggaata

SEQ ID NO: 23998 - DNA, 20 bp, Artificial sequence
  synthetic
tctttcttggagccttgtac

SEQ ID NO: 23999 - DNA, 20 bp, Artificial sequence
  synthetic
tcttcattaatggtgacccc

SEQ ID NO: 24000 - DNA, 20 bp, Artificial sequence
  synthetic
ttgtcgaggaaaccaaacag

SEQ ID NO: 24001 - DNA, 20 bp, Artificial sequence
  synthetic
cactgcatcgtgcaaatttc

SEQ ID NO: 24002 - DNA, 20 bp, Artificial sequence
  synthetic
agcccacgaagatgtcttat

SEQ ID NO: 24003 - DNA, 20 bp, Artificial sequence
  synthetic
ggtcattcttcacttctcgc

SEQ ID NO: 24004 - DNA, 20 bp, Artificial sequence
  synthetic
tcagacttgacagaattccg

SEQ ID NO: 24005 - DNA, 20 bp, Artificial sequence
  synthetic
gtatcgtcctgccccctccc

SEQ ID NO: 24006 - DNA, 20 bp, Artificial sequence
  synthetic
gatcatttgtgactgatgat

SEQ ID NO: 24007 - DNA, 20 bp, Artificial sequence
  synthetic
aggatgccgttcaagatcaa

SEQ ID NO: 24008 - DNA, 20 bp, Artificial sequence
  synthetic
gccgtttcctcgaatttgag

SEQ ID NO: 24009 - DNA, 20 bp, Artificial sequence
  synthetic
caaaaatcagctctgaggac

SEQ ID NO: 24010 - DNA, 20 bp, Artificial sequence
  synthetic
tgggacggcgagatcaacga

SEQ ID NO: 24011 - DNA, 20 bp, Artificial sequence
  synthetic
tggttatagcaggggatgat

SEQ ID NO: 24012 - DNA, 20 bp, Artificial sequence
  synthetic
taggatttgtagccattacc

SEQ ID NO: 24013 - DNA, 20 bp, Artificial sequence
  synthetic
cctgggaagatatcccctat

SEQ ID NO: 24014 - DNA, 20 bp, Artificial sequence
  synthetic
taagacagggggtatttgga

SEQ ID NO: 24015 - DNA, 20 bp, Artificial sequence
  synthetic
tcccctggaaacagggtggg

SEQ ID NO: 24016 - DNA, 20 bp, Artificial sequence
  synthetic
tctcttgttagatctttttg

SEQ ID NO: 24017 - DNA, 20 bp, Artificial sequence
  synthetic
tggattgtcgccgacttctt

SEQ ID NO: 24018 - DNA, 20 bp, Artificial sequence
  synthetic
tgagaggttgtaatcctaaa

SEQ ID NO: 24019 - DNA, 20 bp, Artificial sequence
  synthetic
ttatgcctgtgcaatcccgg

SEQ ID NO: 24020 - DNA, 20 bp, Artificial sequence
  synthetic
ttagtgcctttttacagaaa

SEQ ID NO: 24021 - DNA, 20 bp, Artificial sequence
  synthetic
ctgtcacaagtgctggacag

SEQ ID NO: 24022 - DNA, 20 bp, Artificial sequence
  synthetic
atgtttgttttgagttttat

SEQ ID NO: 24023 - DNA, 20 bp, Artificial sequence
  synthetic
gcttggatgctatgttcttt

SEQ ID NO: 24024 - DNA, 20 bp, Artificial sequence
  synthetic
agctctttagcttgtttagg

SEQ ID NO: 24025 - DNA, 20 bp, Artificial sequence
  synthetic
ggaattgcattgattgtgat

SEQ ID NO: 24026 - DNA, 20 bp, Artificial sequence
  synthetic
ttgtggcagctgatttaggt

SEQ ID NO: 24027 - DNA, 20 bp, Artificial sequence
  synthetic
agcttacttataataagcag

SEQ ID NO: 24028 - DNA, 20 bp, Artificial sequence
  synthetic
gtatcgtgcgtactcgttct

SEQ ID NO: 24029 - DNA, 20 bp, Artificial sequence
  synthetic
ccaatggatttagccaagtt

SEQ ID NO: 24030 - DNA, 20 bp, Artificial sequence
  synthetic
atcaacaactcgctggtatc

SEQ ID NO: 24031 - DNA, 20 bp, Artificial sequence
  synthetic
ctactgaatatgcttccaac

SEQ ID NO: 24032 - DNA, 20 bp, Artificial sequence
  synthetic
gattttggcgggatggaagt

SEQ ID NO: 24033 - DNA, 20 bp, Artificial sequence
  synthetic
cgatttctttacatttgatg

SEQ ID NO: 24034 - DNA, 20 bp, Artificial sequence
  synthetic
ggatggtgtgccttttgttg

SEQ ID NO: 24035 - DNA, 20 bp, Artificial sequence
  synthetic
tatgccaaacctactacgta

SEQ ID NO: 24036 - DNA, 20 bp, Artificial sequence
  synthetic
tattgttccggccaaggtca

SEQ ID NO: 24037 - DNA, 20 bp, Artificial sequence
  synthetic
tattcgcgctaagcattatg

SEQ ID NO: 24038 - DNA, 20 bp, Artificial sequence
  synthetic
agaagctgttaaacgcgtgc

SEQ ID NO: 24039 - DNA, 20 bp, Artificial sequence
  synthetic
ggctgtggcgaaagctcctc

SEQ ID NO: 24040 - DNA, 20 bp, Artificial sequence
  synthetic
ttgtctccgctactttgcaa

SEQ ID NO: 24041 - DNA, 20 bp, Artificial sequence
  synthetic
acataaggactcttttaaag

SEQ ID NO: 24042 - DNA, 20 bp, Artificial sequence
  synthetic
tatgactttctatcctcgtt

SEQ ID NO: 24043 - DNA, 20 bp, Artificial sequence
  synthetic
gcatgccaattatttgtttt

SEQ ID NO: 24044 - DNA, 20 bp, Artificial sequence
  synthetic
agttttagatgttaaaggtg

SEQ ID NO: 24045 - DNA, 20 bp, Artificial sequence
  synthetic
attcaattataaaatcacca

SEQ ID NO: 24046 - DNA, 20 bp, Artificial sequence
  synthetic
tttagatgtggtacgtaaag

SEQ ID NO: 24047 - DNA, 20 bp, Artificial sequence
  synthetic
gtacttcagatactagttat

SEQ ID NO: 24048 - DNA, 20 bp, Artificial sequence
  synthetic
gtgttgtttcctgtttatat

SEQ ID NO: 24049 - DNA, 20 bp, Artificial sequence
  synthetic
tagcaccacctactggtgtt

SEQ ID NO: 24050 - DNA, 20 bp, Artificial sequence
  synthetic
atgcacaacactgtttcaaa

SEQ ID NO: 24051 - DNA, 20 bp, Artificial sequence
  synthetic
aaagttataaaggcatcaaa

SEQ ID NO: 24052 - DNA, 20 bp, Artificial sequence
  synthetic
catatgaatattatgtaaaa

SEQ ID NO: 24053 - DNA, 20 bp, Artificial sequence
  synthetic
ggaatgttgtaccctactat

SEQ ID NO: 24054 - DNA, 20 bp, Artificial sequence
  synthetic
cgactaggtttccgcctggc

SEQ ID NO: 24055 - DNA, 20 bp, Artificial sequence
  synthetic
aaaatgataatataagtgtt

SEQ ID NO: 24056 - DNA, 20 bp, Artificial sequence
  synthetic
cagaaaagtcgagataaggc

SEQ ID NO: 24057 - DNA, 20 bp, Artificial sequence
  synthetic
gctgcacaaggttttcaggc

SEQ ID NO: 24058 - DNA, 20 bp, Artificial sequence
  synthetic
aacagcaattatgttcttca

SEQ ID NO: 24059 - DNA, 20 bp, Artificial sequence
  synthetic
atgtttgtggcatcatcttc

SEQ ID NO: 24060 - DNA, 20 bp, Artificial sequence
  synthetic
cttgttcgtttgactactga

SEQ ID NO: 24061 - DNA, 20 bp, Artificial sequence
  synthetic
aagattgttgttattgctgg

SEQ ID NO: 24062 - DNA, 20 bp, Artificial sequence
  synthetic
tctgctacagatgccattat

SEQ ID NO: 24063 - DNA, 20 bp, Artificial sequence
  synthetic
gttgaaaagtttaattttgt

SEQ ID NO: 24064 - DNA, 20 bp, Artificial sequence
  synthetic
tgcatcaaatattatgctgt

SEQ ID NO: 24065 - DNA, 20 bp, Artificial sequence
  synthetic
gaggttgatataattgaaca

SEQ ID NO: 24066 - DNA, 20 bp, Artificial sequence
  synthetic
gaagctggtgaagttaaacc

SEQ ID NO: 24067 - DNA, 20 bp, Artificial sequence
  synthetic
attccacttatgcctcttct

SEQ ID NO: 24068 - DNA, 20 bp, Artificial sequence
  synthetic
ggttaccctaatgattttgt

SEQ ID NO: 24069 - DNA, 20 bp, Artificial sequence
  synthetic
gataacggtcactatgtagt

SEQ ID NO: 24070 - DNA, 20 bp, Artificial sequence
  synthetic
cttgatactggtgcacaaaa

SEQ ID NO: 24071 - DNA, 20 bp, Artificial sequence
  synthetic
tttgttagacatattattgt

SEQ ID NO: 24072 - DNA, 20 bp, Artificial sequence
  synthetic
gatggtcttatagaccttct

SEQ ID NO: 24073 - DNA, 20 bp, Artificial sequence
  synthetic
ggtgctcatgttggttctga

SEQ ID NO: 24074 - DNA, 20 bp, Artificial sequence
  synthetic
gatggttttaatgaatgggc

SEQ ID NO: 24075 - DNA, 20 bp, Artificial sequence
  synthetic
agtgctatgcactctttact

SEQ ID NO: 24076 - DNA, 20 bp, Artificial sequence
  synthetic
tgtgatggttctgttcatta

SEQ ID NO: 24077 - DNA, 20 bp, Artificial sequence
  synthetic
cttttaactgcttgtgcttt

SEQ ID NO: 24078 - DNA, 20 bp, Artificial sequence
  synthetic
gcgtctatttgtttgtattg

SEQ ID NO: 24079 - DNA, 20 bp, Artificial sequence
  synthetic
tgtgaccgtacaactattca

SEQ ID NO: 24080 - DNA, 20 bp, Artificial sequence
  synthetic
ttcgttttaaaaatgctgat

SEQ ID NO: 24081 - DNA, 20 bp, Artificial sequence
  synthetic
gacataatcttactaaatat

SEQ ID NO: 24082 - DNA, 20 bp, Artificial sequence
  synthetic
tttatgcatctcttggcaaa

SEQ ID NO: 24083 - DNA, 20 bp, Artificial sequence
  synthetic
ttttagatatttgtcaagct

SEQ ID NO: 24084 - DNA, 20 bp, Artificial sequence
  synthetic
tgttgggctctaagcatgtt

SEQ ID NO: 24085 - DNA, 20 bp, Artificial sequence
  synthetic
tttcaatgatgattctctct

SEQ ID NO: 24086 - DNA, 20 bp, Artificial sequence
  synthetic
ctggtagtggtaagtcacat

SEQ ID NO: 24087 - DNA, 20 bp, Artificial sequence
  synthetic
gtgatccacaacaacttcct

SEQ ID NO: 24088 - DNA, 20 bp, Artificial sequence
  synthetic
atgcctctggtgatgctgtt

SEQ ID NO: 24089 - DNA, 20 bp, Artificial sequence
  synthetic
gtgttattcatgacattggt

SEQ ID NO: 24090 - DNA, 20 bp, Artificial sequence
  synthetic
acagtgattgtgatgttgtg

SEQ ID NO: 24091 - DNA, 20 bp, Artificial sequence
  synthetic
cttttatagctggtaacact

SEQ ID NO: 24092 - DNA, 20 bp, Artificial sequence
  synthetic
caattcttcaactattgtta

SEQ ID NO: 24093 - DNA, 20 bp, Artificial sequence
  synthetic
tgattgtaatggttatactg

SEQ ID NO: 24094 - DNA, 20 bp, Artificial sequence
  synthetic
ccagttttatattaatggtt

SEQ ID NO: 24095 - DNA, 20 bp, Artificial sequence
  synthetic
tggtattcgtgagtttagta

SEQ ID NO: 24096 - DNA, 20 bp, Artificial sequence
  synthetic
ccttgcttgtgctcagtact

SEQ ID NO: 24097 - DNA, 20 bp, Artificial sequence
  synthetic
gttgcttgttttgttttaaa

SEQ ID NO: 24098 - DNA, 20 bp, Artificial sequence
  synthetic
ctacaacttatgcgtaaggt

SEQ ID NO: 24099 - DNA, 20 bp, Artificial sequence
  synthetic
accacaattgtttgtgaccg

SEQ ID NO: 24100 - DNA, 20 bp, Artificial sequence
  synthetic
tgtaaattgggccgatgaca

SEQ ID NO: 24101 - DNA, 20 bp, Artificial sequence
  synthetic
ttggaagcgtgttcctacca

SEQ ID NO: 24102 - DNA, 20 bp, Artificial sequence
  synthetic
taggccagtgatagtaaagt

SEQ ID NO: 24103 - DNA, 20 bp, Artificial sequence
  synthetic
acaattatggtctagtcaaa

SEQ ID NO: 24104 - DNA, 20 bp, Artificial sequence
  synthetic
tgtttgaaggaaggcttttc

SEQ ID NO: 24105 - DNA, 20 bp, Artificial sequence
  synthetic
taactggagacaatagtaaa

SEQ ID NO: 24106 - DNA, 20 bp, Artificial sequence
  synthetic
atggtgggaaactgatgaac

SEQ ID NO: 24107 - DNA, 20 bp, Artificial sequence
  synthetic
aaaatgaagcagtagtttca

SEQ ID NO: 24108 - DNA, 20 bp, Artificial sequence
  synthetic
cagtgtctttacaaaatgag

SEQ ID NO: 24109 - DNA, 20 bp, Artificial sequence
  synthetic
ttcgacaaatacgtctacca

SEQ ID NO: 24110 - DNA, 20 bp, Artificial sequence
  synthetic
aaggagagtcagttattgga

SEQ ID NO: 24111 - DNA, 20 bp, Artificial sequence
  synthetic
ttggagaagctgatgatcac

SEQ ID NO: 24112 - DNA, 20 bp, Artificial sequence
  synthetic
gttgtcaaaactttattttc

SEQ ID NO: 24113 - DNA, 20 bp, Artificial sequence
  synthetic
cccctcttgacacaaaaatt

SEQ ID NO: 24114 - DNA, 20 bp, Artificial sequence
  synthetic
agatgagtttgccaatttct

SEQ ID NO: 24115 - DNA, 20 bp, Artificial sequence
  synthetic
ttcaagagaaggcgctcaaa

SEQ ID NO: 24116 - DNA, 20 bp, Artificial sequence
  synthetic
tagtaaaaatcataattgaa

SEQ ID NO: 24117 - DNA, 20 bp, Artificial sequence
  synthetic
ccatcagccacaatgctcaa

SEQ ID NO: 24118 - DNA, 20 bp, Artificial sequence
  synthetic
ctgcaaaaatatcgtcagca

SEQ ID NO: 24119 - DNA, 20 bp, Artificial sequence
  synthetic
tatttggccctattggagtc

SEQ ID NO: 24120 - DNA, 20 bp, Artificial sequence
  synthetic
gctgcagcaacaggtgacac

SEQ ID NO: 24121 - DNA, 20 bp, Artificial sequence
  synthetic
cctatcgcaaccagttcccc

SEQ ID NO: 24122 - DNA, 20 bp, Artificial sequence
  synthetic
cagtgtccagtcacttgctc

SEQ ID NO: 24123 - DNA, 20 bp, Artificial sequence
  synthetic
aggaatgattacaactgtga

SEQ ID NO: 24124 - DNA, 20 bp, Artificial sequence
  synthetic
gaaagcaatcatccgcagtg

SEQ ID NO: 24125 - DNA, 20 bp, Artificial sequence
  synthetic
caatccacgtcaatcaataa

SEQ ID NO: 24126 - DNA, 20 bp, Artificial sequence
  synthetic
aattgttaagtatccgagaa

SEQ ID NO: 24127 - DNA, 20 bp, Artificial sequence
  synthetic
tctattggcaggagcaggca

SEQ ID NO: 24128 - DNA, 20 bp, Artificial sequence
  synthetic
ggcccaattaccaacacgtg

SEQ ID NO: 24129 - DNA, 20 bp, Artificial sequence
  synthetic
agtggttgggagctttctca

SEQ ID NO: 24130 - DNA, 20 bp, Artificial sequence
  synthetic
ctcacgatctgatctcagtg

SEQ ID NO: 24131 - DNA, 20 bp, Artificial sequence
  synthetic
ctgacacttggcccacttct

SEQ ID NO: 24132 - DNA, 20 bp, Artificial sequence
  synthetic
cctccagaacaacgaattat

SEQ ID NO: 24133 - DNA, 20 bp, Artificial sequence
  synthetic
accaatgagtgtttagttct

SEQ ID NO: 24134 - DNA, 20 bp, Artificial sequence
  synthetic
tatctcaacacagcaactca

SEQ ID NO: 24135 - DNA, 20 bp, Artificial sequence
  synthetic
tcctcatctctcttaggaca

SEQ ID NO: 24136 - DNA, 20 bp, Artificial sequence
  synthetic
tggcatgactcagactggaa

SEQ ID NO: 24137 - DNA, 20 bp, Artificial sequence
  synthetic
gagaatcatacactaacata

SEQ ID NO: 24138 - DNA, 20 bp, Artificial sequence
  synthetic
actaatttgatatccccatt

SEQ ID NO: 24139 - DNA, 20 bp, Artificial sequence
  synthetic
ttcaagaaatgttttgatgc

SEQ ID NO: 24140 - DNA, 20 bp, Artificial sequence
  synthetic
aacttattagggagaaaacc

SEQ ID NO: 24141 - DNA, 20 bp, Artificial sequence
  synthetic
tccaataggaagcttaatga

SEQ ID NO: 24142 - DNA, 20 bp, Artificial sequence
  synthetic
atccgtgtaccgtacattgg

SEQ ID NO: 24143 - DNA, 20 bp, Artificial sequence
  synthetic
agagttaacatcacacttga

SEQ ID NO: 24144 - DNA, 20 bp, Artificial sequence
  synthetic
caaatgtattatctgagggt

SEQ ID NO: 24145 - DNA, 20 bp, Artificial sequence
  synthetic
tttgcatctctggactacat

SEQ ID NO: 24146 - DNA, 20 bp, Artificial sequence
  synthetic
aggtaccttgagcgattaaa

SEQ ID NO: 24147 - DNA, 20 bp, Artificial sequence
  synthetic
gtacatgtagatttggaatc

SEQ ID NO: 24148 - DNA, 20 bp, Artificial sequence
  synthetic
atagaatttgaacaattgat

SEQ ID NO: 24149 - DNA, 20 bp, Artificial sequence
  synthetic
taacctggctcctcctacaa

SEQ ID NO: 24150 - DNA, 20 bp, Artificial sequence
  synthetic
tcctttgccagtttgtttct

SEQ ID NO: 24151 - DNA, 20 bp, Artificial sequence
  synthetic
atcaagttcctactaataca

SEQ ID NO: 24152 - DNA, 20 bp, Artificial sequence
  synthetic
gcccacgggagcacgctggc

SEQ ID NO: 24153 - DNA, 20 bp, Artificial sequence
  synthetic
tctgatgataatcctgatga

SEQ ID NO: 24154 - DNA, 20 bp, Artificial sequence
  synthetic
ccagacagggggcagagcaa

SEQ ID NO: 24155 - DNA, 20 bp, Artificial sequence
  synthetic
actctccagagtatgacccc

SEQ ID NO: 24156 - DNA, 20 bp, Artificial sequence
  synthetic
gagcccattgcttttagcac

SEQ ID NO: 24157 - DNA, 20 bp, Artificial sequence
  synthetic
cctagacataattcatgcag

SEQ ID NO: 24158 - DNA, 20 bp, Artificial sequence
  synthetic
aaccagcccaaagggcctcc

SEQ ID NO: 24159 - DNA, 20 bp, Artificial sequence
  synthetic
gggtacacttgccaatacgc

SEQ ID NO: 24160 - DNA, 20 bp, Artificial sequence
  synthetic
aatgggctgaaaattgctac

SEQ ID NO: 24161 - DNA, 20 bp, Artificial sequence
  synthetic
caccaggaagtattcggacc

SEQ ID NO: 24162 - DNA, 20 bp, Artificial sequence
  synthetic
caaccatatgcagatctcca

SEQ ID NO: 24163 - DNA, 20 bp, Artificial sequence
  synthetic
aacaacagaagcacccactc

SEQ ID NO: 24164 - DNA, 20 bp, Artificial sequence
  synthetic
taagtgcaatcccaacttac

SEQ ID NO: 24165 - DNA, 20 bp, Artificial sequence
  synthetic
atattgatgaagattaagaa

SEQ ID NO: 24166 - DNA, 20 bp, Artificial sequence
  synthetic
cctgcaccaggggaatatac

SEQ ID NO: 24167 - DNA, 20 bp, Artificial sequence
  synthetic
attatacagtctaaacttgt

SEQ ID NO: 24168 - DNA, 20 bp, Artificial sequence
  synthetic
agccacaggccggtacaact

SEQ ID NO: 24169 - DNA, 20 bp, Artificial sequence
  synthetic
cctctattttatgatggcta

SEQ ID NO: 24170 - DNA, 20 bp, Artificial sequence
  synthetic
aaaatacaatctggccttca

SEQ ID NO: 24171 - DNA, 20 bp, Artificial sequence
  synthetic
tttctctgttcggatcttac

SEQ ID NO: 24172 - DNA, 20 bp, Artificial sequence
  synthetic
tttccttcgtcagattgtca

SEQ ID NO: 24173 - DNA, 20 bp, Artificial sequence
  synthetic
agcaattcaaccaattaagt

SEQ ID NO: 24174 - DNA, 20 bp, Artificial sequence
  synthetic
aaacaattctagtccatatg

SEQ ID NO: 24175 - DNA, 20 bp, Artificial sequence
  synthetic
caactgcaacttatcgattg

SEQ ID NO: 24176 - DNA, 20 bp, Artificial sequence
  synthetic
tcaacagcaagtacaaagag

SEQ ID NO: 24177 - DNA, 20 bp, Artificial sequence
  synthetic
ttcaaggtttctaagacgcc

SEQ ID NO: 24178 - DNA, 20 bp, Artificial sequence
  synthetic
gaagaggaccagtgcgattc

SEQ ID NO: 24179 - DNA, 20 bp, Artificial sequence
  synthetic
ggggcacaaaaaagaagaga

SEQ ID NO: 24180 - DNA, 20 bp, Artificial sequence
  synthetic
gaagcaacaatggacaaagg

SEQ ID NO: 24181 - DNA, 20 bp, Artificial sequence
  synthetic
acaagccgaccattgacatt

SEQ ID NO: 24182 - DNA, 20 bp, Artificial sequence
  synthetic
tccttgtccatagagaatgg

SEQ ID NO: 24183 - DNA, 20 bp, Artificial sequence
  synthetic
ctgttccagtgtctttctcg

SEQ ID NO: 24184 - DNA, 20 bp, Artificial sequence
  synthetic
agtacacgggatctgacgga

SEQ ID NO: 24185 - DNA, 20 bp, Artificial sequence
  synthetic
aggtctttggaggagccttc

SEQ ID NO: 24186 - DNA, 20 bp, Artificial sequence
  synthetic
ccgtctcacgtctggaacac

SEQ ID NO: 24187 - DNA, 20 bp, Artificial sequence
  synthetic
acactactgactgcgacagc

SEQ ID NO: 24188 - DNA, 20 bp, Artificial sequence
  synthetic
gcgtcagtgcccatcggagt

SEQ ID NO: 24189 - DNA, 20 bp, Artificial sequence
  synthetic
tctttcagatggcggccacc

SEQ ID NO: 24190 - DNA, 20 bp, Artificial sequence
  synthetic
gaatcactctcatcatcatc

SEQ ID NO: 24191 - DNA, 20 bp, Artificial sequence
  synthetic
ttcttcacaccctgtggcac

SEQ ID NO: 24192 - DNA, 20 bp, Artificial sequence
  synthetic
gaaaggcagccataaacatc

SEQ ID NO: 24193 - DNA, 20 bp, Artificial sequence
  synthetic
atgtcagtgccatcgtgcaa

SEQ ID NO: 24194 - DNA, 20 bp, Artificial sequence
  synthetic
cagctgtgctggctccaacc

SEQ ID NO: 24195 - DNA, 20 bp, Artificial sequence
  synthetic
caaactacaacctctttgtg

SEQ ID NO: 24196 - DNA, 20 bp, Artificial sequence
  synthetic
ctagtgctagtgctgcccag

SEQ ID NO: 24197 - DNA, 20 bp, Artificial sequence
  synthetic
gaccaaggtcaaacatcatt

SEQ ID NO: 24198 - DNA, 20 bp, Artificial sequence
  synthetic
ttgaagtcctggggagaatg

SEQ ID NO: 24199 - DNA, 20 bp, Artificial sequence
  synthetic
cagcaggagttttcttgctc

SEQ ID NO: 24200 - DNA, 20 bp, Artificial sequence
  synthetic
ccatgaacgctttggcattg

SEQ ID NO: 24201 - DNA, 20 bp, Artificial sequence
  synthetic
gaatcatgaaaaatgctgtg

SEQ ID NO: 24202 - DNA, 20 bp, Artificial sequence
  synthetic
tatcagcggcactcctgact

SEQ ID NO: 24203 - DNA, 20 bp, Artificial sequence
  synthetic
ggaaccttgtcactatgaag

SEQ ID NO: 24204 - DNA, 20 bp, Artificial sequence
  synthetic
accatgacaaggaccaccca

SEQ ID NO: 24205 - DNA, 20 bp, Artificial sequence
  synthetic
ctggcacagatgggaagacc

SEQ ID NO: 24206 - DNA, 20 bp, Artificial sequence
  synthetic
tgagagccattattggccag

SEQ ID NO: 24207 - DNA, 20 bp, Artificial sequence
  synthetic
tcagaaccgtttcggagagg

SEQ ID NO: 24208 - DNA, 20 bp, Artificial sequence
  synthetic
aaggactagaggttagagga

SEQ ID NO: 24209 - DNA, 20 bp, Artificial sequence
  synthetic
tacaagaggacttcatttga

SEQ ID NO: 24210 - DNA, 20 bp, Artificial sequence
  synthetic
tcaagtgcaatccaatcaaa

SEQ ID NO: 24211 - DNA, 20 bp, Artificial sequence
  synthetic
agctggtgttccaaccacca

SEQ ID NO: 24212 - DNA, 20 bp, Artificial sequence
  synthetic
tgatgtagagtttttcttct

SEQ ID NO: 24213 - DNA, 20 bp, Artificial sequence
  synthetic
tctggagccgctagaagaga

SEQ ID NO: 24214 - DNA, 20 bp, Artificial sequence
  synthetic
gaaaatacttgagtcaaaga

SEQ ID NO: 24215 - DNA, 20 bp, Artificial sequence
  synthetic
gttgactggttacagaaggg

SEQ ID NO: 24216 - DNA, 20 bp, Artificial sequence
  synthetic
gcatgaccaacgcatcattg

SEQ ID NO: 24217 - DNA, 20 bp, Artificial sequence
  synthetic
actctggccaacatctgagc

SEQ ID NO: 24218 - DNA, 20 bp, Artificial sequence
  synthetic
aacttcacttcaaccatcgg

SEQ ID NO: 24219 - DNA, 20 bp, Artificial sequence
  synthetic
tctggtcttggacacctaca

SEQ ID NO: 24220 - DNA, 20 bp, Artificial sequence
  synthetic
gccaaagaaaatctgggagg

SEQ ID NO: 24221 - DNA, 20 bp, Artificial sequence
  synthetic
atagcccctcctaatgaggt

SEQ ID NO: 24222 - DNA, 20 bp, Artificial sequence
  synthetic
atgcacaaacgcagtataga

SEQ ID NO: 24223 - DNA, 20 bp, Artificial sequence
  synthetic
ctgactttccatatgctcca

SEQ ID NO: 24224 - DNA, 20 bp, Artificial sequence
  synthetic
atcgacaatcatccccaggt

SEQ ID NO: 24225 - DNA, 20 bp, Artificial sequence
  synthetic
ttgacacgctcaaggatgag

SEQ ID NO: 24226 - DNA, 20 bp, Artificial sequence
  synthetic
aaaacgtttctcttctggtt

SEQ ID NO: 24227 - DNA, 20 bp, Artificial sequence
  synthetic
ctcgcgtcgctcttccaatt

SEQ ID NO: 24228 - DNA, 20 bp, Artificial sequence
  synthetic
ataaagtagataaggcaaga

SEQ ID NO: 24229 - DNA, 20 bp, Artificial sequence
  synthetic
atagtgtagctttagctttg

SEQ ID NO: 24230 - DNA, 20 bp, Artificial sequence
  synthetic
acgataaagtggataccgca

SEQ ID NO: 24231 - DNA, 20 bp, Artificial sequence
  synthetic
ccaatgaagcatcaggaaac

SEQ ID NO: 24232 - DNA, 20 bp, Artificial sequence
  synthetic
ggtattaaatatgttgcaca

SEQ ID NO: 24233 - DNA, 20 bp, Artificial sequence
  synthetic
gtaggttgtaaatctattgt

SEQ ID NO: 24234 - DNA, 20 bp, Artificial sequence
  synthetic
tcatcttatgagtattgtca

SEQ ID NO: 24235 - DNA, 20 bp, Artificial sequence
  synthetic
ttaaactcttgtaaagagca

SEQ ID NO: 24236 - DNA, 20 bp, Artificial sequence
  synthetic
gaagatgttgttactggtga

SEQ ID NO: 24237 - DNA, 20 bp, Artificial sequence
  synthetic
gtagatgatattgaaagtat

SEQ ID NO: 24238 - DNA, 20 bp, Artificial sequence
  synthetic
acattacatttttcattatt

SEQ ID NO: 24239 - DNA, 20 bp, Artificial sequence
  synthetic
ggagttgcaaaagctatagc

SEQ ID NO: 24240 - DNA, 20 bp, Artificial sequence
  synthetic
cttcgtcatgatatacaatt

SEQ ID NO: 24241 - DNA, 20 bp, Artificial sequence
  synthetic
cattttaaatttgatgaacc

SEQ ID NO: 24242 - DNA, 20 bp, Artificial sequence
  synthetic
gatctttttaatggttataa

SEQ ID NO: 24243 - DNA, 20 bp, Artificial sequence
  synthetic
ttgaaatgtggttcacctta

SEQ ID NO: 24244 - DNA, 20 bp, Artificial sequence
  synthetic
agaattgttatgtggataaa

SEQ ID NO: 24245 - DNA, 20 bp, Artificial sequence
  synthetic
gaagtagatagacgtgtttt

SEQ ID NO: 24246 - DNA, 20 bp, Artificial sequence
  synthetic
tttgctagtgatagtgttca

SEQ ID NO: 24247 - DNA, 20 bp, Artificial sequence
  synthetic
tgggttttgaataatgatta

SEQ ID NO: 24248 - DNA, 20 bp, Artificial sequence
  synthetic
gacaaagtttattgtcctcg

SEQ ID NO: 24249 - DNA, 20 bp, Artificial sequence
  synthetic
tttagttgtataatttctgc

SEQ ID NO: 24250 - DNA, 20 bp, Artificial sequence
  synthetic
tatgtaaattatttagttgt

SEQ ID NO: 24251 - DNA, 20 bp, Artificial sequence
  synthetic
gaacgtgataaagctgtagc

SEQ ID NO: 24252 - DNA, 20 bp, Artificial sequence
  synthetic
gataatgctgttaaaggttg

SEQ ID NO: 24253 - DNA, 20 bp, Artificial sequence
  synthetic
gtttgtctcttaaagattta

SEQ ID NO: 24254 - DNA, 20 bp, Artificial sequence
  synthetic
ctagtaagggttatatagct

SEQ ID NO: 24255 - DNA, 20 bp, Artificial sequence
  synthetic
ctttgcgttgtggcagttgt

SEQ ID NO: 24256 - DNA, 20 bp, Artificial sequence
  synthetic
gtttaaagttatttgctgca

SEQ ID NO: 24257 - DNA, 20 bp, Artificial sequence
  synthetic
tagtttatactgctgctagt

SEQ ID NO: 24258 - DNA, 20 bp, Artificial sequence
  synthetic
agagagtctctttatggaat

SEQ ID NO: 24259 - DNA, 20 bp, Artificial sequence
  synthetic
ttttatcgtgccttatattc

SEQ ID NO: 24260 - DNA, 20 bp, Artificial sequence
  synthetic
ataattttgatgaatctaag

SEQ ID NO: 24261 - DNA, 20 bp, Artificial sequence
  synthetic
gtcataaaccaccttctgct

SEQ ID NO: 24262 - DNA, 20 bp, Artificial sequence
  synthetic
attgtgcagggttcggtgtt

SEQ ID NO: 24263 - DNA, 20 bp, Artificial sequence
  synthetic
agtatggcactttttgtgat

SEQ ID NO: 24264 - DNA, 20 bp, Artificial sequence
  synthetic
ctcctattttgtctgaatct

SEQ ID NO: 24265 - DNA, 20 bp, Artificial sequence
  synthetic
ttaatttttgtggtaatggt

SEQ ID NO: 24266 - DNA, 20 bp, Artificial sequence
  synthetic
ttggtgtcgcaagtttggca

SEQ ID NO: 24267 - DNA, 20 bp, Artificial sequence
  synthetic
ttgtgccattacaacaggca

SEQ ID NO: 24268 - DNA, 20 bp, Artificial sequence
  synthetic
caacgactgggccagcaacc

SEQ ID NO: 24269 - DNA, 20 bp, Artificial sequence
  synthetic
acatcaccaagattgtgtac

SEQ ID NO: 24270 - DNA, 20 bp, Artificial sequence
  synthetic
gcattgacgttgaccaaacc

SEQ ID NO: 24271 - DNA, 20 bp, Artificial sequence
  synthetic
agaatgaagggggtgggtac

SEQ ID NO: 24272 - DNA, 20 bp, Artificial sequence
  synthetic
ttggttccgtgggcggcttc

SEQ ID NO: 24273 - DNA, 20 bp, Artificial sequence
  synthetic
tggccacaggtggactcatc

SEQ ID NO: 24274 - DNA, 20 bp, Artificial sequence
  synthetic
ctgcagcgctcgtggaggca

SEQ ID NO: 24275 - DNA, 20 bp, Artificial sequence
  synthetic
tgcatgtcatggacttgcgt

SEQ ID NO: 24276 - DNA, 20 bp, Artificial sequence
  synthetic
tgcgcgtgaaacgagaacca

SEQ ID NO: 24277 - DNA, 20 bp, Artificial sequence
  synthetic
gtgcctggaacctgccaacc

SEQ ID NO: 24278 - DNA, 20 bp, Artificial sequence
  synthetic
atccaggtgcggggaagact

SEQ ID NO: 24279 - DNA, 20 bp, Artificial sequence
  synthetic
ggaataacatcaagcctgag

SEQ ID NO: 24280 - DNA, 20 bp, Artificial sequence
  synthetic
ggaaagaagcccaaatgctg

SEQ ID NO: 24281 - DNA, 20 bp, Artificial sequence
  synthetic
tggcatggcatgtggctaag

SEQ ID NO: 24282 - DNA, 20 bp, Artificial sequence
  synthetic
aggggcgtgacatccgagag

SEQ ID NO: 24283 - DNA, 20 bp, Artificial sequence
  synthetic
atggacatatggcgggggtt

SEQ ID NO: 24284 - DNA, 20 bp, Artificial sequence
  synthetic
aggctgacttaggccagctt

SEQ ID NO: 24285 - DNA, 20 bp, Artificial sequence
  synthetic
tggtcaacagtgccgtggtg

SEQ ID NO: 24286 - DNA, 20 bp, Artificial sequence
  synthetic
ccctggctgtgtccctcaac

SEQ ID NO: 24287 - DNA, 20 bp, Artificial sequence
  synthetic
gtggagagacaaacatgggg

SEQ ID NO: 24288 - DNA, 20 bp, Artificial sequence
  synthetic
ccatcggagggaaaggacac

SEQ ID NO: 24289 - DNA, 20 bp, Artificial sequence
  synthetic
gcagagtgatccagctcatg

SEQ ID NO: 24290 - DNA, 20 bp, Artificial sequence
  synthetic
tgtactacacgacgggggtt

SEQ ID NO: 24291 - DNA, 20 bp, Artificial sequence
  synthetic
tggaagagaggatcaacgcc

SEQ ID NO: 24292 - DNA, 20 bp, Artificial sequence
  synthetic
aaggtgagggcgtcattggg

SEQ ID NO: 24293 - DNA, 20 bp, Artificial sequence
  synthetic
acatggcgaaagtgagaaag

SEQ ID NO: 24294 - DNA, 20 bp, Artificial sequence
  synthetic
ctgactgggcacggcacata

SEQ ID NO: 24295 - DNA, 20 bp, Artificial sequence
  synthetic
ggccgagtgggatgcgtatg

SEQ ID NO: 24296 - DNA, 20 bp, Artificial sequence
  synthetic
taaaacaggaagaagaccct

SEQ ID NO: 24297 - DNA, 20 bp, Artificial sequence
  synthetic
cattttccttataattattt

SEQ ID NO: 24298 - DNA, 20 bp, Artificial sequence
  synthetic
caggattggctttttcaatt

SEQ ID NO: 24299 - DNA, 20 bp, Artificial sequence
  synthetic
acagacggctcttccaatgg

SEQ ID NO: 24300 - DNA, 20 bp, Artificial sequence
  synthetic
tatggtgtcaaccctcgagg

SEQ ID NO: 24301 - DNA, 20 bp, Artificial sequence
  synthetic
tggaaagatccacttaccaa

SEQ ID NO: 24302 - DNA, 20 bp, Artificial sequence
  synthetic
tgttttggttttgcaacatg

SEQ ID NO: 24303 - DNA, 20 bp, Artificial sequence
  synthetic
gttttgtgaaaaattacctg

SEQ ID NO: 24304 - DNA, 20 bp, Artificial sequence
  synthetic
ttgtagacttgttcctgacg

SEQ ID NO: 24305 - DNA, 20 bp, Artificial sequence
  synthetic
agtcaagccaaccgcggagg

SEQ ID NO: 24306 - DNA, 20 bp, Artificial sequence
  synthetic
agggtatggtacagagtgta

SEQ ID NO: 24307 - DNA, 20 bp, Artificial sequence
  synthetic
gtagaaaatattgatagatt

SEQ ID NO: 24308 - DNA, 20 bp, Artificial sequence
  synthetic
ccttcttcggaccaacaacc

SEQ ID NO: 24309 - DNA, 20 bp, Artificial sequence
  synthetic
gccatttggaaacgccctga

SEQ ID NO: 24310 - DNA, 20 bp, Artificial sequence
  synthetic
catcaaccatggtctgtccg

SEQ ID NO: 24311 - DNA, 20 bp, Artificial sequence
  synthetic
atatggactaaaattcctaa

SEQ ID NO: 24312 - DNA, 20 bp, Artificial sequence
  synthetic
tgcgccgcgcgatcaggagg

SEQ ID NO: 24313 - DNA, 20 bp, Artificial sequence
  synthetic
taagtacgtagatactagcc

SEQ ID NO: 24314 - DNA, 20 bp, Artificial sequence
  synthetic
cgtcaacatggtggcataca

SEQ ID NO: 24315 - DNA, 20 bp, Artificial sequence
  synthetic
ggctgttgacagcactacca

SEQ ID NO: 24316 - DNA, 20 bp, Artificial sequence
  synthetic
attggaccatccttacgggt

SEQ ID NO: 24317 - DNA, 20 bp, Artificial sequence
  synthetic
tgcaggtctatcaaccacta

SEQ ID NO: 24318 - DNA, 20 bp, Artificial sequence
  synthetic
gccagagtgtagccaaagag

SEQ ID NO: 24319 - DNA, 20 bp, Artificial sequence
  synthetic
agacgttggtgcatagggtg

SEQ ID NO: 24320 - DNA, 20 bp, Artificial sequence
  synthetic
agtatgtgagcaaacaagac

SEQ ID NO: 24321 - DNA, 20 bp, Artificial sequence
  synthetic
atctatccatcattgagaat

SEQ ID NO: 24322 - DNA, 20 bp, Artificial sequence
  synthetic
ttgcagtatgatggtgatct

SEQ ID NO: 24323 - DNA, 20 bp, Artificial sequence
  synthetic
cccaactcaatccgattgat

SEQ ID NO: 24324 - DNA, 20 bp, Artificial sequence
  synthetic
ggcgggcaattgcaacaccc

SEQ ID NO: 24325 - DNA, 20 bp, Artificial sequence
  synthetic
tcaatatgctgagtacagtc

SEQ ID NO: 24326 - DNA, 20 bp, Artificial sequence
  synthetic
gcaaactagttggaatcaat

SEQ ID NO: 24327 - DNA, 20 bp, Artificial sequence
  synthetic
aggcaggactgttggtttca

SEQ ID NO: 24328 - DNA, 20 bp, Artificial sequence
  synthetic
gtcatgagggggaggggata

SEQ ID NO: 24329 - DNA, 20 bp, Artificial sequence
  synthetic
ctgttttcaacagtctatat

SEQ ID NO: 24330 - DNA, 20 bp, Artificial sequence
  synthetic
aaacagcagcacaaagagca

SEQ ID NO: 24331 - DNA, 20 bp, Artificial sequence
  synthetic
tggtgtttggatcgggagaa

SEQ ID NO: 24332 - DNA, 20 bp, Artificial sequence
  synthetic
aatttggactagtgggagca

SEQ ID NO: 24333 - DNA, 20 bp, Artificial sequence
  synthetic
ttatagagggaggatggcag

SEQ ID NO: 24334 - DNA, 20 bp, Artificial sequence
  synthetic
agcttagggataatgcaaag

SEQ ID NO: 24335 - DNA, 20 bp, Artificial sequence
  synthetic
ggtgcacttgccagttgtat

SEQ ID NO: 24336 - DNA, 20 bp, Artificial sequence
  synthetic
agagggccttctacggaagg

SEQ ID NO: 24337 - DNA, 20 bp, Artificial sequence
  synthetic
ctcaacaggtggaatatgcg

SEQ ID NO: 24338 - DNA, 20 bp, Artificial sequence
  synthetic
gggtttcatagaaaatggtt

SEQ ID NO: 24339 - DNA, 20 bp, Artificial sequence
  synthetic
gaagcaactgagggaaaatg

SEQ ID NO: 24340 - DNA, 20 bp, Artificial sequence
  synthetic
tgcgaccctgacaagtgtta

SEQ ID NO: 24341 - DNA, 20 bp, Artificial sequence
  synthetic
gtaatgactgatgggagtgc

SEQ ID NO: 24342 - DNA, 20 bp, Artificial sequence
  synthetic
cgaacggctgcattgagggc

SEQ ID NO: 24343 - DNA, 20 bp, Artificial sequence
  synthetic
tcccaaggactaaaaacatg

SEQ ID NO: 24344 - DNA, 20 bp, Artificial sequence
  synthetic
cccaactcaacccaattgat

SEQ ID NO: 24345 - DNA, 20 bp, Artificial sequence
  synthetic
tcaacatgctaagtacggtt

SEQ ID NO: 24346 - DNA, 20 bp, Artificial sequence
  synthetic
gtagttcatataggagaccg

SEQ ID NO: 24347 - DNA, 20 bp, Artificial sequence
  synthetic
cagaatcgcaattaacaata

SEQ ID NO: 24348 - DNA, 20 bp, Artificial sequence
  synthetic
caagcacagagatgtcaatg

SEQ ID NO: 24349 - DNA, 20 bp, Artificial sequence
  synthetic
acagaagatacggaccagca

SEQ ID NO: 24350 - DNA, 20 bp, Artificial sequence
  synthetic
accaaatgccaaactccttt

SEQ ID NO: 24351 - DNA, 20 bp, Artificial sequence
  synthetic
gtagcaggttctctgtcact

SEQ ID NO: 24352 - DNA, 20 bp, Artificial sequence
  synthetic
gcaaggagacgtggtgttgg

SEQ ID NO: 24353 - DNA, 20 bp, Artificial sequence
  synthetic
acgagagaaggaataaatat

SEQ ID NO: 24354 - DNA, 20 bp, Artificial sequence
  synthetic
cagctgggctgactcacatg

SEQ ID NO: 24355 - DNA, 20 bp, Artificial sequence
  synthetic
ggaacccaggaaatgctgag

SEQ ID NO: 24356 - DNA, 20 bp, Artificial sequence
  synthetic
catggttgcatgtttgtgtc

SEQ ID NO: 24357 - DNA, 20 bp, Artificial sequence
  synthetic
cttcaggaagagccgatact

SEQ ID NO: 24358 - DNA, 20 bp, Artificial sequence
  synthetic
ggtgcttttatgtggagttg

SEQ ID NO: 24359 - DNA, 20 bp, Artificial sequence
  synthetic
aagatatcaccattgattta

SEQ ID NO: 24360 - DNA, 20 bp, Artificial sequence
  synthetic
taaaagaaatggctgcacat

SEQ ID NO: 24361 - DNA, 20 bp, Artificial sequence
  synthetic
catatcctttagactataaa

SEQ ID NO: 24362 - DNA, 20 bp, Artificial sequence
  synthetic
ttcgggatactccaatcata

SEQ ID NO: 24363 - DNA, 20 bp, Artificial sequence
  synthetic
cgataatgtcaatatggaaa

SEQ ID NO: 24364 - DNA, 20 bp, Artificial sequence
  synthetic
ttttatcgctcaacattcat

SEQ ID NO: 24365 - DNA, 20 bp, Artificial sequence
  synthetic
agggctaaacatcttctatg

SEQ ID NO: 24366 - DNA, 20 bp, Artificial sequence
  synthetic
tacattctcctacaacatac

SEQ ID NO: 24367 - DNA, 20 bp, Artificial sequence
  synthetic
gcggccaagcaagaagagag

SEQ ID NO: 24368 - DNA, 20 bp, Artificial sequence
  synthetic
cattgtgagggctctagatg

SEQ ID NO: 24369 - DNA, 20 bp, Artificial sequence
  synthetic
ggacttcaaggtgatgaaga

SEQ ID NO: 24370 - DNA, 20 bp, Artificial sequence
  synthetic
cggatggggtaacggatgtg

SEQ ID NO: 24371 - DNA, 20 bp, Artificial sequence
  synthetic
ggactggtttcacgacttga

SEQ ID NO: 24372 - DNA, 20 bp, Artificial sequence
  synthetic
tgttagcagctcaaccctaa

SEQ ID NO: 24373 - DNA, 20 bp, Artificial sequence
  synthetic
aagcaacggaccctgccgag

SEQ ID NO: 24374 - DNA, 20 bp, Artificial sequence
  synthetic
caccacccagattaactacc

SEQ ID NO: 24375 - DNA, 20 bp, Artificial sequence
  synthetic
atgcgattcggcaatcatcg

SEQ ID NO: 24376 - DNA, 20 bp, Artificial sequence
  synthetic
gggagcgtcgctgcgcacaa

SEQ ID NO: 24377 - DNA, 20 bp, Artificial sequence
  synthetic
tggagttgcaggagggatgg

SEQ ID NO: 24378 - DNA, 20 bp, Artificial sequence
  synthetic
ggcggccaatgacttgaagc

SEQ ID NO: 24379 - DNA, 20 bp, Artificial sequence
  synthetic
gttgataattgggattgtaa

SEQ ID NO: 24380 - DNA, 20 bp, Artificial sequence
  synthetic
gttttggctacttggcaaac

SEQ ID NO: 24381 - DNA, 20 bp, Artificial sequence
  synthetic
ccaggttccggataaggcgt

SEQ ID NO: 24382 - DNA, 20 bp, Artificial sequence
  synthetic
agcacagcgcagaggccgca

SEQ ID NO: 24383 - DNA, 20 bp, Artificial sequence
  synthetic
gcgagataaggttttcacca

SEQ ID NO: 24384 - DNA, 20 bp, Artificial sequence
  synthetic
cacaatcctggaagacaaca

SEQ ID NO: 24385 - DNA, 20 bp, Artificial sequence
  synthetic
tagaatgccaaatcacttct

SEQ ID NO: 24386 - DNA, 20 bp, Artificial sequence
  synthetic
tatggatctatcggtgccat

SEQ ID NO: 24387 - DNA, 20 bp, Artificial sequence
  synthetic
agagatctggaagtcaagac

SEQ ID NO: 24388 - DNA, 20 bp, Artificial sequence
  synthetic
aagaggattcgtcaaaccca

SEQ ID NO: 24389 - DNA, 20 bp, Artificial sequence
  synthetic
taaaacctacatggatgtca

SEQ ID NO: 24390 - DNA, 20 bp, Artificial sequence
  synthetic
agcggtcgagtggctgagga

SEQ ID NO: 24391 - DNA, 20 bp, Artificial sequence
  synthetic
gcacaactggcaagaggtgc

SEQ ID NO: 24392 - DNA, 20 bp, Artificial sequence
  synthetic
gtatctagaccagcgcatgc

SEQ ID NO: 24393 - DNA, 20 bp, Artificial sequence
  synthetic
gagagcgaaggacagcgaag

SEQ ID NO: 24394 - DNA, 20 bp, Artificial sequence
  synthetic
gaaggagggtggggtcccta

SEQ ID NO: 24395 - DNA, 20 bp, Artificial sequence
  synthetic
aaagggagaagtgcacctgg

SEQ ID NO: 24396 - DNA, 20 bp, Artificial sequence
  synthetic
cctacagttgcaaaccctga

SEQ ID NO: 24397 - DNA, 20 bp, Artificial sequence
  synthetic
acagtacccccaggcttatc

SEQ ID NO: 24398 - DNA, 20 bp, Artificial sequence
  synthetic
tgaggtccaacgttactctg

SEQ ID NO: 24399 - DNA, 20 bp, Artificial sequence
  synthetic
tgggagggtgcttctcctac

SEQ ID NO: 24400 - DNA, 20 bp, Artificial sequence
  synthetic
ggttcactgcaccatgaacg

SEQ ID NO: 24401 - DNA, 20 bp, Artificial sequence
  synthetic
ggcccctgactcatcacccc

SEQ ID NO: 24402 - DNA, 20 bp, Artificial sequence
  synthetic
aggccaacttcctgtttacc

SEQ ID NO: 24403 - DNA, 20 bp, Artificial sequence
  synthetic
tcaagacttccgagctgtca

SEQ ID NO: 24404 - DNA, 20 bp, Artificial sequence
  synthetic
gcccaccacagtctccggac

SEQ ID NO: 24405 - DNA, 20 bp, Artificial sequence
  synthetic
atgtaaaggccaccaggtat

SEQ ID NO: 24406 - DNA, 20 bp, Artificial sequence
  synthetic
actgatggccatgaggtcct

SEQ ID NO: 24407 - DNA, 20 bp, Artificial sequence
  synthetic
caaaggtaaatcaggcgcac

SEQ ID NO: 24408 - DNA, 20 bp, Artificial sequence
  synthetic
aggatggaggaaggtcctaa

SEQ ID NO: 24409 - DNA, 20 bp, Artificial sequence
  synthetic
taggactctgaatggtaaaa

SEQ ID NO: 24410 - DNA, 20 bp, Artificial sequence
  synthetic
cctcaaggtagtctcacaca

SEQ ID NO: 24411 - DNA, 20 bp, Artificial sequence
  synthetic
tgatcaagtcaaagcagaga

SEQ ID NO: 24412 - DNA, 20 bp, Artificial sequence
  synthetic
tcgcgctgttgtctcacaac

SEQ ID NO: 24413 - DNA, 20 bp, Artificial sequence
  synthetic
tgaaatcattcgagcaggaa

SEQ ID NO: 24414 - DNA, 20 bp, Artificial sequence
  synthetic
ggctgttggggtgtataaga

SEQ ID NO: 24415 - DNA, 20 bp, Artificial sequence
  synthetic
tgtgaaagcgacaggacaag

SEQ ID NO: 24416 - DNA, 20 bp, Artificial sequence
  synthetic
ggcaggaccacctgtctatg

SEQ ID NO: 24417 - DNA, 20 bp, Artificial sequence
  synthetic
ttcgcaactagattctggct

SEQ ID NO: 24418 - DNA, 20 bp, Artificial sequence
  synthetic
tccgttccctagcacaaatc

SEQ ID NO: 24419 - DNA, 20 bp, Artificial sequence
  synthetic
tcattaccgactggaaaagt

SEQ ID NO: 24420 - DNA, 20 bp, Artificial sequence
  synthetic
tcaacgagaacatgatgata

SEQ ID NO: 24421 - DNA, 20 bp, Artificial sequence
  synthetic
atcttcaaaattgacttcac

SEQ ID NO: 24422 - DNA, 20 bp, Artificial sequence
  synthetic
gagtagcgtagagtgggctt

SEQ ID NO: 24423 - DNA, 20 bp, Artificial sequence
  synthetic
accgacgcagtgacagaaat

SEQ ID NO: 24424 - DNA, 20 bp, Artificial sequence
  synthetic
tctgtgttgacgactatgta

SEQ ID NO: 24425 - DNA, 20 bp, Artificial sequence
  synthetic
ctcacaagactgacctcgtt

SEQ ID NO: 24426 - DNA, 20 bp, Artificial sequence
  synthetic
cagacaatcaacatctcaat

SEQ ID NO: 24427 - DNA, 20 bp, Artificial sequence
  synthetic
cagacagccggctcgggcga

SEQ ID NO: 24428 - DNA, 20 bp, Artificial sequence
  synthetic
atggcgcagtccgctgctgc

SEQ ID NO: 24429 - DNA, 20 bp, Artificial sequence
  synthetic
acagtctcagattgcgcttt

SEQ ID NO: 24430 - DNA, 20 bp, Artificial sequence
  synthetic
gggggcagcccttagctaac

SEQ ID NO: 24431 - DNA, 20 bp, Artificial sequence
  synthetic
cgactgagcagtccacccca

SEQ ID NO: 24432 - DNA, 20 bp, Artificial sequence
  synthetic
cccagccagcgccggcgcag

SEQ ID NO: 24433 - DNA, 20 bp, Artificial sequence
  synthetic
tgcctctccgtttctgactt

SEQ ID NO: 24434 - DNA, 20 bp, Artificial sequence
  synthetic
accatgtcctcggaggcctt

SEQ ID NO: 24435 - DNA, 20 bp, Artificial sequence
  synthetic
cctataggcctggagctcct

SEQ ID NO: 24436 - DNA, 20 bp, Artificial sequence
  synthetic
aaaggaaattaatgagacag

SEQ ID NO: 24437 - DNA, 20 bp, Artificial sequence
  synthetic
cgaggtatggcagatatgct

SEQ ID NO: 24438 - DNA, 20 bp, Artificial sequence
  synthetic
tcaggttgcctctgtggatt

SEQ ID NO: 24439 - DNA, 20 bp, Artificial sequence
  synthetic
agctggtatggcatgcatgc

SEQ ID NO: 24440 - DNA, 20 bp, Artificial sequence
  synthetic
accatgctctggtgtaatga

SEQ ID NO: 24441 - DNA, 20 bp, Artificial sequence
  synthetic
cactaattcagccattgcca

SEQ ID NO: 24442 - DNA, 20 bp, Artificial sequence
  synthetic
gaatccaccacaggagccaa

SEQ ID NO: 24443 - DNA, 20 bp, Artificial sequence
  synthetic
tcggttctttgcctattttt

SEQ ID NO: 24444 - DNA, 20 bp, Artificial sequence
  synthetic
gacaattgacgttgagggga

SEQ ID NO: 24445 - DNA, 20 bp, Artificial sequence
  synthetic
tattttgattttgaaccgag

SEQ ID NO: 24446 - DNA, 20 bp, Artificial sequence
  synthetic
tgagtttgtctctcatttgc

SEQ ID NO: 24447 - DNA, 20 bp, Artificial sequence
  synthetic
taaagaaatagccaaattaa

SEQ ID NO: 24448 - DNA, 20 bp, Artificial sequence
  synthetic
tccaaaagcaagtgtagagg

SEQ ID NO: 24449 - DNA, 20 bp, Artificial sequence
  synthetic
tttggatgtggcaacagcca

SEQ ID NO: 24450 - DNA, 20 bp, Artificial sequence
  synthetic
cattgaaaaactagaaactg

SEQ ID NO: 24451 - DNA, 20 bp, Artificial sequence
  synthetic
ccagtatatggtgcaagatg

SEQ ID NO: 24452 - DNA, 20 bp, Artificial sequence
  synthetic
tgtgagtagtgatgttatac

SEQ ID NO: 24453 - DNA, 20 bp, Artificial sequence
  synthetic
aaacctccaaccttataatt

SEQ ID NO: 24454 - DNA, 20 bp, Artificial sequence
  synthetic
atggcaggtagaaggaggga

SEQ ID NO: 24455 - DNA, 20 bp, Artificial sequence
  synthetic
ggaagggaagatacagtggt

SEQ ID NO: 24456 - DNA, 20 bp, Artificial sequence
  synthetic
agcacatctcagccggtctc

SEQ ID NO: 24457 - DNA, 20 bp, Artificial sequence
  synthetic
attgatcgacgcttgcgctc

SEQ ID NO: 24458 - DNA, 20 bp, Artificial sequence
  synthetic
tggatgcgtgaattgctcgc

SEQ ID NO: 24459 - DNA, 20 bp, Artificial sequence
  synthetic
gaagttttggtgaaaaacat

SEQ ID NO: 24460 - DNA, 20 bp, Artificial sequence
  synthetic
ttcggatacgacggagtggt

SEQ ID NO: 24461 - DNA, 20 bp, Artificial sequence
  synthetic
ccgacccgggaacattcagt

SEQ ID NO: 24462 - DNA, 20 bp, Artificial sequence
  synthetic
ctggccggatcgtttgtgaa

SEQ ID NO: 24463 - DNA, 20 bp, Artificial sequence
  synthetic
atgacatcaatgttcgggac

SEQ ID NO: 24464 - DNA, 20 bp, Artificial sequence
  synthetic
gtactgctgaactatgttgt

SEQ ID NO: 24465 - DNA, 20 bp, Artificial sequence
  synthetic
gggttgtacgtgctctcaac

SEQ ID NO: 24466 - DNA, 20 bp, Artificial sequence
  synthetic
acaacacttccgtctggatt

SEQ ID NO: 24467 - DNA, 20 bp, Artificial sequence
  synthetic
aacgcgcccgagtggctacc

SEQ ID NO: 24468 - DNA, 20 bp, Artificial sequence
  synthetic
attgacagcattcgattctc

SEQ ID NO: 24469 - DNA, 20 bp, Artificial sequence
  synthetic
cgcaagcaggagacacagtt

SEQ ID NO: 24470 - DNA, 20 bp, Artificial sequence
  synthetic
gcgcctgaaagtcgaccccg

SEQ ID NO: 24471 - DNA, 20 bp, Artificial sequence
  synthetic
attgagattctccatgaaat

SEQ ID NO: 24472 - DNA, 20 bp, Artificial sequence
  synthetic
acaactgcacaacaaagccc

SEQ ID NO: 24473 - DNA, 20 bp, Artificial sequence
  synthetic
agcgctaataacgtgcaccg

SEQ ID NO: 24474 - DNA, 20 bp, Artificial sequence
  synthetic
atcggaggcatccagctcgc

SEQ ID NO: 24475 - DNA, 20 bp, Artificial sequence
  synthetic
aagacagacgcttgcggact

SEQ ID NO: 24476 - DNA, 20 bp, Artificial sequence
  synthetic
gtgtacgcgactgagccgcg

SEQ ID NO: 24477 - DNA, 20 bp, Artificial sequence
  synthetic
aatgacccggtgcagcagga

SEQ ID NO: 24478 - DNA, 20 bp, Artificial sequence
  synthetic
aactaccacgggtcatttgt

SEQ ID NO: 24479 - DNA, 20 bp, Artificial sequence
  synthetic
ttgagtggaatggtcgtggc

SEQ ID NO: 24480 - DNA, 20 bp, Artificial sequence
  synthetic
taccatcctctcgtgctgca

SEQ ID NO: 24481 - DNA, 20 bp, Artificial sequence
  synthetic
ccagtgaagacatggtcaga

SEQ ID NO: 24482 - DNA, 20 bp, Artificial sequence
  synthetic
ttgcggatacttgggcgata

SEQ ID NO: 24483 - DNA, 20 bp, Artificial sequence
  synthetic
aggttatgggagaataaccc

SEQ ID NO: 24484 - DNA, 20 bp, Artificial sequence
  synthetic
cccgcgacgctcgagaaggt

SEQ ID NO: 24485 - DNA, 20 bp, Artificial sequence
  synthetic
ttcagctgactggaagagaa

SEQ ID NO: 24486 - DNA, 20 bp, Artificial sequence
  synthetic
ggccactgacctgccactgc

SEQ ID NO: 24487 - DNA, 20 bp, Artificial sequence
  synthetic
ccgatggcaccagcctggga

SEQ ID NO: 24488 - DNA, 20 bp, Artificial sequence
  synthetic
attcggaggggttaattgga

SEQ ID NO: 24489 - DNA, 20 bp, Artificial sequence
  synthetic
gaaggagctgaaatgcggtg

SEQ ID NO: 24490 - DNA, 20 bp, Artificial sequence
  synthetic
aatcggattcctagactgga

SEQ ID NO: 24491 - DNA, 20 bp, Artificial sequence
  synthetic
cgcaattttgcaaaagcggg

SEQ ID NO: 24492 - DNA, 20 bp, Artificial sequence
  synthetic
cgtgacaacaacgcctggag

SEQ ID NO: 24493 - DNA, 20 bp, Artificial sequence
  synthetic
cgctcaggctgactcatgtg

SEQ ID NO: 24494 - DNA, 20 bp, Artificial sequence
  synthetic
caaggtggtgctgacagaga

SEQ ID NO: 24495 - DNA, 20 bp, Artificial sequence
  synthetic
agggctcatgaaggacaact

SEQ ID NO: 24496 - DNA, 20 bp, Artificial sequence
  synthetic
gctcgctccaaagggaacgt

SEQ ID NO: 24497 - DNA, 20 bp, Artificial sequence
  synthetic
ggataactacttggcatatt

SEQ ID NO: 24498 - DNA, 20 bp, Artificial sequence
  synthetic
atgggcagtttatgcctttg

SEQ ID NO: 24499 - DNA, 20 bp, Artificial sequence
  synthetic
gccggtttggaacacgcaag

SEQ ID NO: 24500 - DNA, 20 bp, Artificial sequence
  synthetic
taaaaaacagtttgagtcct

SEQ ID NO: 24501 - DNA, 20 bp, Artificial sequence
  synthetic
cctggagtttgaagccctag

SEQ ID NO: 24502 - DNA, 20 bp, Artificial sequence
  synthetic
cctgaggctcatggcaaacg

SEQ ID NO: 24503 - DNA, 20 bp, Artificial sequence
  synthetic
attgtccggacgcaggaaaa

SEQ ID NO: 24504 - DNA, 20 bp, Artificial sequence
  synthetic
caataccttggaagccggaa

SEQ ID NO: 24505 - DNA, 20 bp, Artificial sequence
  synthetic
agtagtcatcgccatactgc

SEQ ID NO: 24506 - DNA, 20 bp, Artificial sequence
  synthetic
gtggctcagttcaattgtgg

SEQ ID NO: 24507 - DNA, 20 bp, Artificial sequence
  synthetic
gggcaacggctgtggtcttt

SEQ ID NO: 24508 - DNA, 20 bp, Artificial sequence
  synthetic
caagtttgttcccacaacag

SEQ ID NO: 24509 - DNA, 20 bp, Artificial sequence
  synthetic
atcagattcgatggctggca

SEQ ID NO: 24510 - DNA, 20 bp, Artificial sequence
  synthetic
tggaatgtttgtcttcaaag

SEQ ID NO: 24511 - DNA, 20 bp, Artificial sequence
  synthetic
tataattgacggaaagagca

SEQ ID NO: 24512 - DNA, 20 bp, Artificial sequence
  synthetic
cgggcccgttagccgccaca

SEQ ID NO: 24513 - DNA, 20 bp, Artificial sequence
  synthetic
cctcatgctttttctttgta

SEQ ID NO: 24514 - DNA, 20 bp, Artificial sequence
  synthetic
aggagatgtgacacacctgg

SEQ ID NO: 24515 - DNA, 20 bp, Artificial sequence
  synthetic
gctgaatgcagctggcatgt

SEQ ID NO: 24516 - DNA, 20 bp, Artificial sequence
  synthetic
cagcgtctcaacaagaaagt

SEQ ID NO: 24517 - DNA, 20 bp, Artificial sequence
  synthetic
gaaggaagccatgcctaaaa

SEQ ID NO: 24518 - DNA, 20 bp, Artificial sequence
  synthetic
ggacccagctagcattgccg

SEQ ID NO: 24519 - DNA, 20 bp, Artificial sequence
  synthetic
cagccgcatgtcgatggcaa

SEQ ID NO: 24520 - DNA, 20 bp, Artificial sequence
  synthetic
tctgcttgttggagtgatga

SEQ ID NO: 24521 - DNA, 20 bp, Artificial sequence
  synthetic
aacactgcttcccctgtttg

SEQ ID NO: 24522 - DNA, 20 bp, Artificial sequence
  synthetic
tgctgtagcattcactgggc

SEQ ID NO: 24523 - DNA, 20 bp, Artificial sequence
  synthetic
ctggagctattattcggctg

SEQ ID NO: 24524 - DNA, 20 bp, Artificial sequence
  synthetic
ttgtgacataggggaatcat

SEQ ID NO: 24525 - DNA, 20 bp, Artificial sequence
  synthetic
ttcatccatgctgaatggca

SEQ ID NO: 24526 - DNA, 20 bp, Artificial sequence
  synthetic
agttgtcaactcctggctgt

SEQ ID NO: 24527 - DNA, 20 bp, Artificial sequence
  synthetic
gcttgtggatgaagaacgga

SEQ ID NO: 24528 - DNA, 20 bp, Artificial sequence
  synthetic
gtcagcccgtcataatgacg

SEQ ID NO: 24529 - DNA, 20 bp, Artificial sequence
  synthetic
caattgtaccggttttacat

SEQ ID NO: 24530 - DNA, 20 bp, Artificial sequence
  synthetic
tagtacgaacagtcgaggaa

SEQ ID NO: 24531 - DNA, 20 bp, Artificial sequence
  synthetic
tattgatgtctgcatagata

SEQ ID NO: 24532 - DNA, 20 bp, Artificial sequence
  synthetic
tgagtttacgaaggaaggat

SEQ ID NO: 24533 - DNA, 20 bp, Artificial sequence
  synthetic
tttagatatgtgtttggaga

SEQ ID NO: 24534 - DNA, 20 bp, Artificial sequence
  synthetic
tgtcataaacttcagtgatg

SEQ ID NO: 24535 - DNA, 20 bp, Artificial sequence
  synthetic
acacaatacggaactcgctt

SEQ ID NO: 24536 - DNA, 20 bp, Artificial sequence
  synthetic
cctgcgatgtgatgttcagg

SEQ ID NO: 24537 - DNA, 20 bp, Artificial sequence
  synthetic
gcatgtcttgactggctatg

SEQ ID NO: 24538 - DNA, 20 bp, Artificial sequence
  synthetic
aggtccaccccagctacaag

SEQ ID NO: 24539 - DNA, 20 bp, Artificial sequence
  synthetic
tgaagggaaacccacactag

SEQ ID NO: 24540 - DNA, 20 bp, Artificial sequence
  synthetic
catcgtcattggggtcggag

SEQ ID NO: 24541 - DNA, 20 bp, Artificial sequence
  synthetic
aaggtcaaaagtctccgctg

SEQ ID NO: 24542 - DNA, 20 bp, Artificial sequence
  synthetic
ggcttgtttcttacacctcg

SEQ ID NO: 24543 - DNA, 20 bp, Artificial sequence
  synthetic
aactttcagaatggcagtgg

SEQ ID NO: 24544 - DNA, 20 bp, Artificial sequence
  synthetic
tgaaggggtgtttcacacca

SEQ ID NO: 24545 - DNA, 20 bp, Artificial sequence
  synthetic
cataacagacacagaagctc

SEQ ID NO: 24546 - DNA, 20 bp, Artificial sequence
  synthetic
agctcaattgtatggccctg

SEQ ID NO: 24547 - DNA, 20 bp, Artificial sequence
  synthetic
tgatggaccagacaacaatt

SEQ ID NO: 24548 - DNA, 20 bp, Artificial sequence
  synthetic
aggccttctagaaggagttg

SEQ ID NO: 24549 - DNA, 20 bp, Artificial sequence
  synthetic
actcctgactcctccggatt

SEQ ID NO: 24550 - DNA, 20 bp, Artificial sequence
  synthetic
attctcaaaaatggactggg

SEQ ID NO: 24551 - DNA, 20 bp, Artificial sequence
  synthetic
cgctgcagccgccacgcttt

SEQ ID NO: 24552 - DNA, 20 bp, Artificial sequence
  synthetic
tctaggggagaaatggaaac

SEQ ID NO: 24553 - DNA, 20 bp, Artificial sequence
  synthetic
agtgttgtgcccgtacagac

SEQ ID NO: 24554 - DNA, 20 bp, Artificial sequence
  synthetic
tgaggaggagcatcaatggc

SEQ ID NO: 24555 - DNA, 20 bp, Artificial sequence
  synthetic
gatgtacgctgatgacacag

SEQ ID NO: 24556 - DNA, 20 bp, Artificial sequence
  synthetic
aaaaacatacatggacatca

SEQ ID NO: 24557 - DNA, 20 bp, Artificial sequence
  synthetic
agctcttctcctatggttgg

SEQ ID NO: 24558 - DNA, 20 bp, Artificial sequence
  synthetic
ttatgcgcaaatgtggaagt

SEQ ID NO: 24559 - DNA, 20 bp, Artificial sequence
  synthetic
cggaaggaataaccgcagtc

SEQ ID NO: 24560 - DNA, 20 bp, Artificial sequence
  synthetic
ggactagaggttagaggaga

SEQ ID NO: 24561 - DNA, 20 bp, Artificial sequence
  synthetic
ggacgtaggctacacttgcg

SEQ ID NO: 24562 - DNA, 20 bp, Artificial sequence
  synthetic
aagaatggaagccaaggacc

SEQ ID NO: 24563 - DNA, 20 bp, Artificial sequence
  synthetic
tctggatctaccctggactg

SEQ ID NO: 24564 - DNA, 20 bp, Artificial sequence
  synthetic
acgtcgtgagctgaaatgtg

SEQ ID NO: 24565 - DNA, 20 bp, Artificial sequence
  synthetic
aaccgaaacagccaactcca

SEQ ID NO: 24566 - DNA, 20 bp, Artificial sequence
  synthetic
gattggaacagccgtcaagg

SEQ ID NO: 24567 - DNA, 20 bp, Artificial sequence
  synthetic
gattattccaatcacgctgg

SEQ ID NO: 24568 - DNA, 20 bp, Artificial sequence
  synthetic
taggacaacaacagcaagtg

SEQ ID NO: 24569 - DNA, 20 bp, Artificial sequence
  synthetic
gaccattgagcccttccaac

SEQ ID NO: 24570 - DNA, 20 bp, Artificial sequence
  synthetic
agccgtgggcatgactttcg

SEQ ID NO: 24571 - DNA, 20 bp, Artificial sequence
  synthetic
agtcgtcgccgctgaaatgg

SEQ ID NO: 24572 - DNA, 20 bp, Artificial sequence
  synthetic
ggatgaagcccacttcactg

SEQ ID NO: 24573 - DNA, 20 bp, Artificial sequence
  synthetic
caatgactgggacttcgtca

SEQ ID NO: 24574 - DNA, 20 bp, Artificial sequence
  synthetic
tcaccggaggggtctgggca

SEQ ID NO: 24575 - DNA, 20 bp, Artificial sequence
  synthetic
taaccatttggcaatctttc

SEQ ID NO: 24576 - DNA, 20 bp, Artificial sequence
  synthetic
cactgcatgggcaggttatg

SEQ ID NO: 24577 - DNA, 20 bp, Artificial sequence
  synthetic
ccacggaagctacgaggttc

SEQ ID NO: 24578 - DNA, 20 bp, Artificial sequence
  synthetic
cccagacccagcggtgggag

SEQ ID NO: 24579 - DNA, 20 bp, Artificial sequence
  synthetic
ggctagagaagcagtggaag

SEQ ID NO: 24580 - DNA, 20 bp, Artificial sequence
  synthetic
ctgggataccagaatcacga

SEQ ID NO: 24581 - DNA, 20 bp, Artificial sequence
  synthetic
cagggaggaccagagaggga

SEQ ID NO: 24582 - DNA, 20 bp, Artificial sequence
  synthetic
tggaagagagaggctttcgc

SEQ ID NO: 24583 - DNA, 20 bp, Artificial sequence
  synthetic
catggtgtcccagcacaggt

SEQ ID NO: 24584 - DNA, 20 bp, Artificial sequence
  synthetic
taggcccccacggcccattt

SEQ ID NO: 24585 - DNA, 20 bp, Artificial sequence
  synthetic
gagtggggtttccataattg

SEQ ID NO: 24586 - DNA, 20 bp, Artificial sequence
  synthetic
gggcgaggattgtgaggaca

SEQ ID NO: 24587 - DNA, 20 bp, Artificial sequence
  synthetic
gatagccaaatcgatggcag

SEQ ID NO: 24588 - DNA, 20 bp, Artificial sequence
  synthetic
gctctttgggaaaggtagca

SEQ ID NO: 24589 - DNA, 20 bp, Artificial sequence
  synthetic
ccttccatggataggaggag

SEQ ID NO: 24590 - DNA, 20 bp, Artificial sequence
  synthetic
tataaatagtggacatctaa

SEQ ID NO: 24591 - DNA, 20 bp, Artificial sequence
  synthetic
gcccatatcaatgtctgtga

SEQ ID NO: 24592 - DNA, 20 bp, Artificial sequence
  synthetic
ctggaggaaatcaggaagca

SEQ ID NO: 24593 - DNA, 20 bp, Artificial sequence
  synthetic
agccaatgctagggagataa

SEQ ID NO: 24594 - DNA, 20 bp, Artificial sequence
  synthetic
ggtcaaaggagaattagccg

SEQ ID NO: 24595 - DNA, 20 bp, Artificial sequence
  synthetic
caagagtagagcaggcccag

SEQ ID NO: 24596 - DNA, 20 bp, Artificial sequence
  synthetic
cctctttggagccctggcgg

SEQ ID NO: 24597 - DNA, 20 bp, Artificial sequence
  synthetic
ccacgtgagcctagatgttc

SEQ ID NO: 24598 - DNA, 20 bp, Artificial sequence
  synthetic
agctctttgggacatccctt

SEQ ID NO: 24599 - DNA, 20 bp, Artificial sequence
  synthetic
cagtgagggagaaatcgggg

SEQ ID NO: 24600 - DNA, 20 bp, Artificial sequence
  synthetic
agccttaagaggagagccta

SEQ ID NO: 24601 - DNA, 20 bp, Artificial sequence
  synthetic
tggagacatctatgcttaca

SEQ ID NO: 24602 - DNA, 20 bp, Artificial sequence
  synthetic
gcaaggacaaaggagagtgt

SEQ ID NO: 24603 - DNA, 20 bp, Artificial sequence
  synthetic
tgggatggtttccatcggcg

SEQ ID NO: 24604 - DNA, 20 bp, Artificial sequence
  synthetic
agcgaccatcctaggagggg

SEQ ID NO: 24605 - DNA, 20 bp, Artificial sequence
  synthetic
tcccctttttcagcatttga

SEQ ID NO: 24606 - DNA, 20 bp, Artificial sequence
  synthetic
tattctcgcatgcgtgctct

SEQ ID NO: 24607 - DNA, 20 bp, Artificial sequence
  synthetic
catcatggaagttgaccgag

SEQ ID NO: 24608 - DNA, 20 bp, Artificial sequence
  synthetic
ccaggtgaacggcgtggtca

SEQ ID NO: 24609 - DNA, 20 bp, Artificial sequence
  synthetic
catcatggaatacatggaaa

SEQ ID NO: 24610 - DNA, 20 bp, Artificial sequence
  synthetic
agtggtaccatgtcgttctc

SEQ ID NO: 24611 - DNA, 20 bp, Artificial sequence
  synthetic
ggttgccacaccttgtaaat

SEQ ID NO: 24612 - DNA, 20 bp, Artificial sequence
  synthetic
ttagaggagacccgtgatta

SEQ ID NO: 24613 - DNA, 20 bp, Artificial sequence
  synthetic
tgggagacgtcccaggatca

SEQ ID NO: 24614 - DNA, 20 bp, Artificial sequence
  synthetic
ccaagatcgctgttgtctct

SEQ ID NO: 24615 - DNA, 20 bp, Artificial sequence
  synthetic
cggcgccgggccaggcgccc

SEQ ID NO: 24616 - DNA, 20 bp, Artificial sequence
  synthetic
ccccggcgtgtactgggagg

SEQ ID NO: 24617 - DNA, 20 bp, Artificial sequence
  synthetic
tttaaaggctttagaagttg

SEQ ID NO: 24618 - DNA, 20 bp, Artificial sequence
  synthetic
gcgagctggagagcttggct

SEQ ID NO: 24619 - DNA, 20 bp, Artificial sequence
  synthetic
ggcaggagaatatgggcagc

SEQ ID NO: 24620 - DNA, 20 bp, Artificial sequence
  synthetic
ccttcctctgcacctggcct

SEQ ID NO: 24621 - DNA, 20 bp, Artificial sequence
  synthetic
gaagaaccaaaactggtatg

SEQ ID NO: 24622 - DNA, 20 bp, Artificial sequence
  synthetic
aggggaagtacagctaaagg

SEQ ID NO: 24623 - DNA, 20 bp, Artificial sequence
  synthetic
ccggagctcacccctggcct

SEQ ID NO: 24624 - DNA, 20 bp, Artificial sequence
  synthetic
tccgagagactgagtcgccc

SEQ ID NO: 24625 - DNA, 20 bp, Artificial sequence
  synthetic
tagcatcttcgcggtaaaga

SEQ ID NO: 24626 - DNA, 20 bp, Artificial sequence
  synthetic
ttcacgggttctatccgtga

SEQ ID NO: 24627 - DNA, 20 bp, Artificial sequence
  synthetic
agtagcagcggactcccctc

SEQ ID NO: 24628 - DNA, 20 bp, Artificial sequence
  synthetic
ctccaactcctcggacaaaa

SEQ ID NO: 24629 - DNA, 20 bp, Artificial sequence
  synthetic
acagcatgcaaattggacca

SEQ ID NO: 24630 - DNA, 20 bp, Artificial sequence
  synthetic
gatatcgtacacaccacctg

SEQ ID NO: 24631 - DNA, 20 bp, Artificial sequence
  synthetic
caatattctcttgacaccat

SEQ ID NO: 24632 - DNA, 20 bp, Artificial sequence
  synthetic
ttcgtttgttctgccttata

SEQ ID NO: 24633 - DNA, 20 bp, Artificial sequence
  synthetic
tgctacgataatcactcagg

SEQ ID NO: 24634 - DNA, 20 bp, Artificial sequence
  synthetic
cgtcctttcacgttacgacc

SEQ ID NO: 24635 - DNA, 20 bp, Artificial sequence
  synthetic
tacgcggccgttctgacgtt

SEQ ID NO: 24636 - DNA, 20 bp, Artificial sequence
  synthetic
gctatgggaaaacccctttg

SEQ ID NO: 24637 - DNA, 20 bp, Artificial sequence
  synthetic
ccacggcggaggccaatcca

SEQ ID NO: 24638 - DNA, 20 bp, Artificial sequence
  synthetic
tcatctgtggatgatatagt

SEQ ID NO: 24639 - DNA, 20 bp, Artificial sequence
  synthetic
tggcgaaaaagcacacgtga

SEQ ID NO: 24640 - DNA, 20 bp, Artificial sequence
  synthetic
cagggtgattccaatcagct

SEQ ID NO: 24641 - DNA, 20 bp, Artificial sequence
  synthetic
gtgcctgaccggggtcatgc

SEQ ID NO: 24642 - DNA, 20 bp, Artificial sequence
  synthetic
gcgaactctgccaagaatat

SEQ ID NO: 24643 - DNA, 20 bp, Artificial sequence
  synthetic
gcctttgagctccatttgga

SEQ ID NO: 24644 - DNA, 20 bp, Artificial sequence
  synthetic
ttggttgagatggtctctgg

SEQ ID NO: 24645 - DNA, 20 bp, Artificial sequence
  synthetic
ggtgttgggaagagtttttt

SEQ ID NO: 24646 - DNA, 20 bp, Artificial sequence
  synthetic
attaggccccttcagaaata

SEQ ID NO: 24647 - DNA, 20 bp, Artificial sequence
  synthetic
caggttagacatgaagtggc

SEQ ID NO: 24648 - DNA, 20 bp, Artificial sequence
  synthetic
tttggacattctaagtttac

SEQ ID NO: 24649 - DNA, 20 bp, Artificial sequence
  synthetic
cgaggtaatggctggttggt

SEQ ID NO: 24650 - DNA, 20 bp, Artificial sequence
  synthetic
gaaatacaaccatggggtgt

SEQ ID NO: 24651 - DNA, 20 bp, Artificial sequence
  synthetic
tgatttagttagtatttagt

SEQ ID NO: 24652 - DNA, 20 bp, Artificial sequence
  synthetic
tgcccggccatttgggcgtg

SEQ ID NO: 24653 - DNA, 20 bp, Artificial sequence
  synthetic
cgtcgcccacaagacgttaa

SEQ ID NO: 24654 - DNA, 20 bp, Artificial sequence
  synthetic
ctcatggggtacatccctgt

SEQ ID NO: 24655 - DNA, 20 bp, Artificial sequence
  synthetic
cagcggcccggcgccctcac

SEQ ID NO: 24656 - DNA, 20 bp, Artificial sequence
  synthetic
tccatctaccctggtaccat

SEQ ID NO: 24657 - DNA, 20 bp, Artificial sequence
  synthetic
acttacctcaaatgcggctc

SEQ ID NO: 24658 - DNA, 20 bp, Artificial sequence
  synthetic
cgttgcaacttggaggacag

SEQ ID NO: 24659 - DNA, 20 bp, Artificial sequence
  synthetic
ctcacaaaatacatcgtccg

SEQ ID NO: 24660 - DNA, 20 bp, Artificial sequence
  synthetic
atgatcactctctttactct

SEQ ID NO: 24661 - DNA, 20 bp, Artificial sequence
  synthetic
ggtgtggtgtttgacataac

SEQ ID NO: 24662 - DNA, 20 bp, Artificial sequence
  synthetic
cctgggactaaatctttgga

SEQ ID NO: 24663 - DNA, 20 bp, Artificial sequence
  synthetic
aggggccacgctgtcggagt

SEQ ID NO: 24664 - DNA, 20 bp, Artificial sequence
  synthetic
gctacagctacgccccctgg

SEQ ID NO: 24665 - DNA, 20 bp, Artificial sequence
  synthetic
gcggcccttcggggtatggg

SEQ ID NO: 24666 - DNA, 20 bp, Artificial sequence
  synthetic
tacgacgcaggggccgcatg

SEQ ID NO: 24667 - DNA, 20 bp, Artificial sequence
  synthetic
tcgggggaaaatttcgcata

SEQ ID NO: 24668 - DNA, 20 bp, Artificial sequence
  synthetic
gcgccggacaaggaggtcct

SEQ ID NO: 24669 - DNA, 20 bp, Artificial sequence
  synthetic
attttggggggctggctagc

SEQ ID NO: 24670 - DNA, 20 bp, Artificial sequence
  synthetic
atgtctggcgagaagccctc

SEQ ID NO: 24671 - DNA, 20 bp, Artificial sequence
  synthetic
aatcacgtcgcccccaccca

SEQ ID NO: 24672 - DNA, 20 bp, Artificial sequence
  synthetic
tgcaccatcctaacagactt

SEQ ID NO: 24673 - DNA, 20 bp, Artificial sequence
  synthetic
tacataacaggactcaccac

SEQ ID NO: 24674 - DNA, 20 bp, Artificial sequence
  synthetic
acccacggcaaagcctatga

SEQ ID NO: 24675 - DNA, 20 bp, Artificial sequence
  synthetic
aagaggttcccaccagcttt

SEQ ID NO: 24676 - DNA, 20 bp, Artificial sequence
  synthetic
ctcgagggggagcttggaga

SEQ ID NO: 24677 - DNA, 20 bp, Artificial sequence
  synthetic
gcggtgatgggggcttctta

SEQ ID NO: 24678 - DNA, 20 bp, Artificial sequence
  synthetic
gcggcttgtaaagctgcagg

SEQ ID NO: 24679 - DNA, 20 bp, Artificial sequence
  synthetic
aagctcaaactcactccatt

SEQ ID NO: 24680 - DNA, 20 bp, Artificial sequence
  synthetic
acccagaaatttgggcgtgc

SEQ ID NO: 24681 - DNA, 20 bp, Artificial sequence
  synthetic
tcatggggtacatcccgctc

SEQ ID NO: 24682 - DNA, 20 bp, Artificial sequence
  synthetic
gtctagagtggcggaatacg

SEQ ID NO: 24683 - DNA, 20 bp, Artificial sequence
  synthetic
cgctgtacccaggccatctt

SEQ ID NO: 24684 - DNA, 20 bp, Artificial sequence
  synthetic
ctgatgacagaccatactgc

SEQ ID NO: 24685 - DNA, 20 bp, Artificial sequence
  synthetic
agaccacgtacagccggtgt

SEQ ID NO: 24686 - DNA, 20 bp, Artificial sequence
  synthetic
tcggctggtacctggtagct

SEQ ID NO: 24687 - DNA, 20 bp, Artificial sequence
  synthetic
atccatccttaatttttgac

SEQ ID NO: 24688 - DNA, 20 bp, Artificial sequence
  synthetic
tgagcattggcagatggttc

SEQ ID NO: 24689 - DNA, 20 bp, Artificial sequence
  synthetic
tttgcgggctgcccgtctct

SEQ ID NO: 24690 - DNA, 20 bp, Artificial sequence
  synthetic
tgaccggtgaagtgcaggtg

SEQ ID NO: 24691 - DNA, 20 bp, Artificial sequence
  synthetic
gcccttcggggcatgttgcg

SEQ ID NO: 24692 - DNA, 20 bp, Artificial sequence
  synthetic
atgccccgaccggcagcggt

SEQ ID NO: 24693 - DNA, 20 bp, Artificial sequence
  synthetic
acgttgacttcagcctggac

SEQ ID NO: 24694 - DNA, 20 bp, Artificial sequence
  synthetic
cctgcttgacacaccccatc

SEQ ID NO: 24695 - DNA, 20 bp, Artificial sequence
  synthetic
ttaacatactcggggggtgg

SEQ ID NO: 24696 - DNA, 20 bp, Artificial sequence
  synthetic
agatcatgggaggagaatgc

SEQ ID NO: 24697 - DNA, 20 bp, Artificial sequence
  synthetic
ggggcaaccacgtctcaccg

SEQ ID NO: 24698 - DNA, 20 bp, Artificial sequence
  synthetic
gggtttgctcggtgttggcc

SEQ ID NO: 24699 - DNA, 20 bp, Artificial sequence
  synthetic
tccattacatcacgggggcc

SEQ ID NO: 24700 - DNA, 20 bp, Artificial sequence
  synthetic
gccagacgcataggcctcat

SEQ ID NO: 24701 - DNA, 20 bp, Artificial sequence
  synthetic
ggacaattcagctggacggc

SEQ ID NO: 24702 - DNA, 20 bp, Artificial sequence
  synthetic
catgctcgtctatgcctcct

SEQ ID NO: 24703 - DNA, 20 bp, Artificial sequence
  synthetic
gcatgctcaccatcgaggaa

SEQ ID NO: 24704 - DNA, 20 bp, Artificial sequence
  synthetic
tggcgaagaacgaggtgttt

SEQ ID NO: 24705 - DNA, 20 bp, Artificial sequence
  synthetic
ttcttgtctgcggagatgat

SEQ ID NO: 24706 - DNA, 20 bp, Artificial sequence
  synthetic
tggatttgtccagctggttt

SEQ ID NO: 24707 - DNA, 20 bp, Artificial sequence
  synthetic
cgcgtgcccgaacccgccat

SEQ ID NO: 24708 - DNA, 20 bp, Artificial sequence
  synthetic
tgccgcgcaggggccccaga

SEQ ID NO: 24709 - DNA, 20 bp, Artificial sequence
  synthetic
atggtgtcagggctttggag

SEQ ID NO: 24710 - DNA, 20 bp, Artificial sequence
  synthetic
gcatagtgtatgaggccgac

SEQ ID NO: 24711 - DNA, 20 bp, Artificial sequence
  synthetic
gtccaacaaccaccttagtt

SEQ ID NO: 24712 - DNA, 20 bp, Artificial sequence
  synthetic
acacccacaagtttaacagc

SEQ ID NO: 24713 - DNA, 20 bp, Artificial sequence
  synthetic
ccagtgtgtgtggccccgtg

SEQ ID NO: 24714 - DNA, 20 bp, Artificial sequence
  synthetic
ccgggttcaccaaaacctgt

SEQ ID NO: 24715 - DNA, 20 bp, Artificial sequence
  synthetic
cctacctatggatgatgttt

SEQ ID NO: 24716 - DNA, 20 bp, Artificial sequence
  synthetic
gcgggctgtggccctgtttt

SEQ ID NO: 24717 - DNA, 20 bp, Artificial sequence
  synthetic
tctaccacggggcgggtgcc

SEQ ID NO: 24718 - DNA, 20 bp, Artificial sequence
  synthetic
caccaggccttcctgtgtgc

SEQ ID NO: 24719 - DNA, 20 bp, Artificial sequence
  synthetic
tcttggtgggcggcgtcctg

SEQ ID NO: 24720 - DNA, 20 bp, Artificial sequence
  synthetic
agcacgggttacaactggct

SEQ ID NO: 24721 - DNA, 20 bp, Artificial sequence
  synthetic
cggaatcggcgcgtcggaga

SEQ ID NO: 24722 - DNA, 20 bp, Artificial sequence
  synthetic
accgtgatacagaccttacc

SEQ ID NO: 24723 - DNA, 20 bp, Artificial sequence
  synthetic
agagagcgcttcacgacgtc

SEQ ID NO: 24724 - DNA, 20 bp, Artificial sequence
  synthetic
gcttcgggaacacgctgacg

SEQ ID NO: 24725 - DNA, 20 bp, Artificial sequence
  synthetic
tcattcaaagactccatggc

SEQ ID NO: 24726 - DNA, 20 bp, Artificial sequence
  synthetic
tatgtggcatatacctcttt

SEQ ID NO: 24727 - DNA, 20 bp, Artificial sequence
  synthetic
gtctcatgcccgaccccgct

SEQ ID NO: 24728 - DNA, 20 bp, Artificial sequence
  synthetic
ggtggttgctctccccccga

SEQ ID NO: 24729 - DNA, 20 bp, Artificial sequence
  synthetic
acggtgtgaaggttcttgaa

SEQ ID NO: 24730 - DNA, 20 bp, Artificial sequence
  synthetic
gggatgtctgcggtccagtc

SEQ ID NO: 24731 - DNA, 20 bp, Artificial sequence
  synthetic
ggcattacccgtgcaccgta

SEQ ID NO: 24732 - DNA, 20 bp, Artificial sequence
  synthetic
gcttgggcgtttggccacta

SEQ ID NO: 24733 - DNA, 20 bp, Artificial sequence
  synthetic
atttcatagcccgagtggag

SEQ ID NO: 24734 - DNA, 20 bp, Artificial sequence
  synthetic
tccgcgaattaacggtggcc

SEQ ID NO: 24735 - DNA, 20 bp, Artificial sequence
  synthetic
gttggcgactcctcgcccct

SEQ ID NO: 24736 - DNA, 20 bp, Artificial sequence
  synthetic
taatcatatgcgacgagtgc

SEQ ID NO: 24737 - DNA, 20 bp, Artificial sequence
  synthetic
agcgtaggggccgtacaggg

SEQ ID NO: 24738 - DNA, 20 bp, Artificial sequence
  synthetic
acacccccgggctccctgtc

SEQ ID NO: 24739 - DNA, 20 bp, Artificial sequence
  synthetic
tggacgaggcacgtgccatc

SEQ ID NO: 24740 - DNA, 20 bp, Artificial sequence
  synthetic
ctggcctttcgaccttgccg

SEQ ID NO: 24741 - DNA, 20 bp, Artificial sequence
  synthetic
tcttctcatgccagaagggg

SEQ ID NO: 24742 - DNA, 20 bp, Artificial sequence
  synthetic
caacagggcccagcgtacct

SEQ ID NO: 24743 - DNA, 20 bp, Artificial sequence
  synthetic
cggcggaaacggccaagcgc

SEQ ID NO: 24744 - DNA, 20 bp, Artificial sequence
  synthetic
gcggtgaggacaacgtggtg

SEQ ID NO: 24745 - DNA, 20 bp, Artificial sequence
  synthetic
gagtccgcgtctgcgagaag

SEQ ID NO: 24746 - DNA, 20 bp, Artificial sequence
  synthetic
ctgaggctatgaccaggtac

SEQ ID NO: 24747 - DNA, 20 bp, Artificial sequence
  synthetic
cgctggatcttccagctatc

SEQ ID NO: 24748 - DNA, 20 bp, Artificial sequence
  synthetic
cgctggcgggggggacattt

SEQ ID NO: 24749 - DNA, 20 bp, Artificial sequence
  synthetic
ccctgtgaggaactactgtc

SEQ ID NO: 24750 - DNA, 20 bp, Artificial sequence
  synthetic
aatgcctggagatttgggcg

SEQ ID NO: 24751 - DNA, 20 bp, Artificial sequence
  synthetic
tgtcaggcaattggttgaag

SEQ ID NO: 24752 - DNA, 20 bp, Artificial sequence
  synthetic
ataggaccgctctaaactgt

SEQ ID NO: 24753 - DNA, 20 bp, Artificial sequence
  synthetic
cgtctgaggaccggccctac

SEQ ID NO: 24754 - DNA, 20 bp, Artificial sequence
  synthetic
aggccacatatcagaagtgt

SEQ ID NO: 24755 - DNA, 20 bp, Artificial sequence
  synthetic
ttctggtgttgacaatcttt

SEQ ID NO: 24756 - DNA, 20 bp, Artificial sequence
  synthetic
acccacatctcgggtttgag

SEQ ID NO: 24757 - DNA, 20 bp, Artificial sequence
  synthetic
tgaggttgggcgcctggact

SEQ ID NO: 24758 - DNA, 20 bp, Artificial sequence
  synthetic
tgaggggtctccctgtgtcc

SEQ ID NO: 24759 - DNA, 20 bp, Artificial sequence
  synthetic
acgctccgacgggtagcggt

SEQ ID NO: 24760 - DNA, 20 bp, Artificial sequence
  synthetic
tgtctaaacaactaacctca

SEQ ID NO: 24761 - DNA, 20 bp, Artificial sequence
  synthetic
agcaggggggcgagaacttt

SEQ ID NO: 24762 - DNA, 20 bp, Artificial sequence
  synthetic
tagtaacaacacatccaatc

SEQ ID NO: 24763 - DNA, 20 bp, Artificial sequence
  synthetic
cggttgtccctgatcgggag

SEQ ID NO: 24764 - DNA, 20 bp, Artificial sequence
  synthetic
acgggtctatgaagatcaca

SEQ ID NO: 24765 - DNA, 20 bp, Artificial sequence
  synthetic
ggtctcagctcccttgtgag

SEQ ID NO: 24766 - DNA, 20 bp, Artificial sequence
  synthetic
gcacggcgaacggagaccac

SEQ ID NO: 24767 - DNA, 20 bp, Artificial sequence
  synthetic
agtgccatagaccacctagg

SEQ ID NO: 24768 - DNA, 20 bp, Artificial sequence
  synthetic
agaggctcatacagctggac

SEQ ID NO: 24769 - DNA, 20 bp, Artificial sequence
  synthetic
gatcctttagctcaatgccc

SEQ ID NO: 24770 - DNA, 20 bp, Artificial sequence
  synthetic
cccaacgggtagagtacttg

SEQ ID NO: 24771 - DNA, 20 bp, Artificial sequence
  synthetic
tcacagaacgcctctattgt

SEQ ID NO: 24772 - DNA, 20 bp, Artificial sequence
  synthetic
tagcccacgatggcaccgga

SEQ ID NO: 24773 - DNA, 20 bp, Artificial sequence
  synthetic
gcctcaggaagcttggggcg

SEQ ID NO: 24774 - DNA, 20 bp, Artificial sequence
  synthetic
atttgtcaggctggtttgtc

SEQ ID NO: 24775 - DNA, 20 bp, Artificial sequence
  synthetic
tgtttccttttattcctata

SEQ ID NO: 24776 - DNA, 20 bp, Artificial sequence
  synthetic
cggtaaaggatatcatgtta

SEQ ID NO: 24777 - DNA, 20 bp, Artificial sequence
  synthetic
gatcagggtatacaatacac

SEQ ID NO: 24778 - DNA, 20 bp, Artificial sequence
  synthetic
acaatgctaacacaaccaca

SEQ ID NO: 24779 - DNA, 20 bp, Artificial sequence
  synthetic
tggcatattccccaccaggt

SEQ ID NO: 24780 - DNA, 20 bp, Artificial sequence
  synthetic
tggtggataccaaagctact

SEQ ID NO: 24781 - DNA, 20 bp, Artificial sequence
  synthetic
gtggtgagggcgttgttggt

SEQ ID NO: 24782 - DNA, 20 bp, Artificial sequence
  synthetic
aacagcaggctgtcgtgatc

SEQ ID NO: 24783 - DNA, 20 bp, Artificial sequence
  synthetic
ttgtctctgtggcggggata

SEQ ID NO: 24784 - DNA, 20 bp, Artificial sequence
  synthetic
taaaaaccgagtacggcgag

SEQ ID NO: 24785 - DNA, 20 bp, Artificial sequence
  synthetic
actcagtggccatgaggcag

SEQ ID NO: 24786 - DNA, 20 bp, Artificial sequence
  synthetic
tgagagctggctctcctgcc

SEQ ID NO: 24787 - DNA, 20 bp, Artificial sequence
  synthetic
aagacctcctcttggctcag

SEQ ID NO: 24788 - DNA, 20 bp, Artificial sequence
  synthetic
tgacacacacacccctggag

SEQ ID NO: 24789 - DNA, 20 bp, Artificial sequence
  synthetic
ttcggcaattttagcgaatt

SEQ ID NO: 24790 - DNA, 20 bp, Artificial sequence
  synthetic
ttcccagagtaattgctgta

SEQ ID NO: 24791 - DNA, 20 bp, Artificial sequence
  synthetic
gggctactacactcccgaca

SEQ ID NO: 24792 - DNA, 20 bp, Artificial sequence
  synthetic
tgttaatgccctgagtcttg

SEQ ID NO: 24793 - DNA, 20 bp, Artificial sequence
  synthetic
cactcatgctttctcatttg

SEQ ID NO: 24794 - DNA, 20 bp, Artificial sequence
  synthetic
tgcttcagttatcttggaca

SEQ ID NO: 24795 - DNA, 20 bp, Artificial sequence
  synthetic
agcactaggctttcacgctg

SEQ ID NO: 24796 - DNA, 20 bp, Artificial sequence
  synthetic
ggctaggtacatttgtgctc

SEQ ID NO: 24797 - DNA, 20 bp, Artificial sequence
  synthetic
gcaaggggccaatacgattt

SEQ ID NO: 24798 - DNA, 20 bp, Artificial sequence
  synthetic
ggagctcaaaacaaaagaaa

SEQ ID NO: 24799 - DNA, 20 bp, Artificial sequence
  synthetic
ggaggtcactgacagtgcag

SEQ ID NO: 24800 - DNA, 20 bp, Artificial sequence
  synthetic
ccatcgatgtgaagatgatg

SEQ ID NO: 24801 - DNA, 20 bp, Artificial sequence
  synthetic
acaggggctggggcaacggc

SEQ ID NO: 24802 - DNA, 20 bp, Artificial sequence
  synthetic
ccacacaggttggagccact

SEQ ID NO: 24803 - DNA, 20 bp, Artificial sequence
  synthetic
atcgtgagtggttcatggac

SEQ ID NO: 24804 - DNA, 20 bp, Artificial sequence
  synthetic
tggaattttcaagcaacact

SEQ ID NO: 24805 - DNA, 20 bp, Artificial sequence
  synthetic
tcggaggagcattccgctca

SEQ ID NO: 24806 - DNA, 20 bp, Artificial sequence
  synthetic
accgtggacctgccactcgc

SEQ ID NO: 24807 - DNA, 20 bp, Artificial sequence
  synthetic
aaatggcttatcacgatgcc

SEQ ID NO: 24808 - DNA, 20 bp, Artificial sequence
  synthetic
tgtacaggatactgctgttg

SEQ ID NO: 24809 - DNA, 20 bp, Artificial sequence
  synthetic
gcggatggcccgcaactgaa

SEQ ID NO: 24810 - DNA, 20 bp, Artificial sequence
  synthetic
aaggtgttttccacaccctt

SEQ ID NO: 24811 - DNA, 20 bp, Artificial sequence
  synthetic
tgagaacagccgtgctagcg

SEQ ID NO: 24812 - DNA, 20 bp, Artificial sequence
  synthetic
gggtgccgaactacaacctg

SEQ ID NO: 24813 - DNA, 20 bp, Artificial sequence
  synthetic
cagtgacagcagctagtgcc

SEQ ID NO: 24814 - DNA, 20 bp, Artificial sequence
  synthetic
ggctcattgaggttctggga

SEQ ID NO: 24815 - DNA, 20 bp, Artificial sequence
  synthetic
ccttcgtcgatgttggagtg

SEQ ID NO: 24816 - DNA, 20 bp, Artificial sequence
  synthetic
tcatgaagaacgctgtagtg

SEQ ID NO: 24817 - DNA, 20 bp, Artificial sequence
  synthetic
ggctggtcgaacggaggttt

SEQ ID NO: 24818 - DNA, 20 bp, Artificial sequence
  synthetic
agcgagtgttcaaagagaag

SEQ ID NO: 24819 - DNA, 20 bp, Artificial sequence
  synthetic
ccaagggaagcagagccatt

SEQ ID NO: 24820 - DNA, 20 bp, Artificial sequence
  synthetic
aaggacccaaagtcaggacc

SEQ ID NO: 24821 - DNA, 20 bp, Artificial sequence
  synthetic
caactggatggtatgattgg

SEQ ID NO: 24822 - DNA, 20 bp, Artificial sequence
  synthetic
ttaaagtgcacggcccagcc

SEQ ID NO: 24823 - DNA, 20 bp, Artificial sequence
  synthetic
ccgtgccacaaaacaccaca

SEQ ID NO: 24824 - DNA, 20 bp, Artificial sequence
  synthetic
gtggcgtggtgctcttgtat

SEQ ID NO: 24825 - DNA, 20 bp, Artificial sequence
  synthetic
gaagccataagcatcgttat

SEQ ID NO: 24826 - DNA, 20 bp, Artificial sequence
  synthetic
gaagccatttaagtgacaag

SEQ ID NO: 24827 - DNA, 20 bp, Artificial sequence
  synthetic
gcatcttcgggcaaaatctg

SEQ ID NO: 24828 - DNA, 20 bp, Artificial sequence
  synthetic
ctaaagctgacaattacacc

SEQ ID NO: 24829 - DNA, 20 bp, Artificial sequence
  synthetic
aaaacccagttgaggactac

SEQ ID NO: 24830 - DNA, 20 bp, Artificial sequence
  synthetic
ctgttgtcaccaacaacaca

SEQ ID NO: 24831 - DNA, 20 bp, Artificial sequence
  synthetic
atgcgcacttaaccagcttg

SEQ ID NO: 24832 - DNA, 20 bp, Artificial sequence
  synthetic
taagaccctattcatgttta

SEQ ID NO: 24833 - DNA, 20 bp, Artificial sequence
  synthetic
tcatcagtgcacttaccata

SEQ ID NO: 24834 - DNA, 20 bp, Artificial sequence
  synthetic
aagttgatgaaccagctcag

SEQ ID NO: 24835 - DNA, 20 bp, Artificial sequence
  synthetic
agaaacctgagttaagaaga

SEQ ID NO: 24836 - DNA, 20 bp, Artificial sequence
  synthetic
atattgatggaaggttagtt

SEQ ID NO: 24837 - DNA, 20 bp, Artificial sequence
  synthetic
tggaacaagcaatatatggt

SEQ ID NO: 24838 - DNA, 20 bp, Artificial sequence
  synthetic
taactttcctaaaggatgaa

SEQ ID NO: 24839 - DNA, 20 bp, Artificial sequence
  synthetic
atccagatgtgttttggtca

SEQ ID NO: 24840 - DNA, 20 bp, Artificial sequence
  synthetic
aactggatccgtaactggac

SEQ ID NO: 24841 - DNA, 20 bp, Artificial sequence
  synthetic
gacagcctaaggatgccctc

SEQ ID NO: 24842 - DNA, 20 bp, Artificial sequence
  synthetic
cggaaatgaaaagatcatac

SEQ ID NO: 24843 - DNA, 20 bp, Artificial sequence
  synthetic
cacccacgggtacgcacact

SEQ ID NO: 24844 - DNA, 20 bp, Artificial sequence
  synthetic
tcttgatgttcgggctagtt

SEQ ID NO: 24845 - DNA, 20 bp, Artificial sequence
  synthetic
ttctgagacagtgtttaata

SEQ ID NO: 24846 - DNA, 20 bp, Artificial sequence
  synthetic
gcgttgcccagttgagcctg

SEQ ID NO: 24847 - DNA, 20 bp, Artificial sequence
  synthetic
aagcaatacacaccagagat

SEQ ID NO: 24848 - DNA, 20 bp, Artificial sequence
  synthetic
tctctttgtaaaacaagaac

SEQ ID NO: 24849 - DNA, 20 bp, Artificial sequence
  synthetic
acgaaaacttaggctaacgg

SEQ ID NO: 24850 - DNA, 20 bp, Artificial sequence
  synthetic
tgtagacaggtttaaaccat

SEQ ID NO: 24851 - DNA, 20 bp, Artificial sequence
  synthetic
ggaaaggaaaagagaagttc

SEQ ID NO: 24852 - DNA, 20 bp, Artificial sequence
  synthetic
gaaccctccaactgacatgc

SEQ ID NO: 24853 - DNA, 20 bp, Artificial sequence
  synthetic
catccatagtgcaggaggta

SEQ ID NO: 24854 - DNA, 20 bp, Artificial sequence
  synthetic
tcacaatgttcttggcaaga

SEQ ID NO: 24855 - DNA, 20 bp, Artificial sequence
  synthetic
ggttttctcagacgcatacg

SEQ ID NO: 24856 - DNA, 20 bp, Artificial sequence
  synthetic
tttaggtaagaacattacag

SEQ ID NO: 24857 - DNA, 20 bp, Artificial sequence
  synthetic
cagtggagaagaagagtaca

SEQ ID NO: 24858 - DNA, 20 bp, Artificial sequence
  synthetic
aagtatgacctaccgttaac

SEQ ID NO: 24859 - DNA, 20 bp, Artificial sequence
  synthetic
cctagattactcagatggag

SEQ ID NO: 24860 - DNA, 20 bp, Artificial sequence
  synthetic
acctacagatcgaaagagtg

SEQ ID NO: 24861 - DNA, 20 bp, Artificial sequence
  synthetic
gattaacccttataatatac

SEQ ID NO: 24862 - DNA, 20 bp, Artificial sequence
  synthetic
tgtatgtttgttaatacatg

SEQ ID NO: 24863 - DNA, 20 bp, Artificial sequence
  synthetic
gacttcagtgcgttacacca

SEQ ID NO: 24864 - DNA, 20 bp, Artificial sequence
  synthetic
gccaaatgaaccaggagaaa

SEQ ID NO: 24865 - DNA, 20 bp, Artificial sequence
  synthetic
tggagtgctaatggcaacag

SEQ ID NO: 24866 - DNA, 20 bp, Artificial sequence
  synthetic
caaattggaacccagtgtgt

SEQ ID NO: 24867 - DNA, 20 bp, Artificial sequence
  synthetic
gttaggttacactagtgatg

SEQ ID NO: 24868 - DNA, 20 bp, Artificial sequence
  synthetic
gaaatgagccctaccgttaa

SEQ ID NO: 24869 - DNA, 20 bp, Artificial sequence
  synthetic
gtctactcaaaagactggtg

SEQ ID NO: 24870 - DNA, 20 bp, Artificial sequence
  synthetic
acaatgcaacgcttccaggt

SEQ ID NO: 24871 - DNA, 20 bp, Artificial sequence
  synthetic
agccgtttgcaacgcagcaa

SEQ ID NO: 24872 - DNA, 20 bp, Artificial sequence
  synthetic
tgttgagttagattactctg

SEQ ID NO: 24873 - DNA, 20 bp, Artificial sequence
  synthetic
tggtgccccaacaaacagga

SEQ ID NO: 24874 - DNA, 20 bp, Artificial sequence
  synthetic
ggcggcaaatgagtactacc

SEQ ID NO: 24875 - DNA, 20 bp, Artificial sequence
  synthetic
gctgttgcacggagctccag

SEQ ID NO: 24876 - DNA, 20 bp, Artificial sequence
  synthetic
tggaaaggatgtgtccctgt

SEQ ID NO: 24877 - DNA, 20 bp, Artificial sequence
  synthetic
attccattttgacatgaaca

SEQ ID NO: 24878 - DNA, 20 bp, Artificial sequence
  synthetic
cgtggatagtgaagaattga

SEQ ID NO: 24879 - DNA, 20 bp, Artificial sequence
  synthetic
aaaggaggaatctgagattg

SEQ ID NO: 24880 - DNA, 20 bp, Artificial sequence
  synthetic
gatactgatggccactggta

SEQ ID NO: 24881 - DNA, 20 bp, Artificial sequence
  synthetic
taagaacattgatcttgata

SEQ ID NO: 24882 - DNA, 20 bp, Artificial sequence
  synthetic
ttacgtagaaagtggcttga

SEQ ID NO: 24883 - DNA, 20 bp, Artificial sequence
  synthetic
gctcttatatacccacatca

SEQ ID NO: 24884 - DNA, 20 bp, Artificial sequence
  synthetic
cagtatatgtacataccacc

SEQ ID NO: 24885 - DNA, 20 bp, Artificial sequence
  synthetic
agccagccataccttctaaa

SEQ ID NO: 24886 - DNA, 20 bp, Artificial sequence
  synthetic
ctggtcatagtaatcaggag

SEQ ID NO: 24887 - DNA, 20 bp, Artificial sequence
  synthetic
cgcggcgctccaggcacagg

SEQ ID NO: 24888 - DNA, 20 bp, Artificial sequence
  synthetic
tcgggtatgcctaaaactgc

SEQ ID NO: 24889 - DNA, 20 bp, Artificial sequence
  synthetic
catgctgagccaagtggaac

SEQ ID NO: 24890 - DNA, 20 bp, Artificial sequence
  synthetic
aaaattattggaattcatgt

SEQ ID NO: 24891 - DNA, 20 bp, Artificial sequence
  synthetic
aacatagacacatccaaaat

SEQ ID NO: 24892 - DNA, 20 bp, Artificial sequence
  synthetic
attactggatctgctgtcgg

SEQ ID NO: 24893 - DNA, 20 bp, Artificial sequence
  synthetic
tgaaggggaaaacgctcgtt

SEQ ID NO: 24894 - DNA, 20 bp, Artificial sequence
  synthetic
atcagctgaagcgtgtgggt

SEQ ID NO: 24895 - DNA, 20 bp, Artificial sequence
  synthetic
tcagggtactctacttgttg

SEQ ID NO: 24896 - DNA, 20 bp, Artificial sequence
  synthetic
atgggaatcaacgttagtgg

SEQ ID NO: 24897 - DNA, 20 bp, Artificial sequence
  synthetic
aagcacacatcaagtagcga

SEQ ID NO: 24898 - DNA, 20 bp, Artificial sequence
  synthetic
tattagcatactgacatcaa

SEQ ID NO: 24899 - DNA, 20 bp, Artificial sequence
  synthetic
ccagtatatgtacatcccac

SEQ ID NO: 24900 - DNA, 20 bp, Artificial sequence
  synthetic
aaaccagccttatgtgctaa

SEQ ID NO: 24901 - DNA, 20 bp, Artificial sequence
  synthetic
agatgatgtcatggagcaag

SEQ ID NO: 24902 - DNA, 20 bp, Artificial sequence
  synthetic
tagaggcccaccaggcacag

SEQ ID NO: 24903 - DNA, 20 bp, Artificial sequence
  synthetic
ggacatctcccttttctgcc

SEQ ID NO: 24904 - DNA, 20 bp, Artificial sequence
  synthetic
tagcttagattctgttgttt

SEQ ID NO: 24905 - DNA, 20 bp, Artificial sequence
  synthetic
catatcagtgatagagggca

SEQ ID NO: 24906 - DNA, 20 bp, Artificial sequence
  synthetic
tgagttgaatatggtggcat

SEQ ID NO: 24907 - DNA, 20 bp, Artificial sequence
  synthetic
gtttaaaccagataaacagt

SEQ ID NO: 24908 - DNA, 20 bp, Artificial sequence
  synthetic
accagggggctttattagtg

SEQ ID NO: 24909 - DNA, 20 bp, Artificial sequence
  synthetic
tcaccatcgctcccatggca

SEQ ID NO: 24910 - DNA, 20 bp, Artificial sequence
  synthetic
ctgccaacacaccagcattg

SEQ ID NO: 24911 - DNA, 20 bp, Artificial sequence
  synthetic
acagcaactcacccaagttt

SEQ ID NO: 24912 - DNA, 20 bp, Artificial sequence
  synthetic
caccaggagcaccaataccc

SEQ ID NO: 24913 - DNA, 20 bp, Artificial sequence
  synthetic
cctcaccaaatggtaaagga

SEQ ID NO: 24914 - DNA, 20 bp, Artificial sequence
  synthetic
gggagagttatgagagagat

SEQ ID NO: 24915 - DNA, 20 bp, Artificial sequence
  synthetic
ttaggaatcatgaagatctc

SEQ ID NO: 24916 - DNA, 20 bp, Artificial sequence
  synthetic
tatgtcagatggtttccaca

SEQ ID NO: 24917 - DNA, 20 bp, Artificial sequence
  synthetic
aatactgtcaagagaagggt

SEQ ID NO: 24918 - DNA, 20 bp, Artificial sequence
  synthetic
ctttcaacaaacccaaagtt

SEQ ID NO: 24919 - DNA, 20 bp, Artificial sequence
  synthetic
gtattcacgttggtggtaat

SEQ ID NO: 24920 - DNA, 20 bp, Artificial sequence
  synthetic
ttagtgagatgtgccttgag

SEQ ID NO: 24921 - DNA, 20 bp, Artificial sequence
  synthetic
tttcgtacttgtgtcactca

SEQ ID NO: 24922 - DNA, 20 bp, Artificial sequence
  synthetic
caggcgcaagtggctcgacc

SEQ ID NO: 24923 - DNA, 20 bp, Artificial sequence
  synthetic
ccccagcaccctggttcgat

SEQ ID NO: 24924 - DNA, 20 bp, Artificial sequence
  synthetic
aactcaattgatctttcagc

SEQ ID NO: 24925 - DNA, 20 bp, Artificial sequence
  synthetic
gacaccgcaggcaacacggc

SEQ ID NO: 24926 - DNA, 20 bp, Artificial sequence
  synthetic
gcatttgatcatgtaaggat

SEQ ID NO: 24927 - DNA, 20 bp, Artificial sequence
  synthetic
ccacatcaaattcttaacct

SEQ ID NO: 24928 - DNA, 20 bp, Artificial sequence
  synthetic
tctgttcaacccgtaaagcc

SEQ ID NO: 24929 - DNA, 20 bp, Artificial sequence
  synthetic
aactctagctacaatttcac

SEQ ID NO: 24930 - DNA, 20 bp, Artificial sequence
  synthetic
ggtggggatgacttcactct

SEQ ID NO: 24931 - DNA, 20 bp, Artificial sequence
  synthetic
gcggtcctagcgtccgccct

SEQ ID NO: 24932 - DNA, 20 bp, Artificial sequence
  synthetic
actatcccctacactccatc

SEQ ID NO: 24933 - DNA, 20 bp, Artificial sequence
  synthetic
gttgcaccaaacgctgactt

SEQ ID NO: 24934 - DNA, 20 bp, Artificial sequence
  synthetic
cttcccgtctctactcccaa

SEQ ID NO: 24935 - DNA, 20 bp, Artificial sequence
  synthetic
ttgatggctggaatagatgt

SEQ ID NO: 24936 - DNA, 20 bp, Artificial sequence
  synthetic
ataaaaacaattaaaagaat

SEQ ID NO: 24937 - DNA, 20 bp, Artificial sequence
  synthetic
caagcagtctccaaactttt

SEQ ID NO: 24938 - DNA, 20 bp, Artificial sequence
  synthetic
ctcccaaacatggcccacct

SEQ ID NO: 24939 - DNA, 20 bp, Artificial sequence
  synthetic
gataacaaagtggaaaactt

SEQ ID NO: 24940 - DNA, 20 bp, Artificial sequence
  synthetic
caaattttggacgtacaagg

SEQ ID NO: 24941 - DNA, 20 bp, Artificial sequence
  synthetic
aaagatgatgacttcccggc

SEQ ID NO: 24942 - DNA, 20 bp, Artificial sequence
  synthetic
gggtcggcactcatctgtca

SEQ ID NO: 24943 - DNA, 20 bp, Artificial sequence
  synthetic
tgtatatggggacgtcaact

SEQ ID NO: 24944 - DNA, 20 bp, Artificial sequence
  synthetic
atgttgaacacaattataaa

SEQ ID NO: 24945 - DNA, 20 bp, Artificial sequence
  synthetic
cgtttctcccccgaccattc

SEQ ID NO: 24946 - DNA, 20 bp, Artificial sequence
  synthetic
actggagctcgaccctcctt

SEQ ID NO: 24947 - DNA, 20 bp, Artificial sequence
  synthetic
agcgagctacagcgggaact

SEQ ID NO: 24948 - DNA, 20 bp, Artificial sequence
  synthetic
atagacactttttgatgaag

SEQ ID NO: 24949 - DNA, 20 bp, Artificial sequence
  synthetic
ctgacgattacgggaccggg

SEQ ID NO: 24950 - DNA, 20 bp, Artificial sequence
  synthetic
tggcatttgagcgggtgcct

SEQ ID NO: 24951 - DNA, 20 bp, Artificial sequence
  synthetic
gtgggtgtatccaaatcact

SEQ ID NO: 24952 - DNA, 20 bp, Artificial sequence
  synthetic
cctacatctcgcccagtgac

SEQ ID NO: 24953 - DNA, 20 bp, Artificial sequence
  synthetic
aggtactggagaaggacgcc

SEQ ID NO: 24954 - DNA, 20 bp, Artificial sequence
  synthetic
ttactgggcgcactccccgc

SEQ ID NO: 24955 - DNA, 20 bp, Artificial sequence
  synthetic
caattttggagtttcttgaa

SEQ ID NO: 24956 - DNA, 20 bp, Artificial sequence
  synthetic
ccaaccaagcttcagtaaag

SEQ ID NO: 24957 - DNA, 20 bp, Artificial sequence
  synthetic
ccgctgcggtcgatgaggcg

SEQ ID NO: 24958 - DNA, 20 bp, Artificial sequence
  synthetic
ttcccaacagaccttctggg

SEQ ID NO: 24959 - DNA, 20 bp, Artificial sequence
  synthetic
gactagaccccatggatccc

SEQ ID NO: 24960 - DNA, 20 bp, Artificial sequence
  synthetic
aagatgagatcagaccctca

SEQ ID NO: 24961 - DNA, 20 bp, Artificial sequence
  synthetic
tctcggtgcacgcttacggc

SEQ ID NO: 24962 - DNA, 20 bp, Artificial sequence
  synthetic
cgcttgaggaggacttgtac

SEQ ID NO: 24963 - DNA, 20 bp, Artificial sequence
  synthetic
gcccttcaggtaccccgagg

SEQ ID NO: 24964 - DNA, 20 bp, Artificial sequence
  synthetic
gactgggtctataactcgcc

SEQ ID NO: 24965 - DNA, 20 bp, Artificial sequence
  synthetic
tcggctagcgccggcaaaga

SEQ ID NO: 24966 - DNA, 20 bp, Artificial sequence
  synthetic
gtgaagataaacagcctgag

SEQ ID NO: 24967 - DNA, 20 bp, Artificial sequence
  synthetic
gccactggggttaaagctat

SEQ ID NO: 24968 - DNA, 20 bp, Artificial sequence
  synthetic
ttcgtcgtgaagaaaatctc

SEQ ID NO: 24969 - DNA, 20 bp, Artificial sequence
  synthetic
attaacgacatcttcgccat

SEQ ID NO: 24970 - DNA, 20 bp, Artificial sequence
  synthetic
cctcgtcatcttttcgcaga

SEQ ID NO: 24971 - DNA, 20 bp, Artificial sequence
  synthetic
cactttcgtgatacagcaag

SEQ ID NO: 24972 - DNA, 20 bp, Artificial sequence
  synthetic
gctggctactgtggaggagc

SEQ ID NO: 24973 - DNA, 20 bp, Artificial sequence
  synthetic
gacgtaaagatgaccgaaga

SEQ ID NO: 24974 - DNA, 20 bp, Artificial sequence
  synthetic
tgggccctccagggaaaacg

SEQ ID NO: 24975 - DNA, 20 bp, Artificial sequence
  synthetic
tgggatgtggattactcggc

SEQ ID NO: 24976 - DNA, 20 bp, Artificial sequence
  synthetic
cgcccttctagggcctacga

SEQ ID NO: 24977 - DNA, 20 bp, Artificial sequence
  synthetic
atccttcacaggttcagaca

SEQ ID NO: 24978 - DNA, 20 bp, Artificial sequence
  synthetic
ctgtcacctgaaaataagac

SEQ ID NO: 24979 - DNA, 20 bp, Artificial sequence
  synthetic
gtcatgaccctggctgattt

SEQ ID NO: 24980 - DNA, 20 bp, Artificial sequence
  synthetic
acaacgcacattttggaact

SEQ ID NO: 24981 - DNA, 20 bp, Artificial sequence
  synthetic
agagagaaataccaactcac

SEQ ID NO: 24982 - DNA, 20 bp, Artificial sequence
  synthetic
attggctcactaaaagctga

SEQ ID NO: 24983 - DNA, 20 bp, Artificial sequence
  synthetic
tgggatactgggttgaactc

SEQ ID NO: 24984 - DNA, 20 bp, Artificial sequence
  synthetic
gggaaaaccatggaaaacaa

SEQ ID NO: 24985 - DNA, 20 bp, Artificial sequence
  synthetic
atcgccagtgagacccacat

SEQ ID NO: 24986 - DNA, 20 bp, Artificial sequence
  synthetic
tccgcatttgaggaattgac

SEQ ID NO: 24987 - DNA, 20 bp, Artificial sequence
  synthetic
caactcaaggcacgtgacat

SEQ ID NO: 24988 - DNA, 20 bp, Artificial sequence
  synthetic
aagagcttccttgctaatgt

SEQ ID NO: 24989 - DNA, 20 bp, Artificial sequence
  synthetic
gtacatgacagcattaaaga

SEQ ID NO: 24990 - DNA, 20 bp, Artificial sequence
  synthetic
gcggagaaaccacaagctga

SEQ ID NO: 24991 - DNA, 20 bp, Artificial sequence
  synthetic
ggaccagtgaagaagcctgt

SEQ ID NO: 24992 - DNA, 20 bp, Artificial sequence
  synthetic
acggcttacctcgtgcctcg

SEQ ID NO: 24993 - DNA, 20 bp, Artificial sequence
  synthetic
gaggggttggtagtggacac

SEQ ID NO: 24994 - DNA, 20 bp, Artificial sequence
  synthetic
tccaaacacaagggcgatgc

SEQ ID NO: 24995 - DNA, 20 bp, Artificial sequence
  synthetic
cagtacaaaaacgtttggga

SEQ ID NO: 24996 - DNA, 20 bp, Artificial sequence
  synthetic
ttggactttgaagctctcaa

SEQ ID NO: 24997 - DNA, 20 bp, Artificial sequence
  synthetic
cccttttagggcccacgacc

SEQ ID NO: 24998 - DNA, 20 bp, Artificial sequence
  synthetic
agcacatgagcggtgggaac

SEQ ID NO: 24999 - DNA, 20 bp, Artificial sequence
  synthetic
caccatgactctggccgatt

SEQ ID NO: 25000 - DNA, 20 bp, Artificial sequence
  synthetic
ggacgtagattggcaggacc

SEQ ID NO: 25001 - DNA, 20 bp, Artificial sequence
  synthetic
ccacaacacaactacatcca

SEQ ID NO: 25002 - DNA, 20 bp, Artificial sequence
  synthetic
gcgtgacgtttcacaactca

SEQ ID NO: 25003 - DNA, 20 bp, Artificial sequence
  synthetic
gggacaggacaacgtcgagg

SEQ ID NO: 25004 - DNA, 20 bp, Artificial sequence
  synthetic
accgcgcacagcgtttcccg

SEQ ID NO: 25005 - DNA, 20 bp, Artificial sequence
  synthetic
tggcgctgatcttgaatttc

SEQ ID NO: 25006 - DNA, 20 bp, Artificial sequence
  synthetic
tacgatcaccgcctcaaaga

SEQ ID NO: 25007 - DNA, 20 bp, Artificial sequence
  synthetic
ggacaacccagttgttcacg

SEQ ID NO: 25008 - DNA, 20 bp, Artificial sequence
  synthetic
aatcacaagatgcaggccca

SEQ ID NO: 25009 - DNA, 20 bp, Artificial sequence
  synthetic
cagcaccttcgtcgtgaaga

SEQ ID NO: 25010 - DNA, 20 bp, Artificial sequence
  synthetic
ggtctccaccacagggttca

SEQ ID NO: 25011 - DNA, 20 bp, Artificial sequence
  synthetic
tccctgggccctccagggga

SEQ ID NO: 25012 - DNA, 20 bp, Artificial sequence
  synthetic
aggtggaatgccctcgggtt

SEQ ID NO: 25013 - DNA, 20 bp, Artificial sequence
  synthetic
tgttgattcttggattgaat

SEQ ID NO: 25014 - DNA, 20 bp, Artificial sequence
  synthetic
cggaggaactgattgaaatg

SEQ ID NO: 25015 - DNA, 20 bp, Artificial sequence
  synthetic
atcttccaatcacaggctcc

SEQ ID NO: 25016 - DNA, 20 bp, Artificial sequence
  synthetic
gatccgtatattttaaagaa

SEQ ID NO: 25017 - DNA, 20 bp, Artificial sequence
  synthetic
tggttacattttgttaatta

SEQ ID NO: 25018 - DNA, 20 bp, Artificial sequence
  synthetic
ctaattggaaatgctacggt

SEQ ID NO: 25019 - DNA, 20 bp, Artificial sequence
  synthetic
aacatttaccgtatattcag

SEQ ID NO: 25020 - DNA, 20 bp, Artificial sequence
  synthetic
caattttttcaactaaaaag

SEQ ID NO: 25021 - DNA, 20 bp, Artificial sequence
  synthetic
accaccaaacatgacaccag

SEQ ID NO: 25022 - DNA, 20 bp, Artificial sequence
  synthetic
atcaatacacatatactcgt

SEQ ID NO: 25023 - DNA, 20 bp, Artificial sequence
  synthetic
cacaagcatttcgtaacgtg

SEQ ID NO: 25024 - DNA, 20 bp, Artificial sequence
  synthetic
ggacggatgtatcaacacaa

SEQ ID NO: 25025 - DNA, 20 bp, Artificial sequence
  synthetic
agcatttaatcttttaagat

SEQ ID NO: 25026 - DNA, 20 bp, Artificial sequence
  synthetic
atgcctacttgacctcccac

SEQ ID NO: 25027 - DNA, 20 bp, Artificial sequence
  synthetic
ggactgcggtgcatgtgact

SEQ ID NO: 25028 - DNA, 20 bp, Artificial sequence
  synthetic
agttgacaagacacatggct

SEQ ID NO: 25029 - DNA, 20 bp, Artificial sequence
  synthetic
acgaacaacaccggctcttc

SEQ ID NO: 25030 - DNA, 20 bp, Artificial sequence
  synthetic
cttcccttgcagggaaaatg

SEQ ID NO: 25031 - DNA, 20 bp, Artificial sequence
  synthetic
atggtcctgtctcctcttct

SEQ ID NO: 25032 - DNA, 20 bp, Artificial sequence
  synthetic
ttgagggcgccggcaaactt

SEQ ID NO: 25033 - DNA, 20 bp, Artificial sequence
  synthetic
ctgtccctctccccaatcca

SEQ ID NO: 25034 - DNA, 20 bp, Artificial sequence
  synthetic
tgattgaacctgtccttctt

SEQ ID NO: 25035 - DNA, 20 bp, Artificial sequence
  synthetic
ccggaccatcatccgctccc

SEQ ID NO: 25036 - DNA, 20 bp, Artificial sequence
  synthetic
aacctcgtaccaccttctcc

SEQ ID NO: 25037 - DNA, 20 bp, Artificial sequence
  synthetic
tgactaacgatgtccccacc

SEQ ID NO: 25038 - DNA, 20 bp, Artificial sequence
  synthetic
cccttctgtctggttgtgcc

SEQ ID NO: 25039 - DNA, 20 bp, Artificial sequence
  synthetic
atatctcaatggcagcaaac

SEQ ID NO: 25040 - DNA, 20 bp, Artificial sequence
  synthetic
ctttctccaaaaccttcact

SEQ ID NO: 25041 - DNA, 20 bp, Artificial sequence
  synthetic
tcacgcgctgtcgcgagctc

SEQ ID NO: 25042 - DNA, 20 bp, Artificial sequence
  synthetic
ctggcaagtccctccttgct

SEQ ID NO: 25043 - DNA, 20 bp, Artificial sequence
  synthetic
gccaacatcgcgatctccgt

SEQ ID NO: 25044 - DNA, 20 bp, Artificial sequence
  synthetic
ccttccagggtctctgtggt

SEQ ID NO: 25045 - DNA, 20 bp, Artificial sequence
  synthetic
ccatccacgctatcatcgct

SEQ ID NO: 25046 - DNA, 20 bp, Artificial sequence
  synthetic
ttgatgccaccctcccttcc

SEQ ID NO: 25047 - DNA, 20 bp, Artificial sequence
  synthetic
ttgttgtgactccagcaaac

SEQ ID NO: 25048 - DNA, 20 bp, Artificial sequence
  synthetic
gtgaacaagtgccacgtaca

SEQ ID NO: 25049 - DNA, 20 bp, Artificial sequence
  synthetic
gacaagccaacagtcgacat

SEQ ID NO: 25050 - DNA, 20 bp, Artificial sequence
  synthetic
cagatttttggagcagcctt

SEQ ID NO: 25051 - DNA, 20 bp, Artificial sequence
  synthetic
tccgtttcaagaatggaaaa

SEQ ID NO: 25052 - DNA, 20 bp, Artificial sequence
  synthetic
tgcggaactagaggaccatc

SEQ ID NO: 25053 - DNA, 20 bp, Artificial sequence
  synthetic
ccccctagtgaagttctcac

SEQ ID NO: 25054 - DNA, 20 bp, Artificial sequence
  synthetic
tgggaaaaggacgcggaagt

SEQ ID NO: 25055 - DNA, 20 bp, Artificial sequence
  synthetic
agggccagaaacattcagac

SEQ ID NO: 25056 - DNA, 20 bp, Artificial sequence
  synthetic
gaagtggaagtcccagagag

SEQ ID NO: 25057 - DNA, 20 bp, Artificial sequence
  synthetic
tttcagaaaacaaaaaatca

SEQ ID NO: 25058 - DNA, 20 bp, Artificial sequence
  synthetic
gctgctcagaggagaggacg

SEQ ID NO: 25059 - DNA, 20 bp, Artificial sequence
  synthetic
ctgggaacactgccaggaca

SEQ ID NO: 25060 - DNA, 20 bp, Artificial sequence
  synthetic
caaagatctccccaagataa

SEQ ID NO: 25061 - DNA, 20 bp, Artificial sequence
  synthetic
ggagtcccgctgctaatgat

SEQ ID NO: 25062 - DNA, 20 bp, Artificial sequence
  synthetic
gaaggctctccaaacaaata

SEQ ID NO: 25063 - DNA, 20 bp, Artificial sequence
  synthetic
cgtctgaatcagatgtcggc

SEQ ID NO: 25064 - DNA, 20 bp, Artificial sequence
  synthetic
ccctatgggaaggttgttga

SEQ ID NO: 25065 - DNA, 20 bp, Artificial sequence
  synthetic
gacgtcttccacatggcggc

SEQ ID NO: 25066 - DNA, 20 bp, Artificial sequence
  synthetic
agcactatgatggaaaccat

SEQ ID NO: 25067 - DNA, 20 bp, Artificial sequence
  synthetic
agggtgccagatccccaaga

SEQ ID NO: 25068 - DNA, 20 bp, Artificial sequence
  synthetic
atttcaagacaagaccagag

SEQ ID NO: 25069 - DNA, 20 bp, Artificial sequence
  synthetic
tgctcccaccacttcaacaa

SEQ ID NO: 25070 - DNA, 20 bp, Artificial sequence
  synthetic
ttccacagaagagaccttcg

SEQ ID NO: 25071 - DNA, 20 bp, Artificial sequence
  synthetic
cgccatggcacggaagaagc

SEQ ID NO: 25072 - DNA, 20 bp, Artificial sequence
  synthetic
gggtttggaccagttaggct

SEQ ID NO: 25073 - DNA, 20 bp, Artificial sequence
  synthetic
atggatgttggcgaactctg

SEQ ID NO: 25074 - DNA, 20 bp, Artificial sequence
  synthetic
cttctcaagacagctgcctc

SEQ ID NO: 25075 - DNA, 20 bp, Artificial sequence
  synthetic
aggacgctgtttggtggcat

SEQ ID NO: 25076 - DNA, 20 bp, Artificial sequence
  synthetic
catttgatcatcccacacac

SEQ ID NO: 25077 - DNA, 20 bp, Artificial sequence
  synthetic
gggacagcgttcgctgaagt

SEQ ID NO: 25078 - DNA, 20 bp, Artificial sequence
  synthetic
gggatgttgggcctggtgat

SEQ ID NO: 25079 - DNA, 20 bp, Artificial sequence
  synthetic
accagcccaaggcttgatgt

SEQ ID NO: 25080 - DNA, 20 bp, Artificial sequence
  synthetic
gggatattcaacacagccac

SEQ ID NO: 25081 - DNA, 20 bp, Artificial sequence
  synthetic
gagacccaaccacaggtggt

SEQ ID NO: 25082 - DNA, 20 bp, Artificial sequence
  synthetic
gagatgggtgaggctctgaa

SEQ ID NO: 25083 - DNA, 20 bp, Artificial sequence
  synthetic
aaagggtttgaatgggtcac

SEQ ID NO: 25084 - DNA, 20 bp, Artificial sequence
  synthetic
tttgtgatcacaacagacat

SEQ ID NO: 25085 - DNA, 20 bp, Artificial sequence
  synthetic
aatccgagtagaacaggtga

SEQ ID NO: 25086 - DNA, 20 bp, Artificial sequence
  synthetic
atctacagactgcgggagcc

SEQ ID NO: 25087 - DNA, 20 bp, Artificial sequence
  synthetic
atagggaaaatgactgcggg

SEQ ID NO: 25088 - DNA, 20 bp, Artificial sequence
  synthetic
ctgtacgcagtcattaccat

SEQ ID NO: 25089 - DNA, 20 bp, Artificial sequence
  synthetic
ccaaagggaacatccgcctc

SEQ ID NO: 25090 - DNA, 20 bp, Artificial sequence
  synthetic
gcagacttggatgacgaagc

SEQ ID NO: 25091 - DNA, 20 bp, Artificial sequence
  synthetic
caggtggtgacatacgcact

SEQ ID NO: 25092 - DNA, 20 bp, Artificial sequence
  synthetic
ctaaacaaaaaccgttgcac

SEQ ID NO: 25093 - DNA, 20 bp, Artificial sequence
  synthetic
cccgcgcccataaccaacat

SEQ ID NO: 25094 - DNA, 20 bp, Artificial sequence
  synthetic
ggagtaggaccagtcagaat

SEQ ID NO: 25095 - DNA, 20 bp, Artificial sequence
  synthetic
gttgtgaaagctctggatgt

SEQ ID NO: 25096 - DNA, 20 bp, Artificial sequence
  synthetic
tctatcacagtgcaccatca

SEQ ID NO: 25097 - DNA, 20 bp, Artificial sequence
  synthetic
gatgtgaagatgatgaacat

SEQ ID NO: 25098 - DNA, 20 bp, Artificial sequence
  synthetic
ggttggggtaatggttgtgg

SEQ ID NO: 25099 - DNA, 20 bp, Artificial sequence
  synthetic
tctgatggaccatgtcgtat

SEQ ID NO: 25100 - DNA, 20 bp, Artificial sequence
  synthetic
ctggagcataacatgtggaa

SEQ ID NO: 25101 - DNA, 20 bp, Artificial sequence
  synthetic
gttgcctccgccagaacaac

SEQ ID NO: 25102 - DNA, 20 bp, Artificial sequence
  synthetic
gcgttgcacgactggaacat

SEQ ID NO: 25103 - DNA, 20 bp, Artificial sequence
  synthetic
cttatcatcggagttatgtc

SEQ ID NO: 25104 - DNA, 20 bp, Artificial sequence
  synthetic
gaggatgcccaaataacagg

SEQ ID NO: 25105 - DNA, 20 bp, Artificial sequence
  synthetic
atgtggcatgtgacgaatgg

SEQ ID NO: 25106 - DNA, 20 bp, Artificial sequence
  synthetic
atttcccaaggccagcgaat

SEQ ID NO: 25107 - DNA, 20 bp, Artificial sequence
  synthetic
ttgtttgtgatggatgaagc

SEQ ID NO: 25108 - DNA, 20 bp, Artificial sequence
  synthetic
aaaatgcttccagagcattt

SEQ ID NO: 25109 - DNA, 20 bp, Artificial sequence
  synthetic
gatggaatcgtggcaacgga

SEQ ID NO: 25110 - DNA, 20 bp, Artificial sequence
  synthetic
acctggaactaccatggaag

SEQ ID NO: 25111 - DNA, 20 bp, Artificial sequence
  synthetic
aagtgggcatcagctcggga

SEQ ID NO: 25112 - DNA, 20 bp, Artificial sequence
  synthetic
gatgtgatttccagggaaga

SEQ ID NO: 25113 - DNA, 20 bp, Artificial sequence
  synthetic
gacgtccctttctgttcaca

SEQ ID NO: 25114 - DNA, 20 bp, Artificial sequence
  synthetic
ctactcatgtactttcacag

SEQ ID NO: 25115 - DNA, 20 bp, Artificial sequence
  synthetic
aacgaacacatggaagacaa

SEQ ID NO: 25116 - DNA, 20 bp, Artificial sequence
  synthetic
agtcaggccacaggttttgt

SEQ ID NO: 25117 - DNA, 20 bp, Artificial sequence
  synthetic
ggccaaaaggtctcgctccc

SEQ ID NO: 25118 - DNA, 20 bp, Artificial sequence
  synthetic
gccctgttcatgtccattga

SEQ ID NO: 25119 - DNA, 20 bp, Artificial sequence
  synthetic
atttacgaagggaaaacaaa

SEQ ID NO: 25120 - DNA, 20 bp, Artificial sequence
  synthetic
aatcgatgtgtgggaaagaa

SEQ ID NO: 25121 - DNA, 20 bp, Artificial sequence
  synthetic
gcggctatgacttgtcgctt

SEQ ID NO: 25122 - DNA, 20 bp, Artificial sequence
  synthetic
cagagtggctttggatacag

SEQ ID NO: 25123 - DNA, 20 bp, Artificial sequence
  synthetic
tcactcttgattggcggtgc

SEQ ID NO: 25124 - DNA, 20 bp, Artificial sequence
  synthetic
aactcgacgttgctcgtcct

SEQ ID NO: 25125 - DNA, 20 bp, Artificial sequence
  synthetic
ccgacgtacctggccggttc

SEQ ID NO: 25126 - DNA, 20 bp, Artificial sequence
  synthetic
aacgatagtacattgtttat

SEQ ID NO: 25127 - DNA, 20 bp, Artificial sequence
  synthetic
atagacgagatggatcagat

SEQ ID NO: 25128 - DNA, 20 bp, Artificial sequence
  synthetic
tggtttactgaagcatacgt

SEQ ID NO: 25129 - DNA, 20 bp, Artificial sequence
  synthetic
tttttcaagtatcacacagg

SEQ ID NO: 25130 - DNA, 20 bp, Artificial sequence
  synthetic
atcaaacaaacaaagagatt

SEQ ID NO: 25131 - DNA, 20 bp, Artificial sequence
  synthetic
gagaaaggcattgacagcat

SEQ ID NO: 25132 - DNA, 20 bp, Artificial sequence
  synthetic
cggcgtggaagaactggacg

SEQ ID NO: 25133 - DNA, 20 bp, Artificial sequence
  synthetic
gcccccaggttccacgacga

SEQ ID NO: 25134 - DNA, 20 bp, Artificial sequence
  synthetic
cgcgacacaatcgaaaacct

SEQ ID NO: 25135 - DNA, 20 bp, Artificial sequence
  synthetic
gcgtccgtgattggaggagt

SEQ ID NO: 25136 - DNA, 20 bp, Artificial sequence
  synthetic
tcgctggtgaagactgacac

SEQ ID NO: 25137 - DNA, 20 bp, Artificial sequence
  synthetic
ggcgtcgacgtgtatgccga

SEQ ID NO: 25138 - DNA, 20 bp, Artificial sequence
  synthetic
ccctatcacatcgaagtgct

SEQ ID NO: 25139 - DNA, 20 bp, Artificial sequence
  synthetic
cagtccttcaactaccacgg

SEQ ID NO: 25140 - DNA, 20 bp, Artificial sequence
  synthetic
gtcgacacgctaacagtcga

SEQ ID NO: 25141 - DNA, 20 bp, Artificial sequence
  synthetic
tcccaccatttccacgcctt

SEQ ID NO: 25142 - DNA, 20 bp, Artificial sequence
  synthetic
caccggcgagacctgcggct

SEQ ID NO: 25143 - DNA, 20 bp, Artificial sequence
  synthetic
accaaagaccttgtcaaagc

SEQ ID NO: 25144 - DNA, 20 bp, Artificial sequence
  synthetic
ggtttccagcccgcgcaagg

SEQ ID NO: 25145 - DNA, 20 bp, Artificial sequence
  synthetic
aaaacaaaacaaagtgcaag

SEQ ID NO: 25146 - DNA, 20 bp, Artificial sequence
  synthetic
ggactggctggtcgcaagaa

SEQ ID NO: 25147 - DNA, 20 bp, Artificial sequence
  synthetic
gtcaacactttggatgcggg

SEQ ID NO: 25148 - DNA, 20 bp, Artificial sequence
  synthetic
agggtagttattgccatctt

SEQ ID NO: 25149 - DNA, 20 bp, Artificial sequence
  synthetic
gtgacttttgttccgaccac

SEQ ID NO: 25150 - DNA, 20 bp, Artificial sequence
  synthetic
tggcagagtggaacaggagg

SEQ ID NO: 25151 - DNA, 20 bp, Artificial sequence
  synthetic
ggaggtcatgtgacgtgtaa

SEQ ID NO: 25152 - DNA, 20 bp, Artificial sequence
  synthetic
ataaccaagatattgattgg

SEQ ID NO: 25153 - DNA, 20 bp, Artificial sequence
  synthetic
aagatcatacctgaatggtg

SEQ ID NO: 25154 - DNA, 20 bp, Artificial sequence
  synthetic
gctggcatgggactgaagga

SEQ ID NO: 25155 - DNA, 20 bp, Artificial sequence
  synthetic
gtggaacaaactgacacagg

SEQ ID NO: 25156 - DNA, 20 bp, Artificial sequence
  synthetic
aaaaacggaaaagaaatagg

SEQ ID NO: 25157 - DNA, 20 bp, Artificial sequence
  synthetic
gaaacacgactaagagaaga

SEQ ID NO: 25158 - DNA, 20 bp, Artificial sequence
  synthetic
aaaatgcgggaagcgatcga

SEQ ID NO: 25159 - DNA, 20 bp, Artificial sequence
  synthetic
attgctgtagcgttttcagg

SEQ ID NO: 25160 - DNA, 20 bp, Artificial sequence
  synthetic
aaagtgccagacattactga

SEQ ID NO: 25161 - DNA, 20 bp, Artificial sequence
  synthetic
cccactggaacgcgaagcgt

SEQ ID NO: 25162 - DNA, 20 bp, Artificial sequence
  synthetic
aaactggttgatgatgagag

SEQ ID NO: 25163 - DNA, 20 bp, Artificial sequence
  synthetic
acttatgccctgaacaccgt

SEQ ID NO: 25164 - DNA, 20 bp, Artificial sequence
  synthetic
gcaatcaactcgaccgttcc

SEQ ID NO: 25165 - DNA, 20 bp, Artificial sequence
  synthetic
tgactctcacgcttactcca

SEQ ID NO: 25166 - DNA, 20 bp, Artificial sequence
  synthetic
tcatgccagccccaataaca

SEQ ID NO: 25167 - DNA, 20 bp, Artificial sequence
  synthetic
tgggtcgttactttggaaat

SEQ ID NO: 25168 - DNA, 20 bp, Artificial sequence
  synthetic
agtccacctttgaatttgtt

SEQ ID NO: 25169 - DNA, 20 bp, Artificial sequence
  synthetic
cctataccgtttttgctatg

SEQ ID NO: 25170 - DNA, 20 bp, Artificial sequence
  synthetic
atgtgcccagacctttaccc

SEQ ID NO: 25171 - DNA, 20 bp, Artificial sequence
  synthetic
ttggagtaacccccggttca

SEQ ID NO: 25172 - DNA, 20 bp, Artificial sequence
  synthetic
gcccggagtggaaaaacctt

SEQ ID NO: 25173 - DNA, 20 bp, Artificial sequence
  synthetic
ctaaacacgtgaataacgtg

SEQ ID NO: 25174 - DNA, 20 bp, Artificial sequence
  synthetic
caggtttgccctacaaaaag

SEQ ID NO: 25175 - DNA, 20 bp, Artificial sequence
  synthetic
tacgtggtgggctgccttca

SEQ ID NO: 25176 - DNA, 20 bp, Artificial sequence
  synthetic
tttcttggtataaacctgga

SEQ ID NO: 25177 - DNA, 20 bp, Artificial sequence
  synthetic
gatgctggatggtcacgttg

SEQ ID NO: 25178 - DNA, 20 bp, Artificial sequence
  synthetic
gtagcgatgctgtgtgtgtg

SEQ ID NO: 25179 - DNA, 20 bp, Artificial sequence
  synthetic
ttgatgcttctgcccaaggt

SEQ ID NO: 25180 - DNA, 20 bp, Artificial sequence
  synthetic
atcctaaagacacaaatgtt

SEQ ID NO: 25181 - DNA, 20 bp, Artificial sequence
  synthetic
ttgctaaagtgcccagtttt

SEQ ID NO: 25182 - DNA, 20 bp, Artificial sequence
  synthetic
attttgtagtcccttttata

SEQ ID NO: 25183 - DNA, 20 bp, Artificial sequence
  synthetic
cttccttcctgtttgctcaa

SEQ ID NO: 25184 - DNA, 20 bp, Artificial sequence
  synthetic
gtgactcctttcagagaccg

SEQ ID NO: 25185 - DNA, 20 bp, Artificial sequence
  synthetic
taggcaaatctgctgcagct

SEQ ID NO: 25186 - DNA, 20 bp, Artificial sequence
  synthetic
gtttctgtcaaatggtttct

SEQ ID NO: 25187 - DNA, 20 bp, Artificial sequence
  synthetic
cctttgtaatgctttacaaa

SEQ ID NO: 25188 - DNA, 20 bp, Artificial sequence
  synthetic
aggtgatcttctcaaaacat

SEQ ID NO: 25189 - DNA, 20 bp, Artificial sequence
  synthetic
aaaaggtcaaagcaggaaag

SEQ ID NO: 25190 - DNA, 20 bp, Artificial sequence
  synthetic
aactcagtggctttccttat

SEQ ID NO: 25191 - DNA, 20 bp, Artificial sequence
  synthetic
acaagagactccagattgct

SEQ ID NO: 25192 - DNA, 20 bp, Artificial sequence
  synthetic
acctcgaggcaatgttgtct

SEQ ID NO: 25193 - DNA, 20 bp, Artificial sequence
  synthetic
taaagttgtcaatatgggtg

SEQ ID NO: 25194 - DNA, 20 bp, Artificial sequence
  synthetic
tggaatggcaagttctgctt

SEQ ID NO: 25195 - DNA, 20 bp, Artificial sequence
  synthetic
ggaaattgcccactcacact

SEQ ID NO: 25196 - DNA, 20 bp, Artificial sequence
  synthetic
cagacctttccaccactctt

SEQ ID NO: 25197 - DNA, 20 bp, Artificial sequence
  synthetic
tcaaccttactttgagattt

SEQ ID NO: 25198 - DNA, 20 bp, Artificial sequence
  synthetic
taagggcaagttgcttcttt

SEQ ID NO: 25199 - DNA, 20 bp, Artificial sequence
  synthetic
ctccgtggtaaacacggatg

SEQ ID NO: 25200 - DNA, 20 bp, Artificial sequence
  synthetic
tgacaatgcggagaaaggta

SEQ ID NO: 25201 - DNA, 20 bp, Artificial sequence
  synthetic
tagtacaaccactgttacat

SEQ ID NO: 25202 - DNA, 20 bp, Artificial sequence
  synthetic
tgacaagaaatcactcaagg

SEQ ID NO: 25203 - DNA, 20 bp, Artificial sequence
  synthetic
tgtcagcaagctgaaaagaa

SEQ ID NO: 25204 - DNA, 20 bp, Artificial sequence
  synthetic
catatttgaaatcttggaag

SEQ ID NO: 25205 - DNA, 20 bp, Artificial sequence
  synthetic
tactgccatggaaacagctt

SEQ ID NO: 25206 - DNA, 20 bp, Artificial sequence
  synthetic
gcggcctccacgctctttgt

SEQ ID NO: 25207 - DNA, 20 bp, Artificial sequence
  synthetic
accagggtttaggtctttca

SEQ ID NO: 25208 - DNA, 20 bp, Artificial sequence
  synthetic
tgacacaaaattctggacag

SEQ ID NO: 25209 - DNA, 20 bp, Artificial sequence
  synthetic
gtgtggcccctgcaaaccac

SEQ ID NO: 25210 - DNA, 20 bp, Artificial sequence
  synthetic
acggcatttctttccttgac

SEQ ID NO: 25211 - DNA, 20 bp, Artificial sequence
  synthetic
tggtggtgcagtcgcccaaa

SEQ ID NO: 25212 - DNA, 20 bp, Artificial sequence
  synthetic
ccttgataaaacagtttctc

SEQ ID NO: 25213 - DNA, 20 bp, Artificial sequence
  synthetic
caattgactcagttgaacaa

SEQ ID NO: 25214 - DNA, 20 bp, Artificial sequence
  synthetic
ctctacacccaggaaccagg

SEQ ID NO: 25215 - DNA, 20 bp, Artificial sequence
  synthetic
ccagaattggtgattgtccc

SEQ ID NO: 25216 - DNA, 20 bp, Artificial sequence
  synthetic
agtccatctttgaacttctt

SEQ ID NO: 25217 - DNA, 20 bp, Artificial sequence
  synthetic
acgcgatttaccaaggaaag

SEQ ID NO: 25218 - DNA, 20 bp, Artificial sequence
  synthetic
gtgtaattggtataacatag

SEQ ID NO: 25219 - DNA, 20 bp, Artificial sequence
  synthetic
gaagggtaagaaattctctt

SEQ ID NO: 25220 - DNA, 20 bp, Artificial sequence
  synthetic
tactaggattgtgggaccag

SEQ ID NO: 25221 - DNA, 20 bp, Artificial sequence
  synthetic
cgcaccaatcgtgttaatgg

SEQ ID NO: 25222 - DNA, 20 bp, Artificial sequence
  synthetic
tagggcgtggtatgaggaag

SEQ ID NO: 25223 - DNA, 20 bp, Artificial sequence
  synthetic
cggaatgactctggctgact

SEQ ID NO: 25224 - DNA, 20 bp, Artificial sequence
  synthetic
ggtggggaacctgggatccg

SEQ ID NO: 25225 - DNA, 20 bp, Artificial sequence
  synthetic
caggttccctacatcactaa

SEQ ID NO: 25226 - DNA, 20 bp, Artificial sequence
  synthetic
tctgaagaacttaaaaggct

SEQ ID NO: 25227 - DNA, 20 bp, Artificial sequence
  synthetic
tcccagtattgccttcaacc

SEQ ID NO: 25228 - DNA, 20 bp, Artificial sequence
  synthetic
agctggacttaagataccaa

SEQ ID NO: 25229 - DNA, 20 bp, Artificial sequence
  synthetic
gcggggtagagtaggacggg

SEQ ID NO: 25230 - DNA, 20 bp, Artificial sequence
  synthetic
ggaagacagcttgttaataa

SEQ ID NO: 25231 - DNA, 20 bp, Artificial sequence
  synthetic
aaaacaggtatcaggtttat

SEQ ID NO: 25232 - DNA, 20 bp, Artificial sequence
  synthetic
aatgatgtcccaaaacccag

SEQ ID NO: 25233 - DNA, 20 bp, Artificial sequence
  synthetic
tgcagagttgaaaccggtaa

SEQ ID NO: 25234 - DNA, 20 bp, Artificial sequence
  synthetic
ggaggaaaaggcaatacccc

SEQ ID NO: 25235 - DNA, 20 bp, Artificial sequence
  synthetic
gagacccttatttgaggaac

SEQ ID NO: 25236 - DNA, 20 bp, Artificial sequence
  synthetic
cttgaaattaaaagatcttt

SEQ ID NO: 25237 - DNA, 20 bp, Artificial sequence
  synthetic
atgggtcaagcaaaaacctg

SEQ ID NO: 25238 - DNA, 20 bp, Artificial sequence
  synthetic
aatactagaaggagaccaaa

SEQ ID NO: 25239 - DNA, 20 bp, Artificial sequence
  synthetic
gggcactgccgcatatgaga

SEQ ID NO: 25240 - DNA, 20 bp, Artificial sequence
  synthetic
agtttctagcaagactggca

SEQ ID NO: 25241 - DNA, 20 bp, Artificial sequence
  synthetic
tcaattataaacttccggct

SEQ ID NO: 25242 - DNA, 20 bp, Artificial sequence
  synthetic
aaccacggccggcttcgcac

SEQ ID NO: 25243 - DNA, 20 bp, Artificial sequence
  synthetic
aatgcctgaccatggtaaat

SEQ ID NO: 25244 - DNA, 20 bp, Artificial sequence
  synthetic
gtctcgtcacaccggtagcc

SEQ ID NO: 25245 - DNA, 20 bp, Artificial sequence
  synthetic
aagatcactccgttgagctc

SEQ ID NO: 25246 - DNA, 20 bp, Artificial sequence
  synthetic
acaccactctatcgtacaac

SEQ ID NO: 25247 - DNA, 20 bp, Artificial sequence
  synthetic
caactgtcgcgatgcttact

SEQ ID NO: 25248 - DNA, 20 bp, Artificial sequence
  synthetic
agatcctcacgttttgcttg

SEQ ID NO: 25249 - DNA, 20 bp, Artificial sequence
  synthetic
aagggggaaacttccgtgac

SEQ ID NO: 25250 - DNA, 20 bp, Artificial sequence
  synthetic
agcgtggagtaggtgtggca

SEQ ID NO: 25251 - DNA, 20 bp, Artificial sequence
  synthetic
ggaccataatcctgacaccc

SEQ ID NO: 25252 - DNA, 20 bp, Artificial sequence
  synthetic
gggtggcgctcattgtcatg

SEQ ID NO: 25253 - DNA, 20 bp, Artificial sequence
  synthetic
ctagtagcgacgaaacctct

SEQ ID NO: 25254 - DNA, 20 bp, Artificial sequence
  synthetic
ccttagttggggaagacctg

SEQ ID NO: 25255 - DNA, 20 bp, Artificial sequence
  synthetic
caatgctgtcggccattgga

SEQ ID NO: 25256 - DNA, 20 bp, Artificial sequence
  synthetic
tggaggagacagtgacgtcc

SEQ ID NO: 25257 - DNA, 20 bp, Artificial sequence
  synthetic
acccaaatctcaccaaagag

SEQ ID NO: 25258 - DNA, 20 bp, Artificial sequence
  synthetic
gcttggcacacagtaggaat

SEQ ID NO: 25259 - DNA, 20 bp, Artificial sequence
  synthetic
cagcagctagcgtgtctgcc

SEQ ID NO: 25260 - DNA, 20 bp, Artificial sequence
  synthetic
gggtcagtcgtgaaaacttt

SEQ ID NO: 25261 - DNA, 20 bp, Artificial sequence
  synthetic
aactgactgcaaaccccttc

SEQ ID NO: 25262 - DNA, 20 bp, Artificial sequence
  synthetic
ttgcctcttccttagactac

SEQ ID NO: 25263 - DNA, 20 bp, Artificial sequence
  synthetic
tcgggcgaacatcctggtca

SEQ ID NO: 25264 - DNA, 20 bp, Artificial sequence
  synthetic
gcaagaatgccatcatctgt

SEQ ID NO: 25265 - DNA, 20 bp, Artificial sequence
  synthetic
tcgttggctggcctttcttc

SEQ ID NO: 25266 - DNA, 20 bp, Artificial sequence
  synthetic
tgcctggcggctttgcgcta

SEQ ID NO: 25267 - DNA, 20 bp, Artificial sequence
  synthetic
aacgacgtcaccacagacgt

SEQ ID NO: 25268 - DNA, 20 bp, Artificial sequence
  synthetic
gccggtggtgccccctctgc

SEQ ID NO: 25269 - DNA, 20 bp, Artificial sequence
  synthetic
tcttggtctgagacgatcgc

SEQ ID NO: 25270 - DNA, 20 bp, Artificial sequence
  synthetic
ttcaactgtggcttcgatgt

SEQ ID NO: 25271 - DNA, 20 bp, Artificial sequence
  synthetic
tcgggagccgatggtgcaga

SEQ ID NO: 25272 - DNA, 20 bp, Artificial sequence
  synthetic
ttctatgcccccccgggtgc

SEQ ID NO: 25273 - DNA, 20 bp, Artificial sequence
  synthetic
caaaacggcggagatgcagg

SEQ ID NO: 25274 - DNA, 20 bp, Artificial sequence
  synthetic
tccatcgttcgtgtcgctcg

SEQ ID NO: 25275 - DNA, 20 bp, Artificial sequence
  synthetic
atgttctctcatggcgacga

SEQ ID NO: 25276 - DNA, 20 bp, Artificial sequence
  synthetic
cgcgcagtccccccccttac

SEQ ID NO: 25277 - DNA, 20 bp, Artificial sequence
  synthetic
ctttccgccgcgctcgagag

SEQ ID NO: 25278 - DNA, 20 bp, Artificial sequence
  synthetic
ttctcagcggcggctgctct

SEQ ID NO: 25279 - DNA, 20 bp, Artificial sequence
  synthetic
agctcccttcgcgaccgggc

SEQ ID NO: 25280 - DNA, 20 bp, Artificial sequence
  synthetic
cgccctgtctctttcctctc

SEQ ID NO: 25281 - DNA, 20 bp, Artificial sequence
  synthetic
ctcccaaaacaacctgtgta

SEQ ID NO: 25282 - DNA, 20 bp, Artificial sequence
  synthetic
atcctcggtatccacgtcgc

SEQ ID NO: 25283 - DNA, 20 bp, Artificial sequence
  synthetic
atccctcccgcctttggtgc

SEQ ID NO: 25284 - DNA, 20 bp, Artificial sequence
  synthetic
tcccagcttcctgataacct

SEQ ID NO: 25285 - DNA, 20 bp, Artificial sequence
  synthetic
gccatcgattccgtctggga

SEQ ID NO: 25286 - DNA, 20 bp, Artificial sequence
  synthetic
ggtaaccctctccagcatgg

SEQ ID NO: 25287 - DNA, 20 bp, Artificial sequence
  synthetic
tttgacatcactttccttaa

SEQ ID NO: 25288 - DNA, 20 bp, Artificial sequence
  synthetic
aactactcggcttggtgtga

SEQ ID NO: 25289 - DNA, 20 bp, Artificial sequence
  synthetic
ggcccacccacagcaagaat

SEQ ID NO: 25290 - DNA, 20 bp, Artificial sequence
  synthetic
ttccccttcctcccataact

SEQ ID NO: 25291 - DNA, 20 bp, Artificial sequence
  synthetic
ccggtggggtaaggttggtg

SEQ ID NO: 25292 - DNA, 20 bp, Artificial sequence
  synthetic
ggattttcgagttcgttggc

SEQ ID NO: 25293 - DNA, 20 bp, Artificial sequence
  synthetic
tggtgggagcccgcggccgc

SEQ ID NO: 25294 - DNA, 20 bp, Artificial sequence
  synthetic
ctcaaacttccttacattgg

SEQ ID NO: 25295 - DNA, 20 bp, Artificial sequence
  synthetic
ggtcctgctcagtgctacgg

SEQ ID NO: 25296 - DNA, 20 bp, Artificial sequence
  synthetic
tcgggagctgatggcgcaga

SEQ ID NO: 25297 - DNA, 20 bp, Artificial sequence
  synthetic
ttttatgcccctcccggtgc

SEQ ID NO: 25298 - DNA, 20 bp, Artificial sequence
  synthetic
tccatcgttcgtgtcgcccg

SEQ ID NO: 25299 - DNA, 20 bp, Artificial sequence
  synthetic
caacacctctttgccaagct

SEQ ID NO: 25300 - DNA, 20 bp, Artificial sequence
  synthetic
cttggggtcctcgtcaaaga

SEQ ID NO: 25301 - DNA, 20 bp, Artificial sequence
  synthetic
gctgccaactctgtcaccca

SEQ ID NO: 25302 - DNA, 20 bp, Artificial sequence
  synthetic
tctactcttgctcaggccct

SEQ ID NO: 25303 - DNA, 20 bp, Artificial sequence
  synthetic
ggctctcttcgcgatcgggc

SEQ ID NO: 25304 - DNA, 20 bp, Artificial sequence
  synthetic
cgcccggtctctttcctctc

SEQ ID NO: 25305 - DNA, 20 bp, Artificial sequence
  synthetic
cagctccctgacagcctccc

SEQ ID NO: 25306 - DNA, 20 bp, Artificial sequence
  synthetic
aaccctctccagtatggcag

SEQ ID NO: 25307 - DNA, 20 bp, Artificial sequence
  synthetic
agcaaaatgggagctcaggt

SEQ ID NO: 25308 - DNA, 20 bp, Artificial sequence
  synthetic
acgggctacactgttcacgt

SEQ ID NO: 25309 - DNA, 20 bp, Artificial sequence
  synthetic
gatgactttcaatccccctc

SEQ ID NO: 25310 - DNA, 20 bp, Artificial sequence
  synthetic
attactgcttggtaccaaac

SEQ ID NO: 25311 - DNA, 20 bp, Artificial sequence
  synthetic
tatgtcggtaactatagagt

SEQ ID NO: 25312 - DNA, 20 bp, Artificial sequence
  synthetic
caagactccattctagagaa

SEQ ID NO: 25313 - DNA, 20 bp, Artificial sequence
  synthetic
ctagtgtgtggtaaagccat

SEQ ID NO: 25314 - DNA, 20 bp, Artificial sequence
  synthetic
cgcatgctaatgtacaactt

SEQ ID NO: 25315 - DNA, 20 bp, Artificial sequence
  synthetic
atcaagaagagagatatttt

SEQ ID NO: 25316 - DNA, 20 bp, Artificial sequence
  synthetic
gattcagtagctatgaggca

SEQ ID NO: 25317 - DNA, 20 bp, Artificial sequence
  synthetic
gtgcgatccttatgcctatt

SEQ ID NO: 25318 - DNA, 20 bp, Artificial sequence
  synthetic
cagcaaaatgggagctcaag

SEQ ID NO: 25319 - DNA, 20 bp, Artificial sequence
  synthetic
ggaggcgacagcggaggatc

SEQ ID NO: 25320 - DNA, 20 bp, Artificial sequence
  synthetic
ggcaggttacacgattcacg

SEQ ID NO: 25321 - DNA, 20 bp, Artificial sequence
  synthetic
tgacttccagtccccttgtg

SEQ ID NO: 25322 - DNA, 20 bp, Artificial sequence
  synthetic
gaacaagacccaagatcaag

SEQ ID NO: 25323 - DNA, 20 bp, Artificial sequence
  synthetic
gtactcccctccgggtgcgg

SEQ ID NO: 25324 - DNA, 20 bp, Artificial sequence
  synthetic
tgtccacgtggctgacacca

SEQ ID NO: 25325 - DNA, 20 bp, Artificial sequence
  synthetic
gagatcggcatgtgtgtaca

SEQ ID NO: 25326 - DNA, 20 bp, Artificial sequence
  synthetic
acacgtaagggtatggatcc

SEQ ID NO: 25327 - DNA, 20 bp, Artificial sequence
  synthetic
gtatgtgggcaattacagag

SEQ ID NO: 25328 - DNA, 20 bp, Artificial sequence
  synthetic
aaacaagcactatccagtcg

SEQ ID NO: 25329 - DNA, 20 bp, Artificial sequence
  synthetic
gggtggtgaaggtgttgttg

SEQ ID NO: 25330 - DNA, 20 bp, Artificial sequence
  synthetic
tcaagactccatcctggaaa

SEQ ID NO: 25331 - DNA, 20 bp, Artificial sequence
  synthetic
acaactgcccctgttggaaa

SEQ ID NO: 25332 - DNA, 20 bp, Artificial sequence
  synthetic
ggcaccagaaaccccccccc

SEQ ID NO: 25333 - DNA, 20 bp, Artificial sequence
  synthetic
ctccaaggaggctggtttcc

SEQ ID NO: 25334 - DNA, 20 bp, Artificial sequence
  synthetic
gaacacgaacgtggatgagt

SEQ ID NO: 25335 - DNA, 20 bp, Artificial sequence
  synthetic
tatcaaaaagagagacattt

SEQ ID NO: 25336 - DNA, 20 bp, Artificial sequence
  synthetic
tgattcagtggccatgaggc

SEQ ID NO: 25337 - DNA, 20 bp, Artificial sequence
  synthetic
tgtgcgatctttgtgcttat

SEQ ID NO: 25338 - DNA, 20 bp, Artificial sequence
  synthetic
agatgctctcaccgaagctg

SEQ ID NO: 25339 - DNA, 20 bp, Artificial sequence
  synthetic
gttcttggacaacggtacga

SEQ ID NO: 25340 - DNA, 20 bp, Artificial sequence
  synthetic
aaattttcattctactcccg

SEQ ID NO: 25341 - DNA, 20 bp, Artificial sequence
  synthetic
tttcacaattaatcctggta

SEQ ID NO: 25342 - DNA, 20 bp, Artificial sequence
  synthetic
ttacgatggttatccaagat

SEQ ID NO: 25343 - DNA, 20 bp, Artificial sequence
  synthetic
acccagaccatttaggatgt

SEQ ID NO: 25344 - DNA, 20 bp, Artificial sequence
  synthetic
atttattgaggccaatgagt

SEQ ID NO: 25345 - DNA, 20 bp, Artificial sequence
  synthetic
aaagtcagtggactcagagg

SEQ ID NO: 25346 - DNA, 20 bp, Artificial sequence
  synthetic
catactcatggctacaggta

SEQ ID NO: 25347 - DNA, 20 bp, Artificial sequence
  synthetic
actagaacccagcgtctttc

SEQ ID NO: 25348 - DNA, 20 bp, Artificial sequence
  synthetic
tggatacaccaacaatgaga

SEQ ID NO: 25349 - DNA, 20 bp, Artificial sequence
  synthetic
ttagacggaaatggcttgac

SEQ ID NO: 25350 - DNA, 20 bp, Artificial sequence
  synthetic
ttaaacctccgattcggcaa

SEQ ID NO: 25351 - DNA, 20 bp, Artificial sequence
  synthetic
ggcattgtgagacaacgggt

SEQ ID NO: 25352 - DNA, 20 bp, Artificial sequence
  synthetic
gaaagcaatgcagtcaagta

SEQ ID NO: 25353 - DNA, 20 bp, Artificial sequence
  synthetic
gcaacggcacacggcagtac

SEQ ID NO: 25354 - DNA, 20 bp, Artificial sequence
  synthetic
aaaatgcgttattaagaaaa

SEQ ID NO: 25355 - DNA, 20 bp, Artificial sequence
  synthetic
agacaattctgcattggaca

SEQ ID NO: 25356 - DNA, 20 bp, Artificial sequence
  synthetic
gtgagggaggcgcccggcga

SEQ ID NO: 25357 - DNA, 20 bp, Artificial sequence
  synthetic
aatcccaatctggcttcctc

SEQ ID NO: 25358 - DNA, 20 bp, Artificial sequence
  synthetic
ctcattccatcccaaattaa

SEQ ID NO: 25359 - DNA, 20 bp, Artificial sequence
  synthetic
actcctggttcacaggctga

SEQ ID NO: 25360 - DNA, 20 bp, Artificial sequence
  synthetic
attacacccgagcccaacac

SEQ ID NO: 25361 - DNA, 20 bp, Artificial sequence
  synthetic
aatcagctcaaaccgtctat

SEQ ID NO: 25362 - DNA, 20 bp, Artificial sequence
  synthetic
ttctaatactgttcttctgt

SEQ ID NO: 25363 - DNA, 20 bp, Artificial sequence
  synthetic
gggggttgtacacaacaata

SEQ ID NO: 25364 - DNA, 20 bp, Artificial sequence
  synthetic
cgcctttcacaaagaaggag

SEQ ID NO: 25365 - DNA, 20 bp, Artificial sequence
  synthetic
accacagaaagccacgccga

SEQ ID NO: 25366 - DNA, 20 bp, Artificial sequence
  synthetic
cgaagggatgtcactcccaa

SEQ ID NO: 25367 - DNA, 20 bp, Artificial sequence
  synthetic
ttgaggcagctggccaacga

SEQ ID NO: 25368 - DNA, 20 bp, Artificial sequence
  synthetic
gagaaggacttggtcaagac

SEQ ID NO: 25369 - DNA, 20 bp, Artificial sequence
  synthetic
tccatgaatcaaccttgaag

SEQ ID NO: 25370 - DNA, 20 bp, Artificial sequence
  synthetic
tttgacatgaggataagaac

SEQ ID NO: 25371 - DNA, 20 bp, Artificial sequence
  synthetic
gactaccgaaacatatatac

SEQ ID NO: 25372 - DNA, 20 bp, Artificial sequence
  synthetic
gagggcgactaaatagaggg

SEQ ID NO: 25373 - DNA, 20 bp, Artificial sequence
  synthetic
aggaggctattcaaggccat

SEQ ID NO: 25374 - DNA, 20 bp, Artificial sequence
  synthetic
acaaagcaggagattattta

SEQ ID NO: 25375 - DNA, 20 bp, Artificial sequence
  synthetic
ataaatttgctacaaaaagg

SEQ ID NO: 25376 - DNA, 20 bp, Artificial sequence
  synthetic
catatccaacacgcaatgtt

SEQ ID NO: 25377 - DNA, 20 bp, Artificial sequence
  synthetic
cacatggagtctctctcgaa

SEQ ID NO: 25378 - DNA, 20 bp, Artificial sequence
  synthetic
gtgacaatcaatgtataact

SEQ ID NO: 25379 - DNA, 20 bp, Artificial sequence
  synthetic
tttattttggcaaaaaacaa

SEQ ID NO: 25380 - DNA, 20 bp, Artificial sequence
  synthetic
atgagcattgccctaaatgt

SEQ ID NO: 25381 - DNA, 20 bp, Artificial sequence
  synthetic
attttgctgttgcacttttt

SEQ ID NO: 25382 - DNA, 20 bp, Artificial sequence
  synthetic
acaattcatcaacggatcca

SEQ ID NO: 25383 - DNA, 20 bp, Artificial sequence
  synthetic
tagctactcaaatacataat

SEQ ID NO: 25384 - DNA, 20 bp, Artificial sequence
  synthetic
cagagattgtaaggcttact

SEQ ID NO: 25385 - DNA, 20 bp, Artificial sequence
  synthetic
ttaccgatattactaatcca

SEQ ID NO: 25386 - DNA, 20 bp, Artificial sequence
  synthetic
agttctttctaataatacaa

SEQ ID NO: 25387 - DNA, 20 bp, Artificial sequence
  synthetic
tcaaactaatagatagattg

SEQ ID NO: 25388 - DNA, 20 bp, Artificial sequence
  synthetic
gagcctgcagaacacgcagg

SEQ ID NO: 25389 - DNA, 20 bp, Artificial sequence
  synthetic
tcatttgctagtctgtttct

SEQ ID NO: 25390 - DNA, 20 bp, Artificial sequence
  synthetic
gcgcgaacagccaaagtcaa

SEQ ID NO: 25391 - DNA, 20 bp, Artificial sequence
  synthetic
gagcccatcattttcagcac

SEQ ID NO: 25392 - DNA, 20 bp, Artificial sequence
  synthetic
ctttccagcaccggatgtaa

SEQ ID NO: 25393 - DNA, 20 bp, Artificial sequence
  synthetic
aataggaaatcaagccttct

SEQ ID NO: 25394 - DNA, 20 bp, Artificial sequence
  synthetic
tcatcccaaactgagaccta

SEQ ID NO: 25395 - DNA, 20 bp, Artificial sequence
  synthetic
ctgccgcagcatatagaccc

SEQ ID NO: 25396 - DNA, 20 bp, Artificial sequence
  synthetic
ccacaaagaaggcgctttct

SEQ ID NO: 25397 - DNA, 20 bp, Artificial sequence
  synthetic
accagcttcgccaacaacca

SEQ ID NO: 25398 - DNA, 20 bp, Artificial sequence
  synthetic
cagctagcaaatgagacgac

SEQ ID NO: 25399 - DNA, 20 bp, Artificial sequence
  synthetic
gctaggacaggatcaatcag

SEQ ID NO: 25400 - DNA, 20 bp, Artificial sequence
  synthetic
gcaaccgtaataaaagcatt

SEQ ID NO: 25401 - DNA, 20 bp, Artificial sequence
  synthetic
aacaagttctcaactaagag

SEQ ID NO: 25402 - DNA, 20 bp, Artificial sequence
  synthetic
aatgtccctgggtcacaaga

SEQ ID NO: 25403 - DNA, 20 bp, Artificial sequence
  synthetic
tattcagggaacatcgtaca

SEQ ID NO: 25404 - DNA, 20 bp, Artificial sequence
  synthetic
ttaacaactcaaatccataa

SEQ ID NO: 25405 - DNA, 20 bp, Artificial sequence
  synthetic
gtggccatttcttccttcct

SEQ ID NO: 25406 - DNA, 20 bp, Artificial sequence
  synthetic
ttccaagaagacagaaataa

SEQ ID NO: 25407 - DNA, 20 bp, Artificial sequence
  synthetic
gcaaaattaatggagagatt

SEQ ID NO: 25408 - DNA, 20 bp, Artificial sequence
  synthetic
caatgcgtaatttataccga

SEQ ID NO: 25409 - DNA, 20 bp, Artificial sequence
  synthetic
tctctcccgtttggctccac

SEQ ID NO: 25410 - DNA, 20 bp, Artificial sequence
  synthetic
gctgcctgggccttccacgc

SEQ ID NO: 25411 - DNA, 20 bp, Artificial sequence
  synthetic
cccgaccctatcttcgctga

SEQ ID NO: 25412 - DNA, 20 bp, Artificial sequence
  synthetic
gggccttccaactcctcccg

SEQ ID NO: 25413 - DNA, 20 bp, Artificial sequence
  synthetic
ctcaacttcccttactccat

SEQ ID NO: 25414 - DNA, 20 bp, Artificial sequence
  synthetic
acccctcaatccgcaaccca

SEQ ID NO: 25415 - DNA, 20 bp, Artificial sequence
  synthetic
ccctctttcctggacgtctc

SEQ ID NO: 25416 - DNA, 20 bp, Artificial sequence
  synthetic
cccctaggccaaacccttac

SEQ ID NO: 25417 - DNA, 20 bp, Artificial sequence
  synthetic
gacctcaccacctccgcctc

SEQ ID NO: 25418 - DNA, 20 bp, Artificial sequence
  synthetic
accattgccgtgttcatccg

SEQ ID NO: 25419 - DNA, 20 bp, Artificial sequence
  synthetic
gaggatcgtgctcacgtcac

SEQ ID NO: 25420 - DNA, 20 bp, Artificial sequence
  synthetic
aaccagcggctaacgtatgt

SEQ ID NO: 25421 - DNA, 20 bp, Artificial sequence
  synthetic
agcgagtacccctactccgc

SEQ ID NO: 25422 - DNA, 20 bp, Artificial sequence
  synthetic
gtcgtgatcgcctccgactt

SEQ ID NO: 25423 - DNA, 20 bp, Artificial sequence
  synthetic
agtcacgacaccatcatggc

SEQ ID NO: 25424 - DNA, 20 bp, Artificial sequence
  synthetic
ctgatcccgggcgtcaagcc

SEQ ID NO: 25425 - DNA, 20 bp, Artificial sequence
  synthetic
gacatccgtcgctttatccg

SEQ ID NO: 25426 - DNA, 20 bp, Artificial sequence
  synthetic
tggcccaccctccccgttgc

SEQ ID NO: 25427 - DNA, 20 bp, Artificial sequence
  synthetic
gcgatcatcgctggacgcat

SEQ ID NO: 25428 - DNA, 20 bp, Artificial sequence
  synthetic
actctcccctcctgcgcttt

SEQ ID NO: 25429 - DNA, 20 bp, Artificial sequence
  synthetic
gttggaacctcaatcctcaa

SEQ ID NO: 25430 - DNA, 20 bp, Artificial sequence
  synthetic
aacaccaccctaatcgtgac

SEQ ID NO: 25431 - DNA, 20 bp, Artificial sequence
  synthetic
tcttaagtctgtgccttcca

SEQ ID NO: 25432 - DNA, 20 bp, Artificial sequence
  synthetic
atggtaagtgatcaattcac

SEQ ID NO: 25433 - DNA, 20 bp, Artificial sequence
  synthetic
ctcgaagttctcggggttct

SEQ ID NO: 25434 - DNA, 20 bp, Artificial sequence
  synthetic
atctggaaaccggaattgcg

SEQ ID NO: 25435 - DNA, 20 bp, Artificial sequence
  synthetic
acctgaaacaggcactaaat

SEQ ID NO: 25436 - DNA, 20 bp, Artificial sequence
  synthetic
ggggtaccctggtggtagct

SEQ ID NO: 25437 - DNA, 20 bp, Artificial sequence
  synthetic
gagtccttgattttccacca

SEQ ID NO: 25438 - DNA, 20 bp, Artificial sequence
  synthetic
tgactggagttttccttatc

SEQ ID NO: 25439 - DNA, 20 bp, Artificial sequence
  synthetic
aaggtcctagtgggcaggct

SEQ ID NO: 25440 - DNA, 20 bp, Artificial sequence
  synthetic
aaaattctttgcagcgcact

SEQ ID NO: 25441 - DNA, 20 bp, Artificial sequence
  synthetic
taactgctaattttaatctt

SEQ ID NO: 25442 - DNA, 20 bp, Artificial sequence
  synthetic
tagatggtgttgtgttagat

SEQ ID NO: 25443 - DNA, 20 bp, Artificial sequence
  synthetic
atgagctgaggaaagttgag

SEQ ID NO: 25444 - DNA, 20 bp, Artificial sequence
  synthetic
tgtatggaaacaagatttat

SEQ ID NO: 25445 - DNA, 20 bp, Artificial sequence
  synthetic
tccgtccaagccgcggacgt

SEQ ID NO: 25446 - DNA, 20 bp, Artificial sequence
  synthetic
gcgacagttccggtcaactc

SEQ ID NO: 25447 - DNA, 20 bp, Artificial sequence
  synthetic
agatgtggctgggaagtgtt

SEQ ID NO: 25448 - DNA, 20 bp, Artificial sequence
  synthetic
ctgctcttgccatatgcttc

SEQ ID NO: 25449 - DNA, 20 bp, Artificial sequence
  synthetic
aatttgctggtccgtcctct

SEQ ID NO: 25450 - DNA, 20 bp, Artificial sequence
  synthetic
gtgattcctttttgcagctc

SEQ ID NO: 25451 - DNA, 20 bp, Artificial sequence
  synthetic
ttcctggatatgttattaga

SEQ ID NO: 25452 - DNA, 20 bp, Artificial sequence
  synthetic
aagctggaccgcatctctga

SEQ ID NO: 25453 - DNA, 20 bp, Artificial sequence
  synthetic
aaggtcgatgacatctatgc

SEQ ID NO: 25454 - DNA, 20 bp, Artificial sequence
  synthetic
atgagacatttcaaatctgg

SEQ ID NO: 25455 - DNA, 20 bp, Artificial sequence
  synthetic
gatgtgaagatgacccgcat

SEQ ID NO: 25456 - DNA, 20 bp, Artificial sequence
  synthetic
acgttccgtggaattgaaac

SEQ ID NO: 25457 - DNA, 20 bp, Artificial sequence
  synthetic
gggactcccctgctggatgg

SEQ ID NO: 25458 - DNA, 20 bp, Artificial sequence
  synthetic
ggtgatgatgtagtttatgc

SEQ ID NO: 25459 - DNA, 20 bp, Artificial sequence
  synthetic
ggagttcgcaaatctgctgc

SEQ ID NO: 25460 - DNA, 20 bp, Artificial sequence
  synthetic
tttgtcattgctacttctaa

SEQ ID NO: 25461 - DNA, 20 bp, Artificial sequence
  synthetic
cctattgctgcttgtgctta

SEQ ID NO: 25462 - DNA, 20 bp, Artificial sequence
  synthetic
atgttagaatcccatcagga

SEQ ID NO: 25463 - DNA, 20 bp, Artificial sequence
  synthetic
tcatcaaatgatcataatgc

SEQ ID NO: 25464 - DNA, 20 bp, Artificial sequence
  synthetic
ggcattgttgatactgagct

SEQ ID NO: 25465 - DNA, 20 bp, Artificial sequence
  synthetic
gtagacaatgagataggttt

SEQ ID NO: 25466 - DNA, 20 bp, Artificial sequence
  synthetic
cttcttgctcacgaggaaaa

SEQ ID NO: 25467 - DNA, 20 bp, Artificial sequence
  synthetic
gatgaaaccaagagtggttc

SEQ ID NO: 25468 - DNA, 20 bp, Artificial sequence
  synthetic
gattccgagcttctaagctt

SEQ ID NO: 25469 - DNA, 20 bp, Artificial sequence
  synthetic
ttggcagccaggttttaact

SEQ ID NO: 25470 - DNA, 20 bp, Artificial sequence
  synthetic
catcaattagacaaatttct

SEQ ID NO: 25471 - DNA, 20 bp, Artificial sequence
  synthetic
aaacttctaagattcgttcc

SEQ ID NO: 25472 - DNA, 20 bp, Artificial sequence
  synthetic
atattcctgctaagggtttc

SEQ ID NO: 25473 - DNA, 20 bp, Artificial sequence
  synthetic
gtggaaatactccctcgccg

SEQ ID NO: 25474 - DNA, 20 bp, Artificial sequence
  synthetic
agttcgcaaagacacaatac

SEQ ID NO: 25475 - DNA, 20 bp, Artificial sequence
  synthetic
cttatgatcctgccactgaa

SEQ ID NO: 25476 - DNA, 20 bp, Artificial sequence
  synthetic
cgataacagaggatcctact

SEQ ID NO: 25477 - DNA, 20 bp, Artificial sequence
  synthetic
atgtggagcttgatcctgct

SEQ ID NO: 25478 - DNA, 20 bp, Artificial sequence
  synthetic
taacccgtcgcgagacgcgt

SEQ ID NO: 25479 - DNA, 20 bp, Artificial sequence
  synthetic
cctaggtttacttttattag

SEQ ID NO: 25480 - DNA, 20 bp, Artificial sequence
  synthetic
tccgctgtcttggggtatgg

SEQ ID NO: 25481 - DNA, 20 bp, Artificial sequence
  synthetic
tgacactatatccgcaccaa

SEQ ID NO: 25482 - DNA, 20 bp, Artificial sequence
  synthetic
taccaggtaggatgacaaat

SEQ ID NO: 25483 - DNA, 20 bp, Artificial sequence
  synthetic
ggttgcaatcaacgtgtacg

SEQ ID NO: 25484 - DNA, 20 bp, Artificial sequence
  synthetic
gtattgctgccatcctggaa

SEQ ID NO: 25485 - DNA, 20 bp, Artificial sequence
  synthetic
tcacagccatcacacgatct

SEQ ID NO: 25486 - DNA, 20 bp, Artificial sequence
  synthetic
ttggactgcttattcatggg

SEQ ID NO: 25487 - DNA, 20 bp, Artificial sequence
  synthetic
aaaacccggatggtgaggac

SEQ ID NO: 25488 - DNA, 20 bp, Artificial sequence
  synthetic
aatcattacctgcaaaccca

SEQ ID NO: 25489 - DNA, 20 bp, Artificial sequence
  synthetic
acgctgcccaactccagccc

SEQ ID NO: 25490 - DNA, 20 bp, Artificial sequence
  synthetic
taggttttgacacggaagat

SEQ ID NO: 25491 - DNA, 20 bp, Artificial sequence
  synthetic
acaagtttattgccctggtt

SEQ ID NO: 25492 - DNA, 20 bp, Artificial sequence
  synthetic
cggaaggcgaaacgtcgggg

SEQ ID NO: 25493 - DNA, 20 bp, Artificial sequence
  synthetic
aacgtgcatcaccatggaga

SEQ ID NO: 25494 - DNA, 20 bp, Artificial sequence
  synthetic
ataattttcacaattatgtt

SEQ ID NO: 25495 - DNA, 20 bp, Artificial sequence
  synthetic
aagatgatgaacatggaggc

SEQ ID NO: 25496 - DNA, 20 bp, Artificial sequence
  synthetic
tttcatgatctcaacttacc

SEQ ID NO: 25497 - DNA, 20 bp, Artificial sequence
  synthetic
gggccctgtagagttcccat

SEQ ID NO: 25498 - DNA, 20 bp, Artificial sequence
  synthetic
tttaaaagcttatttggagg

SEQ ID NO: 25499 - DNA, 20 bp, Artificial sequence
  synthetic
gacttggctaggaaagaatt

SEQ ID NO: 25500 - DNA, 20 bp, Artificial sequence
  synthetic
cacaacatgtgggtaagcat

SEQ ID NO: 25501 - DNA, 20 bp, Artificial sequence
  synthetic
accgcagtaatgggcacagc

SEQ ID NO: 25502 - DNA, 20 bp, Artificial sequence
  synthetic
gtggcagctgcatttgctga

SEQ ID NO: 25503 - DNA, 20 bp, Artificial sequence
  synthetic
ctgggaatcctctcactatt

SEQ ID NO: 25504 - DNA, 20 bp, Artificial sequence
  synthetic
gcgagggtgactggagcatc

SEQ ID NO: 25505 - DNA, 20 bp, Artificial sequence
  synthetic
cacgtgacgaatggggccgt

SEQ ID NO: 25506 - DNA, 20 bp, Artificial sequence
  synthetic
attatggatgaggctcactt

SEQ ID NO: 25507 - DNA, 20 bp, Artificial sequence
  synthetic
aagagtggagaatgggattt

SEQ ID NO: 25508 - DNA, 20 bp, Artificial sequence
  synthetic
cagcgtcgtggacgggttgg

SEQ ID NO: 25509 - DNA, 20 bp, Artificial sequence
  synthetic
ccagcgacggcatgggcggc

SEQ ID NO: 25510 - DNA, 20 bp, Artificial sequence
  synthetic
tggaactatcatggaagcta

SEQ ID NO: 25511 - DNA, 20 bp, Artificial sequence
  synthetic
gtacccttttgctcacacca

SEQ ID NO: 25512 - DNA, 20 bp, Artificial sequence
  synthetic
ttgatgtacttccacaggag

SEQ ID NO: 25513 - DNA, 20 bp, Artificial sequence
  synthetic
aatccctgccaccggatgtt

SEQ ID NO: 25514 - DNA, 20 bp, Artificial sequence
  synthetic
aggggaaggactagaggtta

SEQ ID NO: 25515 - DNA, 20 bp, Artificial sequence
  synthetic
ctcaatgtctttatttacac

SEQ ID NO: 25516 - DNA, 20 bp, Artificial sequence
  synthetic
aactactatggtgcccaata

SEQ ID NO: 25517 - DNA, 20 bp, Artificial sequence
  synthetic
ggcaactccactcttacaac

SEQ ID NO: 25518 - DNA, 20 bp, Artificial sequence
  synthetic
cgcgtgattcgcttgcctgg

SEQ ID NO: 25519 - DNA, 20 bp, Artificial sequence
  synthetic
tctctatacattgttccaat

SEQ ID NO: 25520 - DNA, 20 bp, Artificial sequence
  synthetic
actatcaagaacgatggttt

SEQ ID NO: 25521 - DNA, 20 bp, Artificial sequence
  synthetic
ggagatgccccagcaacacg

SEQ ID NO: 25522 - DNA, 20 bp, Artificial sequence
  synthetic
caaaccaatatagttgttcc

SEQ ID NO: 25523 - DNA, 20 bp, Artificial sequence
  synthetic
gtacttcgccccgctacagg

SEQ ID NO: 25524 - DNA, 20 bp, Artificial sequence
  synthetic
atcgaggcatttatgtctcg

SEQ ID NO: 25525 - DNA, 20 bp, Artificial sequence
  synthetic
gatgtggtcgctattgtctc

SEQ ID NO: 25526 - DNA, 20 bp, Artificial sequence
  synthetic
cccccggcatccctacggct

SEQ ID NO: 25527 - DNA, 20 bp, Artificial sequence
  synthetic
caccttttcaacaacagact

SEQ ID NO: 25528 - DNA, 20 bp, Artificial sequence
  synthetic
gctatggccacagcaggcag

SEQ ID NO: 25529 - DNA, 20 bp, Artificial sequence
  synthetic
tacggggtgcagcgaaacca

SEQ ID NO: 25530 - DNA, 20 bp, Artificial sequence
  synthetic
cagaagttgggtggcaacag

SEQ ID NO: 25531 - DNA, 20 bp, Artificial sequence
  synthetic
aacactgcacttgacaggtg

SEQ ID NO: 25532 - DNA, 20 bp, Artificial sequence
  synthetic
aagctcgaggcaatcttcca

SEQ ID NO: 25533 - DNA, 20 bp, Artificial sequence
  synthetic
tccatcttgtcatccctcac

SEQ ID NO: 25534 - DNA, 20 bp, Artificial sequence
  synthetic
ggtaacacagacattcccat

SEQ ID NO: 25535 - DNA, 20 bp, Artificial sequence
  synthetic
tatgtcattaagaacaccag

SEQ ID NO: 25536 - DNA, 20 bp, Artificial sequence
  synthetic
tgcagttccatgaatgacac

SEQ ID NO: 25537 - DNA, 20 bp, Artificial sequence
  synthetic
gggacatccatcttcaattc

SEQ ID NO: 25538 - DNA, 20 bp, Artificial sequence
  synthetic
tacaatttgacaatgacacc

SEQ ID NO: 25539 - DNA, 20 bp, Artificial sequence
  synthetic
cctggtaacaggtgccccag

SEQ ID NO: 25540 - DNA, 20 bp, Artificial sequence
  synthetic
taccccctaccccgctcacc

SEQ ID NO: 25541 - DNA, 20 bp, Artificial sequence
  synthetic
cccgcacagatgcccctcgc

SEQ ID NO: 25542 - DNA, 20 bp, Artificial sequence
  synthetic
ggtcgctccgggggtgcgtc

SEQ ID NO: 25543 - DNA, 20 bp, Artificial sequence
  synthetic
aattggggcactcaatctgg

SEQ ID NO: 25544 - DNA, 20 bp, Artificial sequence
  synthetic
atcctttacatggtcccgga

SEQ ID NO: 25545 - DNA, 20 bp, Artificial sequence
  synthetic
tccccttctgccattgctgg

SEQ ID NO: 25546 - DNA, 20 bp, Artificial sequence
  synthetic
gatgtctccggcctcactgc

SEQ ID NO: 25547 - DNA, 20 bp, Artificial sequence
  synthetic
cttggtgacgtcccaccaga

SEQ ID NO: 25548 - DNA, 20 bp, Artificial sequence
  synthetic
cgggaagtcccactctcctc

SEQ ID NO: 25549 - DNA, 20 bp, Artificial sequence
  synthetic
ctctttggttccccctcccc

SEQ ID NO: 25550 - DNA, 20 bp, Artificial sequence
  synthetic
tctcaacaccgcaagcgcca

SEQ ID NO: 25551 - DNA, 20 bp, Artificial sequence
  synthetic
acctccaacttccatgagcc

SEQ ID NO: 25552 - DNA, 20 bp, Artificial sequence
  synthetic
acccttttccaagccaacgt

SEQ ID NO: 25553 - DNA, 20 bp, Artificial sequence
  synthetic
actccccgggaaatccccga

SEQ ID NO: 25554 - DNA, 20 bp, Artificial sequence
  synthetic
ttcctggcggtggtcggatt

SEQ ID NO: 25555 - DNA, 20 bp, Artificial sequence
  synthetic
atctctcccgcaatccctgg

SEQ ID NO: 25556 - DNA, 20 bp, Artificial sequence
  synthetic
tgggccaccctccctaccct

SEQ ID NO: 25557 - DNA, 20 bp, Artificial sequence
  synthetic
cttgacatgaacttccccgg

SEQ ID NO: 25558 - DNA, 20 bp, Artificial sequence
  synthetic
cataccattctccctgaaat

SEQ ID NO: 25559 - DNA, 20 bp, Artificial sequence
  synthetic
atggaagggcttgatatggg

SEQ ID NO: 25560 - DNA, 20 bp, Artificial sequence
  synthetic
tggaccgagttcttctacaa

SEQ ID NO: 25561 - DNA, 20 bp, Artificial sequence
  synthetic
cacatctatggcaaccagat

SEQ ID NO: 25562 - DNA, 20 bp, Artificial sequence
  synthetic
tacgcgacggaacccccaat

SEQ ID NO: 25563 - DNA, 20 bp, Artificial sequence
  synthetic
attcaccctgtgatggaccc

SEQ ID NO: 25564 - DNA, 20 bp, Artificial sequence
  synthetic
ccaaatttcctcccctactc

SEQ ID NO: 25565 - DNA, 20 bp, Artificial sequence
  synthetic
ccatggttgtactgtgctat

SEQ ID NO: 25566 - DNA, 20 bp, Artificial sequence
  synthetic
acttacctttttcccctctt

SEQ ID NO: 25567 - DNA, 20 bp, Artificial sequence
  synthetic
cgacaggttatggtagagta

SEQ ID NO: 25568 - DNA, 20 bp, Artificial sequence
  synthetic
gccattggattatgtcaccg

SEQ ID NO: 25569 - DNA, 20 bp, Artificial sequence
  synthetic
aaatgctgccatagcccatt

SEQ ID NO: 25570 - DNA, 20 bp, Artificial sequence
  synthetic
cggcggttcggcgccagcca

SEQ ID NO: 25571 - DNA, 20 bp, Artificial sequence
  synthetic
acatgccctgcagcccctag

SEQ ID NO: 25572 - DNA, 20 bp, Artificial sequence
  synthetic
catttctttgcgacttccct

SEQ ID NO: 25573 - DNA, 20 bp, Artificial sequence
  synthetic
acatcgcattttgatgcttg

SEQ ID NO: 25574 - DNA, 20 bp, Artificial sequence
  synthetic
agcagcaaattgtgggcccc

SEQ ID NO: 25575 - DNA, 20 bp, Artificial sequence
  synthetic
ttatgttgctgatcttgtgt

SEQ ID NO: 25576 - DNA, 20 bp, Artificial sequence
  synthetic
gggtcacagctttggtgatt

SEQ ID NO: 25577 - DNA, 20 bp, Artificial sequence
  synthetic
gcttgtccatggcacacctg

SEQ ID NO: 25578 - DNA, 20 bp, Artificial sequence
  synthetic
tagattttttgtggatgtta

SEQ ID NO: 25579 - DNA, 20 bp, Artificial sequence
  synthetic
tgaagaattgagaaaggaag

SEQ ID NO: 25580 - DNA, 20 bp, Artificial sequence
  synthetic
tgtcaataagctgttcaagc

SEQ ID NO: 25581 - DNA, 20 bp, Artificial sequence
  synthetic
gaagtcaaggctgattgagt

SEQ ID NO: 25582 - DNA, 20 bp, Artificial sequence
  synthetic
ctttccaatgaaggaaattt

SEQ ID NO: 25583 - DNA, 20 bp, Artificial sequence
  synthetic
gtacagtgtactgcgccagc

SEQ ID NO: 25584 - DNA, 20 bp, Artificial sequence
  synthetic
actgtgggcgacaggttatg

SEQ ID NO: 25585 - DNA, 20 bp, Artificial sequence
  synthetic
taacctgtatagtcagttga

SEQ ID NO: 25586 - DNA, 20 bp, Artificial sequence
  synthetic
tgcgtcggctcatggtgctg

SEQ ID NO: 25587 - DNA, 20 bp, Artificial sequence
  synthetic
tcttacagacttaggagttt

SEQ ID NO: 25588 - DNA, 20 bp, Artificial sequence
  synthetic
ggaagcaaaagatcttgaag

SEQ ID NO: 25589 - DNA, 20 bp, Artificial sequence
  synthetic
ggagctttcatatatgaatg

SEQ ID NO: 25590 - DNA, 20 bp, Artificial sequence
  synthetic
ggggtttcctattttaccgg

SEQ ID NO: 25591 - DNA, 20 bp, Artificial sequence
  synthetic
agctcccgccacacgcaaag

SEQ ID NO: 25592 - DNA, 20 bp, Artificial sequence
  synthetic
agttacatctgtaaatggtt

SEQ ID NO: 25593 - DNA, 20 bp, Artificial sequence
  synthetic
gaggacaaatggtgcttatc

SEQ ID NO: 25594 - DNA, 20 bp, Artificial sequence
  synthetic
tgttgcaatccgctgtgggg

SEQ ID NO: 25595 - DNA, 20 bp, Artificial sequence
  synthetic
taagtcattagtgacagaag

SEQ ID NO: 25596 - DNA, 20 bp, Artificial sequence
  synthetic
tcaaatggtatcctcaacag

SEQ ID NO: 25597 - DNA, 20 bp, Artificial sequence
  synthetic
accctcaaaggattacctta

SEQ ID NO: 25598 - DNA, 20 bp, Artificial sequence
  synthetic
ttctgttaagactaagaagg

SEQ ID NO: 25599 - DNA, 20 bp, Artificial sequence
  synthetic
gaatgataccatcctgatga

SEQ ID NO: 25600 - DNA, 20 bp, Artificial sequence
  synthetic
atccattcgctggtgcaagt

SEQ ID NO: 25601 - DNA, 20 bp, Artificial sequence
  synthetic
ggtcgcgtatggttgttggc

SEQ ID NO: 25602 - DNA, 20 bp, Artificial sequence
  synthetic
cgagtatagttcaggggcta

SEQ ID NO: 25603 - DNA, 20 bp, Artificial sequence
  synthetic
gtacccggagtaccagaaga

SEQ ID NO: 25604 - DNA, 20 bp, Artificial sequence
  synthetic
acagggtaatttattatccc

SEQ ID NO: 25605 - DNA, 20 bp, Artificial sequence
  synthetic
tcccaatcagtgtgcgcttg

SEQ ID NO: 25606 - DNA, 20 bp, Artificial sequence
  synthetic
gtcactaccacaacagctct

SEQ ID NO: 25607 - DNA, 20 bp, Artificial sequence
  synthetic
gggcatctcgtccgcttatg

SEQ ID NO: 25608 - DNA, 20 bp, Artificial sequence
  synthetic
ctgccggccagtcaattttg

SEQ ID NO: 25609 - DNA, 20 bp, Artificial sequence
  synthetic
ctccgagtacaaaccagtgt

SEQ ID NO: 25610 - DNA, 20 bp, Artificial sequence
  synthetic
gtctgagataccgtattttc

SEQ ID NO: 25611 - DNA, 20 bp, Artificial sequence
  synthetic
gaccacgatcaccacccttg

SEQ ID NO: 25612 - DNA, 20 bp, Artificial sequence
  synthetic
gcttatggagacctttgata

SEQ ID NO: 25613 - DNA, 20 bp, Artificial sequence
  synthetic
atgtggaaaggccgtgaaac

SEQ ID NO: 25614 - DNA, 20 bp, Artificial sequence
  synthetic
acaaaagatgaaggtaaaac

SEQ ID NO: 25615 - DNA, 20 bp, Artificial sequence
  synthetic
aaccctcgcctccttcatat

SEQ ID NO: 25616 - DNA, 20 bp, Artificial sequence
  synthetic
caaccgtcccaccaaattca

SEQ ID NO: 25617 - DNA, 20 bp, Artificial sequence
  synthetic
aaggcctatcaacctcaaca

SEQ ID NO: 25618 - DNA, 20 bp, Artificial sequence
  synthetic
agagctgtccctggctgtgg

SEQ ID NO: 25619 - DNA, 20 bp, Artificial sequence
  synthetic
caacaacctcattatcaaga

SEQ ID NO: 25620 - DNA, 20 bp, Artificial sequence
  synthetic
ctttgtcattgcccacctac

SEQ ID NO: 25621 - DNA, 20 bp, Artificial sequence
  synthetic
atggtgcactacatgatacg

SEQ ID NO: 25622 - DNA, 20 bp, Artificial sequence
  synthetic
gccgaagatgtattgtgacc

SEQ ID NO: 25623 - DNA, 20 bp, Artificial sequence
  synthetic
atgtgatgcacatctaggat

SEQ ID NO: 25624 - DNA, 20 bp, Artificial sequence
  synthetic
ccaaaacttggatccagcag

SEQ ID NO: 25625 - DNA, 20 bp, Artificial sequence
  synthetic
gtgtctacccaaaatccatt

SEQ ID NO: 25626 - DNA, 20 bp, Artificial sequence
  synthetic
acaatgggcaacatccctta

SEQ ID NO: 25627 - DNA, 20 bp, Artificial sequence
  synthetic
accggaagatgacaatcatg

SEQ ID NO: 25628 - DNA, 20 bp, Artificial sequence
  synthetic
aatgaagcaccaggaaacta

SEQ ID NO: 25629 - DNA, 20 bp, Artificial sequence
  synthetic
ctcgctcccacctgatccaa

SEQ ID NO: 25630 - DNA, 20 bp, Artificial sequence
  synthetic
tattagtgattttgttctag

SEQ ID NO: 25631 - DNA, 20 bp, Artificial sequence
  synthetic
tcatgaggtggatgtgcttt

SEQ ID NO: 25632 - DNA, 20 bp, Artificial sequence
  synthetic
gggaccaaccgctccaaaac

SEQ ID NO: 25633 - DNA, 20 bp, Artificial sequence
  synthetic
aggaccaggagcaccaaatc

SEQ ID NO: 25634 - DNA, 20 bp, Artificial sequence
  synthetic
cactgagcccctgaccctag

SEQ ID NO: 25635 - DNA, 20 bp, Artificial sequence
  synthetic
tggatgcaatccagacaggg

SEQ ID NO: 25636 - DNA, 20 bp, Artificial sequence
  synthetic
tgaccacatgtgcttttccg

SEQ ID NO: 25637 - DNA, 20 bp, Artificial sequence
  synthetic
agatgatgaatttgatttct

SEQ ID NO: 25638 - DNA, 20 bp, Artificial sequence
  synthetic
ctgaggacatcctcgaggat

SEQ ID NO: 25639 - DNA, 20 bp, Artificial sequence
  synthetic
ctgttcctcttcctaatcca

SEQ ID NO: 25640 - DNA, 20 bp, Artificial sequence
  synthetic
ctgctaattggggaacacaa

SEQ ID NO: 25641 - DNA, 20 bp, Artificial sequence
  synthetic
gtttagcattggtcatggtc

SEQ ID NO: 25642 - DNA, 20 bp, Artificial sequence
  synthetic
ccctcctgtctggttgcgca

SEQ ID NO: 25643 - DNA, 20 bp, Artificial sequence
  synthetic
ccttttccaagaccttcact

SEQ ID NO: 25644 - DNA, 20 bp, Artificial sequence
  synthetic
cctctgaatacttccactct

SEQ ID NO: 25645 - DNA, 20 bp, Artificial sequence
  synthetic
ttgagcgggctgtctcacag

SEQ ID NO: 25646 - DNA, 20 bp, Artificial sequence
  synthetic
gtcgcagcgcaagctgtggc

SEQ ID NO: 25647 - DNA, 20 bp, Artificial sequence
  synthetic
gccaacatcgtgacctccgt

SEQ ID NO: 25648 - DNA, 20 bp, Artificial sequence
  synthetic
gccgttcactctttgtccaa

SEQ ID NO: 25649 - DNA, 20 bp, Artificial sequence
  synthetic
ttgttgtaactccagcaaat

SEQ ID NO: 25650 - DNA, 20 bp, Artificial sequence
  synthetic
acaccagatacactcttgct

SEQ ID NO: 25651 - DNA, 20 bp, Artificial sequence
  synthetic
ttgactgctgtgggattgac

SEQ ID NO: 25652 - DNA, 20 bp, Artificial sequence
  synthetic
aaatctgatgaaaacccttc

SEQ ID NO: 25653 - DNA, 20 bp, Artificial sequence
  synthetic
gactaattccactaccccgg

SEQ ID NO: 25654 - DNA, 20 bp, Artificial sequence
  synthetic
ccgtaaaggatgcgtgacaa

SEQ ID NO: 25655 - DNA, 20 bp, Artificial sequence
  synthetic
ttacacggccgatatgtcag

SEQ ID NO: 25656 - DNA, 20 bp, Artificial sequence
  synthetic
aggagccatgtccactgccc

SEQ ID NO: 25657 - DNA, 20 bp, Artificial sequence
  synthetic
caccgccaccccgtatggaa

SEQ ID NO: 25658 - DNA, 20 bp, Artificial sequence
  synthetic
gaaaacaaaagtgtttttgg

SEQ ID NO: 25659 - DNA, 20 bp, Artificial sequence
  synthetic
taggaggtgtttgtggcctg

SEQ ID NO: 25660 - DNA, 20 bp, Artificial sequence
  synthetic
gacctgtcctggaacgacgg

SEQ ID NO: 25661 - DNA, 20 bp, Artificial sequence
  synthetic
tctggctccgttgcctttag

SEQ ID NO: 25662 - DNA, 20 bp, Artificial sequence
  synthetic
ggccaacgacatattccttg

SEQ ID NO: 25663 - DNA, 20 bp, Artificial sequence
  synthetic
catggccggcttccatcccc

SEQ ID NO: 25664 - DNA, 20 bp, Artificial sequence
  synthetic
gactactgaagtgcaactta

SEQ ID NO: 25665 - DNA, 20 bp, Artificial sequence
  synthetic
tgagatactgcgtgaagctg

SEQ ID NO: 25666 - DNA, 20 bp, Artificial sequence
  synthetic
aacattcacgtatcgtcagt

SEQ ID NO: 25667 - DNA, 20 bp, Artificial sequence
  synthetic
gacagacgctttccctgagt

SEQ ID NO: 25668 - DNA, 20 bp, Artificial sequence
  synthetic
ggacaacatcacagtgcctg

SEQ ID NO: 25669 - DNA, 20 bp, Artificial sequence
  synthetic
cacggaatttgcagagggca

SEQ ID NO: 25670 - DNA, 20 bp, Artificial sequence
  synthetic
ggctgaaactgctatgctta

SEQ ID NO: 25671 - DNA, 20 bp, Artificial sequence
  synthetic
taaagctgcccgggaagcac

SEQ ID NO: 25672 - DNA, 20 bp, Artificial sequence
  synthetic
tcgaagcacgctgcatatga

SEQ ID NO: 25673 - DNA, 20 bp, Artificial sequence
  synthetic
accaggacatgaggaaccag

SEQ ID NO: 25674 - DNA, 20 bp, Artificial sequence
  synthetic
agttacaagtgtttgcatga

SEQ ID NO: 25675 - DNA, 20 bp, Artificial sequence
  synthetic
aggcgtcattcatggagatg

SEQ ID NO: 25676 - DNA, 20 bp, Artificial sequence
  synthetic
agctacctgggctgataaca

SEQ ID NO: 25677 - DNA, 20 bp, Artificial sequence
  synthetic
acggatcatgcatcgttatg

SEQ ID NO: 25678 - DNA, 20 bp, Artificial sequence
  synthetic
gcagcagacgatctgttgct

SEQ ID NO: 25679 - DNA, 20 bp, Artificial sequence
  synthetic
gtaaaccaacagtggatttc

SEQ ID NO: 25680 - DNA, 20 bp, Artificial sequence
  synthetic
tggtcaagagagactggttc

SEQ ID NO: 25681 - DNA, 20 bp, Artificial sequence
  synthetic
cgtcagtcgagtggaactct

SEQ ID NO: 25682 - DNA, 20 bp, Artificial sequence
  synthetic
catatgctggaacagatgcg

SEQ ID NO: 25683 - DNA, 20 bp, Artificial sequence
  synthetic
ggggcaagacaatgtttgtt

SEQ ID NO: 25684 - DNA, 20 bp, Artificial sequence
  synthetic
cagaatactgcgacacggaa

SEQ ID NO: 25685 - DNA, 20 bp, Artificial sequence
  synthetic
ttctgcaaatttgtgcggct

SEQ ID NO: 25686 - DNA, 20 bp, Artificial sequence
  synthetic
taagagtcagcatggttaca

SEQ ID NO: 25687 - DNA, 20 bp, Artificial sequence
  synthetic
tgtttcacacaatgtggcac

SEQ ID NO: 25688 - DNA, 20 bp, Artificial sequence
  synthetic
aagatgaggaaagggaaatt

SEQ ID NO: 25689 - DNA, 20 bp, Artificial sequence
  synthetic
taagcccagctagtgcagca

SEQ ID NO: 25690 - DNA, 20 bp, Artificial sequence
  synthetic
agttctacgagccggaggct

SEQ ID NO: 25691 - DNA, 20 bp, Artificial sequence
  synthetic
gtgggccatctggacatctc

SEQ ID NO: 25692 - DNA, 20 bp, Artificial sequence
  synthetic
ctataatagaagtgctcggc

SEQ ID NO: 25693 - DNA, 20 bp, Artificial sequence
  synthetic
tcatgaccatgggaatacta

SEQ ID NO: 25694 - DNA, 20 bp, Artificial sequence
  synthetic
ttttcaacttggactggggc

SEQ ID NO: 25695 - DNA, 20 bp, Artificial sequence
  synthetic
acacccgagggatggaatgg

SEQ ID NO: 25696 - DNA, 20 bp, Artificial sequence
  synthetic
ggctggtagataaaggatat

SEQ ID NO: 25697 - DNA, 20 bp, Artificial sequence
  synthetic
acattgtcactctgcgtagc

SEQ ID NO: 25698 - DNA, 20 bp, Artificial sequence
  synthetic
tttgttgcaaggttcttgct

SEQ ID NO: 25699 - DNA, 20 bp, Artificial sequence
  synthetic
gcaagggaggaaagacgcta

SEQ ID NO: 25700 - DNA, 20 bp, Artificial sequence
  synthetic
caacaggctggaacagttgg

SEQ ID NO: 25701 - DNA, 20 bp, Artificial sequence
  synthetic
gtaaggcgtatgcgcaaatg

SEQ ID NO: 25702 - DNA, 20 bp, Artificial sequence
  synthetic
acccccccaaaaatgaaggg

SEQ ID NO: 25703 - DNA, 20 bp, Artificial sequence
  synthetic
ttctcttattttcactagtt

SEQ ID NO: 25704 - DNA, 20 bp, Artificial sequence
  synthetic
ccgtggaggatcgcccggga

SEQ ID NO: 25705 - DNA, 20 bp, Artificial sequence
  synthetic
cacgatattttcagttcttt

SEQ ID NO: 25706 - DNA, 20 bp, Artificial sequence
  synthetic
agtctccgatttttgggcgt

SEQ ID NO: 25707 - DNA, 20 bp, Artificial sequence
  synthetic
cttccaacgttataaaatgc

SEQ ID NO: 25708 - DNA, 20 bp, Artificial sequence
  synthetic
gtcgtggatggtatgtcatg

SEQ ID NO: 25709 - DNA, 20 bp, Artificial sequence
  synthetic
ctcatagttattcgcatgag

SEQ ID NO: 25710 - DNA, 20 bp, Artificial sequence
  synthetic
ccgcttttgtggatgccctt

SEQ ID NO: 25711 - DNA, 20 bp, Artificial sequence
  synthetic
ctttgtccttgagtgctcgt

SEQ ID NO: 25712 - DNA, 20 bp, Artificial sequence
  synthetic
aatatcagaatacgtgtgct

SEQ ID NO: 25713 - DNA, 20 bp, Artificial sequence
  synthetic
ggtatgctgggcaaccgatt

SEQ ID NO: 25714 - DNA, 20 bp, Artificial sequence
  synthetic
aatcagattggtcatctcgt

SEQ ID NO: 25715 - DNA, 20 bp, Artificial sequence
  synthetic
cagtgttcgactattgcgct

SEQ ID NO: 25716 - DNA, 20 bp, Artificial sequence
  synthetic
ctatgcttaaggaattggac

SEQ ID NO: 25717 - DNA, 20 bp, Artificial sequence
  synthetic
gccttgcatttggtggtaat

SEQ ID NO: 25718 - DNA, 20 bp, Artificial sequence
  synthetic
attttgactatgtttttagt

SEQ ID NO: 25719 - DNA, 20 bp, Artificial sequence
  synthetic
atggttctataccacgtcag

SEQ ID NO: 25720 - DNA, 20 bp, Artificial sequence
  synthetic
ctattgtcaatacagcttgt

SEQ ID NO: 25721 - DNA, 20 bp, Artificial sequence
  synthetic
ttgatggtgattatcccaag

SEQ ID NO: 25722 - DNA, 20 bp, Artificial sequence
  synthetic
tatcccagcgcgtggtggac

SEQ ID NO: 25723 - DNA, 20 bp, Artificial sequence
  synthetic
cttagtatcatggaaatgtg

SEQ ID NO: 25724 - DNA, 20 bp, Artificial sequence
  synthetic
atgggatctgatcagggcca

SEQ ID NO: 25725 - DNA, 20 bp, Artificial sequence
  synthetic
tgaccaaggattaatggctt

SEQ ID NO: 25726 - DNA, 20 bp, Artificial sequence
  synthetic
ctcctcccgcggtgtagata

SEQ ID NO: 25727 - DNA, 20 bp, Artificial sequence
  synthetic
tggttccggcgatggttaca

SEQ ID NO: 25728 - DNA, 20 bp, Artificial sequence
  synthetic
ccccggttttgctgccccat

SEQ ID NO: 25729 - DNA, 20 bp, Artificial sequence
  synthetic
cccaatcaagaccaatactc

SEQ ID NO: 25730 - DNA, 20 bp, Artificial sequence
  synthetic
atacaacctgcagaactcag

SEQ ID NO: 25731 - DNA, 20 bp, Artificial sequence
  synthetic
tgtccccgccccccgtcccg

SEQ ID NO: 25732 - DNA, 20 bp, Artificial sequence
  synthetic
tggtcaatctgttcacattg

SEQ ID NO: 25733 - DNA, 20 bp, Artificial sequence
  synthetic
taggcttactgtagatatgg

SEQ ID NO: 25734 - DNA, 20 bp, Artificial sequence
  synthetic
cgaggaagcgattcgtgaaa

SEQ ID NO: 25735 - DNA, 20 bp, Artificial sequence
  synthetic
tcgccttgtcggtgtacatg

SEQ ID NO: 25736 - DNA, 20 bp, Artificial sequence
  synthetic
ccattccaatcctggtatgt

SEQ ID NO: 25737 - DNA, 20 bp, Artificial sequence
  synthetic
gtctgccctcatctcccgtc

SEQ ID NO: 25738 - DNA, 20 bp, Artificial sequence
  synthetic
tttccctaactcctcttctc

SEQ ID NO: 25739 - DNA, 20 bp, Artificial sequence
  synthetic
tgctcaccacgctggtcccc

SEQ ID NO: 25740 - DNA, 20 bp, Artificial sequence
  synthetic
aggtgctctggccgagctaa

SEQ ID NO: 25741 - DNA, 20 bp, Artificial sequence
  synthetic
gctcattgggaagagttacc

SEQ ID NO: 25742 - DNA, 20 bp, Artificial sequence
  synthetic
gaaagtagttgtgtccgaga

SEQ ID NO: 25743 - DNA, 20 bp, Artificial sequence
  synthetic
ttgggtgattctcattctga

SEQ ID NO: 25744 - DNA, 20 bp, Artificial sequence
  synthetic
aagatttatgcatggcttcc

SEQ ID NO: 25745 - DNA, 20 bp, Artificial sequence
  synthetic
aggttggatatacaagtgcg

SEQ ID NO: 25746 - DNA, 20 bp, Artificial sequence
  synthetic
gaagagtatgcaggagcttt

SEQ ID NO: 25747 - DNA, 20 bp, Artificial sequence
  synthetic
atgcaattagtaggtgctcg

SEQ ID NO: 25748 - DNA, 20 bp, Artificial sequence
  synthetic
ggtgagttcatagtagataa

SEQ ID NO: 25749 - DNA, 20 bp, Artificial sequence
  synthetic
aatcaagggttggctttggc

SEQ ID NO: 25750 - DNA, 20 bp, Artificial sequence
  synthetic
aaggtgtgtgagtggtttaa

SEQ ID NO: 25751 - DNA, 20 bp, Artificial sequence
  synthetic
gaaaacacgcgtcaggagac

SEQ ID NO: 25752 - DNA, 20 bp, Artificial sequence
  synthetic
atagtgaactagtatcagat

SEQ ID NO: 25753 - DNA, 20 bp, Artificial sequence
  synthetic
cctatgtacttcagcgttac

SEQ ID NO: 25754 - DNA, 20 bp, Artificial sequence
  synthetic
cttcttatgtggcgcaagat

SEQ ID NO: 25755 - DNA, 20 bp, Artificial sequence
  synthetic
ttaccttacctggtatcaat

SEQ ID NO: 25756 - DNA, 20 bp, Artificial sequence
  synthetic
ctaatgcttatcagtttgat

SEQ ID NO: 25757 - DNA, 20 bp, Artificial sequence
  synthetic
atgaatattttgttcttgct

SEQ ID NO: 25758 - DNA, 20 bp, Artificial sequence
  synthetic
aatgtgatcacttcggtgag

SEQ ID NO: 25759 - DNA, 20 bp, Artificial sequence
  synthetic
agttttggatagtgaaggat

SEQ ID NO: 25760 - DNA, 20 bp, Artificial sequence
  synthetic
tggtgccacagtttgtttac

SEQ ID NO: 25761 - DNA, 20 bp, Artificial sequence
  synthetic
agactcctgaggttacagct

SEQ ID NO: 25762 - DNA, 20 bp, Artificial sequence
  synthetic
cacctttcccctcttcagat

SEQ ID NO: 25763 - DNA, 20 bp, Artificial sequence
  synthetic
ccaacatggggccaaagatt

SEQ ID NO: 25764 - DNA, 20 bp, Artificial sequence
  synthetic
gctttagggaaagaatgcaa

SEQ ID NO: 25765 - DNA, 20 bp, Artificial sequence
  synthetic
tgttctctagtgcgtgcttg

SEQ ID NO: 25766 - DNA, 20 bp, Artificial sequence
  synthetic
tgtggaatgatgcaacacac

SEQ ID NO: 25767 - DNA, 20 bp, Artificial sequence
  synthetic
gcagtgttgttgttgttgac

SEQ ID NO: 25768 - DNA, 20 bp, Artificial sequence
  synthetic
gaggagcccgcttttatgca

SEQ ID NO: 25769 - DNA, 20 bp, Artificial sequence
  synthetic
cggatgaaggcttggacatg

SEQ ID NO: 25770 - DNA, 20 bp, Artificial sequence
  synthetic
ctaccttttcctttcaatgc

SEQ ID NO: 25771 - DNA, 20 bp, Artificial sequence
  synthetic
aacatcgtggcgagcaggac

SEQ ID NO: 25772 - DNA, 20 bp, Artificial sequence
  synthetic
aaagaagaaaagaggaggaa

SEQ ID NO: 25773 - DNA, 20 bp, Artificial sequence
  synthetic
cacagtccatcatcatggcg

SEQ ID NO: 25774 - DNA, 20 bp, Artificial sequence
  synthetic
caaaatgatgaacatggagg

SEQ ID NO: 25775 - DNA, 20 bp, Artificial sequence
  synthetic
gttccatgatttaaatctgc

SEQ ID NO: 25776 - DNA, 20 bp, Artificial sequence
  synthetic
aagcagcaagctggaaatga

SEQ ID NO: 25777 - DNA, 20 bp, Artificial sequence
  synthetic
tcaaattaaatatcagtggc

SEQ ID NO: 25778 - DNA, 20 bp, Artificial sequence
  synthetic
acacaacatgtgggattcga

SEQ ID NO: 25779 - DNA, 20 bp, Artificial sequence
  synthetic
ctttacgagtccaggcatgt

SEQ ID NO: 25780 - DNA, 20 bp, Artificial sequence
  synthetic
atcagctcgaaccaccactg

SEQ ID NO: 25781 - DNA, 20 bp, Artificial sequence
  synthetic
aggcgatggcatggaaccat

SEQ ID NO: 25782 - DNA, 20 bp, Artificial sequence
  synthetic
gcaagattgggacatgacaa

SEQ ID NO: 25783 - DNA, 20 bp, Artificial sequence
  synthetic
catagggattatgtcgctga

SEQ ID NO: 25784 - DNA, 20 bp, Artificial sequence
  synthetic
actgacagccgttggattga

SEQ ID NO: 25785 - DNA, 20 bp, Artificial sequence
  synthetic
gctcacagtcaaggctccga

SEQ ID NO: 25786 - DNA, 20 bp, Artificial sequence
  synthetic
cgttatggatgaagcacatt

SEQ ID NO: 25787 - DNA, 20 bp, Artificial sequence
  synthetic
acaaaggaggggaagagtgg

SEQ ID NO: 25788 - DNA, 20 bp, Artificial sequence
  synthetic
agagaaggtcttttccattg

SEQ ID NO: 25789 - DNA, 20 bp, Artificial sequence
  synthetic
gcctcttcttttactcggat

SEQ ID NO: 25790 - DNA, 20 bp, Artificial sequence
  synthetic
aatagtcgccacagacatac

SEQ ID NO: 25791 - DNA, 20 bp, Artificial sequence
  synthetic
gccacacggaaaggttatag

SEQ ID NO: 25792 - DNA, 20 bp, Artificial sequence
  synthetic
gcccaaggtgcttaaagagc

SEQ ID NO: 25793 - DNA, 20 bp, Artificial sequence
  synthetic
ttggaactatcatggaagtt

SEQ ID NO: 25794 - DNA, 20 bp, Artificial sequence
  synthetic
catgtggttaggttcaagat

SEQ ID NO: 25795 - DNA, 20 bp, Artificial sequence
  synthetic
cgtcatctcacgggaagacc

SEQ ID NO: 25796 - DNA, 20 bp, Artificial sequence
  synthetic
ggcgatagtcaggccaggca

SEQ ID NO: 25797 - DNA, 20 bp, Artificial sequence
  synthetic
gtaggttttacgccactagc

SEQ ID NO: 25798 - DNA, 20 bp, Artificial sequence
  synthetic
atggtgtgccccttgtggaa

SEQ ID NO: 25799 - DNA, 20 bp, Artificial sequence
  synthetic
ttgagatgctacgtggacga

SEQ ID NO: 25800 - DNA, 20 bp, Artificial sequence
  synthetic
acttccacgtaagggagatt

SEQ ID NO: 25801 - DNA, 20 bp, Artificial sequence
  synthetic
gaagttttcttttgcgggta

SEQ ID NO: 25802 - DNA, 20 bp, Artificial sequence
  synthetic
gaaccccaaagactgtgata

SEQ ID NO: 25803 - DNA, 20 bp, Artificial sequence
  synthetic
tgctatagcaaaaacaactg

SEQ ID NO: 25804 - DNA, 20 bp, Artificial sequence
  synthetic
tctcgtttgcccaattgggt

SEQ ID NO: 25805 - DNA, 20 bp, Artificial sequence
  synthetic
cagacatggggtgataatag

SEQ ID NO: 25806 - DNA, 20 bp, Artificial sequence
  synthetic
ccccacgacaataccactta

SEQ ID NO: 25807 - DNA, 20 bp, Artificial sequence
  synthetic
agaagttgcagggggaacaa

SEQ ID NO: 25808 - DNA, 20 bp, Artificial sequence
  synthetic
tacgtcactgctgaaaatca

SEQ ID NO: 25809 - DNA, 20 bp, Artificial sequence
  synthetic
gaatagaggagaatttaaac

SEQ ID NO: 25810 - DNA, 20 bp, Artificial sequence
  synthetic
atcattcaatctgagaattg

SEQ ID NO: 25811 - DNA, 20 bp, Artificial sequence
  synthetic
acaagctgccactgatctag

SEQ ID NO: 25812 - DNA, 20 bp, Artificial sequence
  synthetic
acaaaatcctgtatcggttg

SEQ ID NO: 25813 - DNA, 20 bp, Artificial sequence
  synthetic
aataatggccctgtttgaag

SEQ ID NO: 25814 - DNA, 20 bp, Artificial sequence
  synthetic
caaaggtacattccttacta

SEQ ID NO: 25815 - DNA, 20 bp, Artificial sequence
  synthetic
gttcgaagagctcatgcttc

SEQ ID NO: 25816 - DNA, 20 bp, Artificial sequence
  synthetic
cgtgtacaacaagattatag

SEQ ID NO: 25817 - DNA, 20 bp, Artificial sequence
  synthetic
attcaacaccctgaagaaaa

SEQ ID NO: 25818 - DNA, 20 bp, Artificial sequence
  synthetic
acagaagccggtggtaatac

SEQ ID NO: 25819 - DNA, 20 bp, Artificial sequence
  synthetic
ggcatatgaaaaagccgttg

SEQ ID NO: 25820 - DNA, 20 bp, Artificial sequence
  synthetic
cagtcggcagggtcgacccc

SEQ ID NO: 25821 - DNA, 20 bp, Artificial sequence
  synthetic
ccgcccttttaacgcttcgg

SEQ ID NO: 25822 - DNA, 20 bp, Artificial sequence
  synthetic
gctgcataaatcccccccct

SEQ ID NO: 25823 - DNA, 20 bp, Artificial sequence
  synthetic
gggagctgtatggcgcgggg

SEQ ID NO: 25824 - DNA, 20 bp, Artificial sequence
  synthetic
agcttcctggcgctctctgg

SEQ ID NO: 25825 - DNA, 20 bp, Artificial sequence
  synthetic
gccctaaaatttctgaccat

SEQ ID NO: 25826 - DNA, 20 bp, Artificial sequence
  synthetic
tggcttggttccctgtggaa

SEQ ID NO: 25827 - DNA, 20 bp, Artificial sequence
  synthetic
gctttgactatgtcggccca

SEQ ID NO: 25828 - DNA, 20 bp, Artificial sequence
  synthetic
ggtctgccttgggcttggag

SEQ ID NO: 25829 - DNA, 20 bp, Artificial sequence
  synthetic
tccttgaagcttgcctctgt

SEQ ID NO: 25830 - DNA, 20 bp, Artificial sequence
  synthetic
tcctgaaggaattggagtgc

SEQ ID NO: 25831 - DNA, 20 bp, Artificial sequence
  synthetic
tgttcacaacgtggcactcc

SEQ ID NO: 25832 - DNA, 20 bp, Artificial sequence
  synthetic
atgggggcctagcccatgga

SEQ ID NO: 25833 - DNA, 20 bp, Artificial sequence
  synthetic
gctatgttgagccctggaag

SEQ ID NO: 25834 - DNA, 20 bp, Artificial sequence
  synthetic
tccttgttctaaatcctagc

SEQ ID NO: 25835 - DNA, 20 bp, Artificial sequence
  synthetic
gcctcctgcgggcctacgca

SEQ ID NO: 25836 - DNA, 20 bp, Artificial sequence
  synthetic
ctgctggaccgattctgttg

SEQ ID NO: 25837 - DNA, 20 bp, Artificial sequence
  synthetic
ggacggcgcttacaggaaat

SEQ ID NO: 25838 - DNA, 20 bp, Artificial sequence
  synthetic
gtactggtacccccgaagca

SEQ ID NO: 25839 - DNA, 20 bp, Artificial sequence
  synthetic
aggacgtcactgctcgtgca

SEQ ID NO: 25840 - DNA, 20 bp, Artificial sequence
  synthetic
ttgcttatgtgaaggacagg

SEQ ID NO: 25841 - DNA, 20 bp, Artificial sequence
  synthetic
tgcccgagattatcccccct

SEQ ID NO: 25842 - DNA, 20 bp, Artificial sequence
  synthetic
ccggcgtcacccccacgcag

SEQ ID NO: 25843 - DNA, 20 bp, Artificial sequence
  synthetic
tcttcgcgtgcaaccatgct

SEQ ID NO: 25844 - DNA, 20 bp, Artificial sequence
  synthetic
ctgcctgtcgcaagataggc

SEQ ID NO: 25845 - DNA, 20 bp, Artificial sequence
  synthetic
tgttgattccgacactgctt

SEQ ID NO: 25846 - DNA, 20 bp, Artificial sequence
  synthetic
cactgtcagaagcacaaaaa

SEQ ID NO: 25847 - DNA, 20 bp, Artificial sequence
  synthetic
acttaattgtggggatgtcg

SEQ ID NO: 25848 - DNA, 20 bp, Artificial sequence
  synthetic
ccgccaatctaactctacgt

SEQ ID NO: 25849 - DNA, 20 bp, Artificial sequence
  synthetic
ggagcgtgtggcccgcagcc

SEQ ID NO: 25850 - DNA, 20 bp, Artificial sequence
  synthetic
ccgaggggacgtgttccaga

SEQ ID NO: 25851 - DNA, 20 bp, Artificial sequence
  synthetic
gatgtacgccatgaagtgcc

SEQ ID NO: 25852 - DNA, 20 bp, Artificial sequence
  synthetic
catgaacggtggggacctgc

SEQ ID NO: 25853 - DNA, 20 bp, Artificial sequence
  synthetic
ccccttccggcagcacaaga

SEQ ID NO: 25854 - DNA, 20 bp, Artificial sequence
  synthetic
gaaagagagcccctttttcc

SEQ ID NO: 25855 - DNA, 20 bp, Artificial sequence
  synthetic
cctcaagatccgcggtggga

SEQ ID NO: 25856 - DNA, 20 bp, Artificial sequence
  synthetic
ctgcactctgtgcccatggg

SEQ ID NO: 25857 - DNA, 20 bp, Artificial sequence
  synthetic
ccagcacccgggctcaggga

SEQ ID NO: 25858 - DNA, 20 bp, Artificial sequence
  synthetic
cagctatgcgggttgacaat

SEQ ID NO: 25859 - DNA, 20 bp, Artificial sequence
  synthetic
atgtctggtggcttatggct

SEQ ID NO: 25860 - DNA, 20 bp, Artificial sequence
  synthetic
accttacagtttggccttct

SEQ ID NO: 25861 - DNA, 20 bp, Artificial sequence
  synthetic
atgtggttcctgcgtccgcg

SEQ ID NO: 25862 - DNA, 20 bp, Artificial sequence
  synthetic
ttcgccggcttggttgctta

SEQ ID NO: 25863 - DNA, 20 bp, Artificial sequence
  synthetic
gtcagactttcgcgggtctt

SEQ ID NO: 25864 - DNA, 20 bp, Artificial sequence
  synthetic
tcgggcgaggttactcgctc

SEQ ID NO: 25865 - DNA, 20 bp, Artificial sequence
  synthetic
tgacaccgtaacagactgtg

SEQ ID NO: 25866 - DNA, 20 bp, Artificial sequence
  synthetic
gaggacagtgcctgttggcg

SEQ ID NO: 25867 - DNA, 20 bp, Artificial sequence
  synthetic
cgttcggagggcggtgcgag

SEQ ID NO: 25868 - DNA, 20 bp, Artificial sequence
  synthetic
atctggcagtgttgccggta

SEQ ID NO: 25869 - DNA, 20 bp, Artificial sequence
  synthetic
agaggtatctactcctatat

SEQ ID NO: 25870 - DNA, 20 bp, Artificial sequence
  synthetic
taccaaagtttatgttactg

SEQ ID NO: 25871 - DNA, 20 bp, Artificial sequence
  synthetic
agttaggcgccgagcagccg

SEQ ID NO: 25872 - DNA, 20 bp, Artificial sequence
  synthetic
aagattcatagttttcccac

SEQ ID NO: 25873 - DNA, 20 bp, Artificial sequence
  synthetic
gtgtaggtcgtcgggcgtgt

SEQ ID NO: 25874 - DNA, 20 bp, Artificial sequence
  synthetic
cctactgaagtagacgtaat

SEQ ID NO: 25875 - DNA, 20 bp, Artificial sequence
  synthetic
tccacaggtgttggtcctac

SEQ ID NO: 25876 - DNA, 20 bp, Artificial sequence
  synthetic
gctggagcagcgtattgtca

SEQ ID NO: 25877 - DNA, 20 bp, Artificial sequence
  synthetic
tgggaacgtcacacttttgt

SEQ ID NO: 25878 - DNA, 20 bp, Artificial sequence
  synthetic
gggttctgtgtcttggtttg

SEQ ID NO: 25879 - DNA, 20 bp, Artificial sequence
  synthetic
caggcggcctgcctcgtgtg

SEQ ID NO: 25880 - DNA, 20 bp, Artificial sequence
  synthetic
ggatgcgggcaacttcattc

SEQ ID NO: 25881 - DNA, 20 bp, Artificial sequence
  synthetic
gatggggatttccgccactc

SEQ ID NO: 25882 - DNA, 20 bp, Artificial sequence
  synthetic
tttcgacgcgctcgattggg

SEQ ID NO: 25883 - DNA, 20 bp, Artificial sequence
  synthetic
gcacaaggtcctgattctca

SEQ ID NO: 25884 - DNA, 20 bp, Artificial sequence
  synthetic
atccataattgagacaaagc

SEQ ID NO: 25885 - DNA, 20 bp, Artificial sequence
  synthetic
gggtaaggacagttccatca

SEQ ID NO: 25886 - DNA, 20 bp, Artificial sequence
  synthetic
tgcttcggctgaattgtcga

SEQ ID NO: 25887 - DNA, 20 bp, Artificial sequence
  synthetic
cccggtagaccatcggccgg

SEQ ID NO: 25888 - DNA, 20 bp, Artificial sequence
  synthetic
gtggctcgctggctgctaca

SEQ ID NO: 25889 - DNA, 20 bp, Artificial sequence
  synthetic
ggggtacgtctgggatctgt

SEQ ID NO: 25890 - DNA, 20 bp, Artificial sequence
  synthetic
tgaggtggtggtgaccccta

SEQ ID NO: 25891 - DNA, 20 bp, Artificial sequence
  synthetic
tgttaccattgatggggagc

SEQ ID NO: 25892 - DNA, 20 bp, Artificial sequence
  synthetic
gacctcctcgcaggaggaca

SEQ ID NO: 25893 - DNA, 20 bp, Artificial sequence
  synthetic
ggcacgccaagagacccttg

SEQ ID NO: 25894 - DNA, 20 bp, Artificial sequence
  synthetic
gctcattctgggagacccgg

SEQ ID NO: 25895 - DNA, 20 bp, Artificial sequence
  synthetic
agggagtggtactctgttat

SEQ ID NO: 25896 - DNA, 20 bp, Artificial sequence
  synthetic
caaacaatggacaaggtgtg

SEQ ID NO: 25897 - DNA, 20 bp, Artificial sequence
  synthetic
ggtatttttggtgaaaacat

SEQ ID NO: 25898 - DNA, 20 bp, Artificial sequence
  synthetic
ttttgtggtactgccaacac

SEQ ID NO: 25899 - DNA, 20 bp, Artificial sequence
  synthetic
aacacatcaccaggtagatc

SEQ ID NO: 25900 - DNA, 20 bp, Artificial sequence
  synthetic
atagcacagaaccctgttga

SEQ ID NO: 25901 - DNA, 20 bp, Artificial sequence
  synthetic
ttcacctatactaggtttga

SEQ ID NO: 25902 - DNA, 20 bp, Artificial sequence
  synthetic
atgtatgttcatgtaggtaa

SEQ ID NO: 25903 - DNA, 20 bp, Artificial sequence
  synthetic
aaaattattaaatggatgtt

SEQ ID NO: 25904 - DNA, 20 bp, Artificial sequence
  synthetic
aatccagccggggatgacat

SEQ ID NO: 25905 - DNA, 20 bp, Artificial sequence
  synthetic
tcttgcaacaaatacagcct

SEQ ID NO: 25906 - DNA, 20 bp, Artificial sequence
  synthetic
attaagtattgtgagggtaa

SEQ ID NO: 25907 - DNA, 20 bp, Artificial sequence
  synthetic
cctggttcaaaagaaccagc

SEQ ID NO: 25908 - DNA, 20 bp, Artificial sequence
  synthetic
aaacctattacacttgagga

SEQ ID NO: 25909 - DNA, 20 bp, Artificial sequence
  synthetic
gcagttggatgtgatccaga

SEQ ID NO: 25910 - DNA, 20 bp, Artificial sequence
  synthetic
ctatgcaagtctaaacacat

SEQ ID NO: 25911 - DNA, 20 bp, Artificial sequence
  synthetic
tatggtgatgatgtcatatt

SEQ ID NO: 25912 - DNA, 20 bp, Artificial sequence
  synthetic
aagaacaggtactatgagcc

SEQ ID NO: 25913 - DNA, 20 bp, Artificial sequence
  synthetic
ggccacaacctttttgatct

SEQ ID NO: 25914 - DNA, 20 bp, Artificial sequence
  synthetic
cctctgctgcttctccttgg

SEQ ID NO: 25915 - DNA, 20 bp, Artificial sequence
  synthetic
tttttttgtttttccccttt

SEQ ID NO: 25916 - DNA, 20 bp, Artificial sequence
  synthetic
cttttacaacagggggagaa

SEQ ID NO: 25917 - DNA, 20 bp, Artificial sequence
  synthetic
ccgagccgcccgatctgttt

SEQ ID NO: 25918 - DNA, 20 bp, Artificial sequence
  synthetic
cttccgaagagtgcgtgttt

SEQ ID NO: 25919 - DNA, 20 bp, Artificial sequence
  synthetic
ccttcttatgattgttgttt

SEQ ID NO: 25920 - DNA, 20 bp, Artificial sequence
  synthetic
caaggctacttaaaaaaatc

SEQ ID NO: 25921 - DNA, 20 bp, Artificial sequence
  synthetic
agtctcagctcttgcttttc

SEQ ID NO: 25922 - DNA, 20 bp, Artificial sequence
  synthetic
tggccttgttacgggagata

SEQ ID NO: 25923 - DNA, 20 bp, Artificial sequence
  synthetic
tgtttgctgatcgttttact

SEQ ID NO: 25924 - DNA, 20 bp, Artificial sequence
  synthetic
ctgcaagcaagattcgtgga

SEQ ID NO: 25925 - DNA, 20 bp, Artificial sequence
  synthetic
gtggaaaactcctgttgccg

SEQ ID NO: 25926 - DNA, 20 bp, Artificial sequence
  synthetic
ccaggcgcgtcctgccttca

SEQ ID NO: 25927 - DNA, 20 bp, Artificial sequence
  synthetic
tgctgttcggagtttaatca

SEQ ID NO: 25928 - DNA, 20 bp, Artificial sequence
  synthetic
cgactcctgattcattggga

SEQ ID NO: 25929 - DNA, 20 bp, Artificial sequence
  synthetic
taacctttcagcatcacaga

SEQ ID NO: 25930 - DNA, 20 bp, Artificial sequence
  synthetic
atttcctgcgtctcatgcca

SEQ ID NO: 25931 - DNA, 20 bp, Artificial sequence
  synthetic
taaaaatcttagttcatgtg

SEQ ID NO: 25932 - DNA, 20 bp, Artificial sequence
  synthetic
cccatagcagcgggcgggca

SEQ ID NO: 25933 - DNA, 20 bp, Artificial sequence
  synthetic
aggacgcgactctcccgacg

SEQ ID NO: 25934 - DNA, 20 bp, Artificial sequence
  synthetic
gcggggaggctattctgccc

SEQ ID NO: 25935 - DNA, 20 bp, Artificial sequence
  synthetic
ctttcccctcccttccctat

SEQ ID NO: 25936 - DNA, 20 bp, Artificial sequence
  synthetic
acttggggactgctggtggg

SEQ ID NO: 25937 - DNA, 20 bp, Artificial sequence
  synthetic
gtgtatatatgtatgtgtgt

SEQ ID NO: 25938 - DNA, 20 bp, Artificial sequence
  synthetic
gaggccaacctactaacagg

SEQ ID NO: 25939 - DNA, 20 bp, Artificial sequence
  synthetic
ttcttctcatggggtttctc

SEQ ID NO: 25940 - DNA, 20 bp, Artificial sequence
  synthetic
gagagagaggacaagtggat

SEQ ID NO: 25941 - DNA, 20 bp, Artificial sequence
  synthetic
catcgcctccttttctggga

SEQ ID NO: 25942 - DNA, 20 bp, Artificial sequence
  synthetic
gctggccaccttcggaacca

SEQ ID NO: 25943 - DNA, 20 bp, Artificial sequence
  synthetic
gttcactgtgcagggattgt

SEQ ID NO: 25944 - DNA, 20 bp, Artificial sequence
  synthetic
tcgcgggaaactgaagtggt

SEQ ID NO: 25945 - DNA, 20 bp, Artificial sequence
  synthetic
tagtttcattgtggtataaa

SEQ ID NO: 25946 - DNA, 20 bp, Artificial sequence
  synthetic
cggtcctcgcagagttgcgg

SEQ ID NO: 25947 - DNA, 20 bp, Artificial sequence
  synthetic
ctaattcccttctttgggct

SEQ ID NO: 25948 - DNA, 20 bp, Artificial sequence
  synthetic
agctggccggcggaggcgtg

SEQ ID NO: 25949 - DNA, 20 bp, Artificial sequence
  synthetic
aaactcgacccgggaacaaa

SEQ ID NO: 25950 - DNA, 20 bp, Artificial sequence
  synthetic
ctccgcagtgccctccactg

SEQ ID NO: 25951 - DNA, 20 bp, Artificial sequence
  synthetic
gaagcgaaagggaagaaaat

SEQ ID NO: 25952 - DNA, 20 bp, Artificial sequence
  synthetic
gggtggctcctttttctttt

SEQ ID NO: 25953 - DNA, 20 bp, Artificial sequence
  synthetic
gtttcgttatcttctgatcc

SEQ ID NO: 25954 - DNA, 20 bp, Artificial sequence
  synthetic
atccggggtaactacagtgg

SEQ ID NO: 25955 - DNA, 20 bp, Artificial sequence
  synthetic
cgcgcgcaaatcccggcgac

SEQ ID NO: 25956 - DNA, 20 bp, Artificial sequence
  synthetic
agacattgatttttctcccc

SEQ ID NO: 25957 - DNA, 20 bp, Artificial sequence
  synthetic
cccagccctgtcgccccccg

SEQ ID NO: 25958 - DNA, 20 bp, Artificial sequence
  synthetic
aggcgcacgcgcccagcacc

SEQ ID NO: 25959 - DNA, 20 bp, Artificial sequence
  synthetic
tgatatatttcaatccattg

SEQ ID NO: 25960 - DNA, 20 bp, Artificial sequence
  synthetic
gctcactttgccagtaagag

SEQ ID NO: 25961 - DNA, 20 bp, Artificial sequence
  synthetic
atttctctaaggaccctgat

SEQ ID NO: 25962 - DNA, 20 bp, Artificial sequence
  synthetic
tattttagggccgattcttt

SEQ ID NO: 25963 - DNA, 20 bp, Artificial sequence
  synthetic
gattggcagccagactgcct

SEQ ID NO: 25964 - DNA, 20 bp, Artificial sequence
  synthetic
tgagtcaggaaacattttca

SEQ ID NO: 25965 - DNA, 20 bp, Artificial sequence
  synthetic
aaagccaactttggaaaaag

SEQ ID NO: 25966 - DNA, 20 bp, Artificial sequence
  synthetic
aaaagctaagccggcgggca

SEQ ID NO: 25967 - DNA, 20 bp, Artificial sequence
  synthetic
acgaaccatcgactgccgtg

SEQ ID NO: 25968 - DNA, 20 bp, Artificial sequence
  synthetic
tgggcgcccccacaccggta

SEQ ID NO: 25969 - DNA, 20 bp, Artificial sequence
  synthetic
ccggccgtggatgctcactc

SEQ ID NO: 25970 - DNA, 20 bp, Artificial sequence
  synthetic
ggagtcggtggcagcggcgg

SEQ ID NO: 25971 - DNA, 20 bp, Artificial sequence
  synthetic
cgagccgctcaccccgccgt

SEQ ID NO: 25972 - DNA, 20 bp, Artificial sequence
  synthetic
tcggccttccgcgccagccg

SEQ ID NO: 25973 - DNA, 20 bp, Artificial sequence
  synthetic
aagccagccactggagtcgc

SEQ ID NO: 25974 - DNA, 20 bp, Artificial sequence
  synthetic
ggacctgctgtccgacttac

SEQ ID NO: 25975 - DNA, 20 bp, Artificial sequence
  synthetic
aggaggaagaggaggaggag

SEQ ID NO: 25976 - DNA, 20 bp, Artificial sequence
  synthetic
gttttattctgcctgcttaa

SEQ ID NO: 25977 - DNA, 20 bp, Artificial sequence
  synthetic
agtatttagaattagaatgt

SEQ ID NO: 25978 - DNA, 20 bp, Artificial sequence
  synthetic
tcatcaaacttctccgtcag

SEQ ID NO: 25979 - DNA, 20 bp, Artificial sequence
  synthetic
gagtgccaccggggaagctt

SEQ ID NO: 25980 - DNA, 20 bp, Artificial sequence
  synthetic
ggaaaccgtgtgataagaac

SEQ ID NO: 25981 - DNA, 20 bp, Artificial sequence
  synthetic
gatgctgaatctctttgtcg

SEQ ID NO: 25982 - DNA, 20 bp, Artificial sequence
  synthetic
gtctgggccgagtatgaccc

SEQ ID NO: 25983 - DNA, 20 bp, Artificial sequence
  synthetic
catgtatcagatgctgagac

SEQ ID NO: 25984 - DNA, 20 bp, Artificial sequence
  synthetic
ccgcacagccctggacatca

SEQ ID NO: 25985 - DNA, 20 bp, Artificial sequence
  synthetic
cgtctcactccgctcgcgga

SEQ ID NO: 25986 - DNA, 20 bp, Artificial sequence
  synthetic
agcgaggggtgtgtgccatc

SEQ ID NO: 25987 - DNA, 20 bp, Artificial sequence
  synthetic
gggtgaagcggcgactggag

SEQ ID NO: 25988 - DNA, 20 bp, Artificial sequence
  synthetic
gacgccgcttggagatcccg

SEQ ID NO: 25989 - DNA, 20 bp, Artificial sequence
  synthetic
cagctagcaggtgtgagcgg

SEQ ID NO: 25990 - DNA, 20 bp, Artificial sequence
  synthetic
acgaggactctgcaataccc

SEQ ID NO: 25991 - DNA, 20 bp, Artificial sequence
  synthetic
gttccgtggatatttgggat

SEQ ID NO: 25992 - DNA, 20 bp, Artificial sequence
  synthetic
tttatttttcgcacttgctg

SEQ ID NO: 25993 - DNA, 20 bp, Artificial sequence
  synthetic
tgagtttgcctctgctggaa

SEQ ID NO: 25994 - DNA, 20 bp, Artificial sequence
  synthetic
gcaatggctgggcatatttt

SEQ ID NO: 25995 - DNA, 20 bp, Artificial sequence
  synthetic
ttttctaggcacaacttctg

SEQ ID NO: 25996 - DNA, 20 bp, Artificial sequence
  synthetic
gtggcgtcatcaccggacag

SEQ ID NO: 25997 - DNA, 20 bp, Artificial sequence
  synthetic
tgtttgaggaacactaggct

SEQ ID NO: 25998 - DNA, 20 bp, Artificial sequence
  synthetic
aacgccgagtctctgagaag

SEQ ID NO: 25999 - DNA, 20 bp, Artificial sequence
  synthetic
aatatcccacgtcttctaag

SEQ ID NO: 26000 - DNA, 20 bp, Artificial sequence
  synthetic
tgtgggcccaacgtgaggag

SEQ ID NO: 26001 - DNA, 20 bp, Artificial sequence
  synthetic
gtgcccctggctgggcaaaa

SEQ ID NO: 26002 - DNA, 20 bp, Artificial sequence
  synthetic
cactgccctcgaacgcctca

SEQ ID NO: 26003 - DNA, 20 bp, Artificial sequence
  synthetic
gagcgcgaggccggagggct

SEQ ID NO: 26004 - DNA, 20 bp, Artificial sequence
  synthetic
tccaccgggtatgaagctaa

SEQ ID NO: 26005 - DNA, 20 bp, Artificial sequence
  synthetic
cctccaccagggctgaggga

SEQ ID NO: 26006 - DNA, 20 bp, Artificial sequence
  synthetic
gaggccatggtgacctgaga

SEQ ID NO: 26007 - DNA, 20 bp, Artificial sequence
  synthetic
ctccttctgcctcccctctc

SEQ ID NO: 26008 - DNA, 20 bp, Artificial sequence
  synthetic
tggcagaagcagacaggagc

SEQ ID NO: 26009 - DNA, 20 bp, Artificial sequence
  synthetic
tccagctggctgcttgtttt

SEQ ID NO: 26010 - DNA, 20 bp, Artificial sequence
  synthetic
gctgacggggcggcggcggg

SEQ ID NO: 26011 - DNA, 20 bp, Artificial sequence
  synthetic
ggcggcttctccatgggtcc

SEQ ID NO: 26012 - DNA, 20 bp, Artificial sequence
  synthetic
gccgggcgcgggatttctcc

SEQ ID NO: 26013 - DNA, 20 bp, Artificial sequence
  synthetic
attcctgcagagggaaaact

SEQ ID NO: 26014 - DNA, 20 bp, Artificial sequence
  synthetic
cccctttggatcttgtcggg

SEQ ID NO: 26015 - DNA, 20 bp, Artificial sequence
  synthetic
taaaataaattcctaaagtc

SEQ ID NO: 26016 - DNA, 20 bp, Artificial sequence
  synthetic
tcaggacgagggccacacca

SEQ ID NO: 26017 - DNA, 20 bp, Artificial sequence
  synthetic
aatgacatggaaaattcgcc

SEQ ID NO: 26018 - DNA, 20 bp, Artificial sequence
  synthetic
caaagcacaaaattaatttc

SEQ ID NO: 26019 - DNA, 20 bp, Artificial sequence
  synthetic
ggacggtctgcggcaaattg

SEQ ID NO: 26020 - DNA, 20 bp, Artificial sequence
  synthetic
ggagatacggatacctctgg

SEQ ID NO: 26021 - DNA, 20 bp, Artificial sequence
  synthetic
cgtttgcaaaatctcaaaag

SEQ ID NO: 26022 - DNA, 20 bp, Artificial sequence
  synthetic
ggagacgagattttctacca

SEQ ID NO: 26023 - DNA, 20 bp, Artificial sequence
  synthetic
gaaaagtagctaaaagcacg

SEQ ID NO: 26024 - DNA, 20 bp, Artificial sequence
  synthetic
tagctaaaagcacgcggaca

SEQ ID NO: 26025 - DNA, 20 bp, Artificial sequence
  synthetic
agtccgcgctgcgagcataa

SEQ ID NO: 26026 - DNA, 20 bp, Artificial sequence
  synthetic
tgaacatatttcaagggact

SEQ ID NO: 26027 - DNA, 20 bp, Artificial sequence
  synthetic
aacgacaacaacagcaacga

SEQ ID NO: 26028 - DNA, 20 bp, Artificial sequence
  synthetic
agtagcagcaccagctaccc

SEQ ID NO: 26029 - DNA, 20 bp, Artificial sequence
  synthetic
actttacacttaataatata

SEQ ID NO: 26030 - DNA, 20 bp, Artificial sequence
  synthetic
tgtcacacagtaaacggcgc

SEQ ID NO: 26031 - DNA, 20 bp, Artificial sequence
  synthetic
ctttgttttattatccacat

SEQ ID NO: 26032 - DNA, 20 bp, Artificial sequence
  synthetic
tcagcgctttaccgctcgcc

SEQ ID NO: 26033 - DNA, 20 bp, Artificial sequence
  synthetic
aacactcaaataaaatccgc

SEQ ID NO: 26034 - DNA, 20 bp, Artificial sequence
  synthetic
cccctcccccaactgtaact

SEQ ID NO: 26035 - DNA, 20 bp, Artificial sequence
  synthetic
agtatcaatagactgctcac

SEQ ID NO: 26036 - DNA, 20 bp, Artificial sequence
  synthetic
cacgggcgaccgtggcggtg

SEQ ID NO: 26037 - DNA, 20 bp, Artificial sequence
  synthetic
tggtagtcctccggcccctg

SEQ ID NO: 26038 - DNA, 20 bp, Artificial sequence
  synthetic
catattgccgtcttttggca

SEQ ID NO: 26039 - DNA, 20 bp, Artificial sequence
  synthetic
tcttgacgagcattcctagg

SEQ ID NO: 26040 - DNA, 20 bp, Artificial sequence
  synthetic
gcgacaggtgcctctgcggc

SEQ ID NO: 26041 - DNA, 20 bp, Artificial sequence
  synthetic
gagtatcaataggctgctcg

SEQ ID NO: 26042 - DNA, 20 bp, Artificial sequence
  synthetic
tcgctcagcacaaccccagt

SEQ ID NO: 26043 - DNA, 20 bp, Artificial sequence
  synthetic
tgctcacaaaccagtgggtg

SEQ ID NO: 26044 - DNA, 20 bp, Artificial sequence
  synthetic
ggctccacgctcgatccact

SEQ ID NO: 26045 - DNA, 20 bp, Artificial sequence
  synthetic
gaccggccgggtggaaggcc

SEQ ID NO: 26046 - DNA, 20 bp, Artificial sequence
  synthetic
gaaggggtacgtctatgggt

SEQ ID NO: 26047 - DNA, 20 bp, Artificial sequence
  synthetic
agtgttagggttcgtaggtg

SEQ ID NO: 26048 - DNA, 20 bp, Artificial sequence
  synthetic
tttggacacggtccacaggt

SEQ ID NO: 26049 - DNA, 20 bp, Artificial sequence
  synthetic
tgaagcgtcagtcgttaaac

SEQ ID NO: 26050 - DNA, 20 bp, Artificial sequence
  synthetic
ctcttgagactggccgaaag

SEQ ID NO: 26051 - DNA, 20 bp, Artificial sequence
  synthetic
gctgcatgcggcaaggggaa

SEQ ID NO: 26052 - DNA, 20 bp, Artificial sequence
  synthetic
gacgtaatggccccggcccg

SEQ ID NO: 26053 - DNA, 20 bp, Artificial sequence
  synthetic
aaaagcgcacggtccacagg

SEQ ID NO: 26054 - DNA, 20 bp, Artificial sequence
  synthetic
gtagccggcgagttgacaag

SEQ ID NO: 26055 - DNA, 20 bp, Artificial sequence
  synthetic
cagctccgcggcggcctaca

SEQ ID NO: 26056 - DNA, 20 bp, Artificial sequence
  synthetic
ggcgggtggcattttctttt

SEQ ID NO: 26057 - DNA, 20 bp, Artificial sequence
  synthetic
caccttgcagtgttaacttg

SEQ ID NO: 26058 - DNA, 20 bp, Artificial sequence
  synthetic
agggcaaacatcatttggcc

SEQ ID NO: 26059 - DNA, 20 bp, Artificial sequence
  synthetic
tcctttcttggataaacccg

SEQ ID NO: 26060 - DNA, 20 bp, Artificial sequence
  synthetic
gcaagactgctagccgagta

SEQ ID NO: 26061 - DNA, 20 bp, Artificial sequence
  synthetic
agggacctgaaagcgaaagg

SEQ ID NO: 26062 - DNA, 20 bp, Artificial sequence
  synthetic
tgtaacttagaagtttttca

SEQ ID NO: 26063 - DNA, 20 bp, Artificial sequence
  synthetic
tactgaaggtcaagcacttc

SEQ ID NO: 26064 - DNA, 20 bp, Artificial sequence
  synthetic
acagggcaaaaacaactgcg

SEQ ID NO: 26065 - DNA, 20 bp, Artificial sequence
  synthetic
ttagtagcatctttgaaatc

SEQ ID NO: 26066 - DNA, 20 bp, Artificial sequence
  synthetic
gtggctaaccttaaccctgc

SEQ ID NO: 26067 - DNA, 20 bp, Artificial sequence
  synthetic
gcggctaatcccaacctcgg

SEQ ID NO: 26068 - DNA, 20 bp, Artificial sequence
  synthetic
cgcatagactgttcccacgg

SEQ ID NO: 26069 - DNA, 20 bp, Artificial sequence
  synthetic
gtacttcgagaagcctagta

SEQ ID NO: 26070 - DNA, 20 bp, Artificial sequence
  synthetic
actggcgacagtggtccagg

SEQ ID NO: 26071 - DNA, 20 bp, Artificial sequence
  synthetic
gagagtcctccggcccctga

SEQ ID NO: 26072 - DNA, 20 bp, Artificial sequence
  synthetic
gctgcaacccagcagccagc

SEQ ID NO: 26073 - DNA, 20 bp, Artificial sequence
  synthetic
attcgaatctgtaataaaag

SEQ ID NO: 26074 - DNA, 20 bp, Artificial sequence
  synthetic
gagaggagattttgttcgtg

SEQ ID NO: 26075 - DNA, 20 bp, Artificial sequence
  synthetic
atccggactgaatccgtagt

SEQ ID NO: 26076 - DNA, 20 bp, Artificial sequence
  synthetic
ccctggtctgagctctgtgg

SEQ ID NO: 26077 - DNA, 20 bp, Artificial sequence
  synthetic
cggtgatactataagtcgtg

SEQ ID NO: 26078 - DNA, 20 bp, Artificial sequence
  synthetic
cgtcacttgtcgacagcgcc

SEQ ID NO: 26079 - DNA, 20 bp, Artificial sequence
  synthetic
tatatgcattcccgcatggc

SEQ ID NO: 26080 - DNA, 20 bp, Artificial sequence
  synthetic
ggtatgcgtcatcatttgcc

SEQ ID NO: 26081 - DNA, 20 bp, Artificial sequence
  synthetic
cgtgccgaaaatccctttgc

SEQ ID NO: 26082 - DNA, 20 bp, Artificial sequence
  synthetic
gcacatcttaacctgagcgg

SEQ ID NO: 26083 - DNA, 20 bp, Artificial sequence
  synthetic
gtggcgagctccctgggtgg

SEQ ID NO: 26084 - DNA, 20 bp, Artificial sequence
  synthetic
ttcaggctttagcgcgccct

SEQ ID NO: 26085 - DNA, 20 bp, Artificial sequence
  synthetic
tgctctggatggtgtcacca

SEQ ID NO: 26086 - DNA, 20 bp, Artificial sequence
  synthetic
gcgacacgcctgtggtagcg

SEQ ID NO: 26087 - DNA, 20 bp, Artificial sequence
  synthetic
gcaggaaccccacctgccag

SEQ ID NO: 26088 - DNA, 20 bp, Artificial sequence
  synthetic
caagctggttacagccctga

SEQ ID NO: 26089 - DNA, 20 bp, Artificial sequence
  synthetic
cagggtcaaaaattgtctaa

SEQ ID NO: 26090 - DNA, 20 bp, Artificial sequence
  synthetic
gagcgtttcttttccttttg

SEQ ID NO: 26091 - DNA, 20 bp, Artificial sequence
  synthetic
cgtttgccaatcggagggcg

SEQ ID NO: 26092 - DNA, 20 bp, Artificial sequence
  synthetic
cgttccactttagcaggggt

SEQ ID NO: 26093 - DNA, 20 bp, Artificial sequence
  synthetic
ctagccgtcgcgtcttaacg

SEQ ID NO: 26094 - DNA, 20 bp, Artificial sequence
  synthetic
gtttacagcacctctcacat

SEQ ID NO: 26095 - DNA, 20 bp, Artificial sequence
  synthetic
tagtagtatggcttagtacg

SEQ ID NO: 26096 - DNA, 20 bp, Artificial sequence
  synthetic
ccttgttctgaatgcacaca

SEQ ID NO: 26097 - DNA, 20 bp, Artificial sequence
  synthetic
cccgcacgtaaccttcagag

SEQ ID NO: 26098 - DNA, 20 bp, Artificial sequence
  synthetic
aggagaccgtggtgcactgc

SEQ ID NO: 26099 - DNA, 20 bp, Artificial sequence
  synthetic
ggcctctcacgccatccagg

SEQ ID NO: 26100 - DNA, 20 bp, Artificial sequence
  synthetic
tccaggggaccttgtcctac

SEQ ID NO: 26101 - DNA, 20 bp, Artificial sequence
  synthetic
ggtactgcgatagtgccacc

SEQ ID NO: 26102 - DNA, 20 bp, Artificial sequence
  synthetic
ctgactaatcagaggaacgt

SEQ ID NO: 26103 - DNA, 20 bp, Artificial sequence
  synthetic
agataagttagaatccaaat

SEQ ID NO: 26104 - DNA, 20 bp, Artificial sequence
  synthetic
gattatgtgatgctttctgc

SEQ ID NO: 26105 - DNA, 20 bp, Artificial sequence
  synthetic
aaaccttcttcctttttcct

SEQ ID NO: 26106 - DNA, 20 bp, Artificial sequence
  synthetic
ggaatatgacagggttattt

SEQ ID NO: 26107 - DNA, 20 bp, Artificial sequence
  synthetic
tatactgtggaagggtatgt

SEQ ID NO: 26108 - DNA, 20 bp, Artificial sequence
  synthetic
tgcggccaaaagccacgtgg

SEQ ID NO: 26109 - DNA, 20 bp, Artificial sequence
  synthetic
ctcaagcgcctctgtaggga

SEQ ID NO: 26110 - DNA, 20 bp, Artificial sequence
  synthetic
gggaagccaagaatgtccag

SEQ ID NO: 26111 - DNA, 20 bp, Artificial sequence
  synthetic
gattgggaacacttggagga

SEQ ID NO: 26112 - DNA, 20 bp, Artificial sequence
  synthetic
ttcgttgaacaattgtgcgt

SEQ ID NO: 26113 - DNA, 20 bp, Artificial sequence
  synthetic
aacaattgtgcgtattacac

SEQ ID NO: 26114 - DNA, 20 bp, Artificial sequence
  synthetic
aaaaattagcttaatgcatt

SEQ ID NO: 26115 - DNA, 20 bp, Artificial sequence
  synthetic
tggacttagacttgctctat

SEQ ID NO: 26116 - DNA, 20 bp, Artificial sequence
  synthetic
cagtaggacataccccaaat

SEQ ID NO: 26117 - DNA, 20 bp, Artificial sequence
  synthetic
ccacaaggctagtgataata

SEQ ID NO: 26118 - DNA, 20 bp, Artificial sequence
  synthetic
ctctagacctactggaaata

SEQ ID NO: 26119 - DNA, 20 bp, Artificial sequence
  synthetic
acattaagagagagagtatt

SEQ ID NO: 26120 - DNA, 20 bp, Artificial sequence
  synthetic
actctggtgtaaggcttaga

SEQ ID NO: 26121 - DNA, 20 bp, Artificial sequence
  synthetic
tttaaattttttaattccga

SEQ ID NO: 26122 - DNA, 20 bp, Artificial sequence
  synthetic
taaacttgaatgtaaggctt

SEQ ID NO: 26123 - DNA, 20 bp, Artificial sequence
  synthetic
tggtttaattgagcgcattt

SEQ ID NO: 26124 - DNA, 20 bp, Artificial sequence
  synthetic
aataagggagtgtcctattt

SEQ ID NO: 26125 - DNA, 20 bp, Artificial sequence
  synthetic
acttatgtattgatgagagc

SEQ ID NO: 26126 - DNA, 20 bp, Artificial sequence
  synthetic
tggaagacaatgatctgggg

SEQ ID NO: 26127 - DNA, 20 bp, Artificial sequence
  synthetic
tggtttgctatttagcgtac

SEQ ID NO: 26128 - DNA, 20 bp, Artificial sequence
  synthetic
cataggcagccccaaaaaca

SEQ ID NO: 26129 - DNA, 20 bp, Artificial sequence
  synthetic
tagtcaagttcgaccgtctt

SEQ ID NO: 26130 - DNA, 20 bp, Artificial sequence
  synthetic
cgaccgtcttctcagcgctc

SEQ ID NO: 26131 - DNA, 20 bp, Artificial sequence
  synthetic
ctcagcgctccgccagggcc

SEQ ID NO: 26132 - DNA, 20 bp, Artificial sequence
  synthetic
cgccagggccgtgggccgac

SEQ ID NO: 26133 - DNA, 20 bp, Artificial sequence
  synthetic
gtgggccgaccccggcgggg

SEQ ID NO: 26134 - DNA, 20 bp, Artificial sequence
  synthetic
cccggcggggccgatccgag

SEQ ID NO: 26135 - DNA, 20 bp, Artificial sequence
  synthetic
tcggtagtagcgacgggcgg

SEQ ID NO: 26136 - DNA, 20 bp, Artificial sequence
  synthetic
tgtgtacaaagggcagggac

SEQ ID NO: 26137 - DNA, 20 bp, Artificial sequence
  synthetic
gggcagggacttaatcaacg

SEQ ID NO: 26138 - DNA, 20 bp, Artificial sequence
  synthetic
caagcttatgacccgcactt

SEQ ID NO: 26139 - DNA, 20 bp, Artificial sequence
  synthetic
actgggaattcctcgttcat

SEQ ID NO: 26140 - DNA, 20 bp, Artificial sequence
  synthetic
ggggaataattgcaatcccc

SEQ ID NO: 26141 - DNA, 20 bp, Artificial sequence
  synthetic
gatccccatcacgaatgggg

SEQ ID NO: 26142 - DNA, 20 bp, Artificial sequence
  synthetic
agtcagtgtagcgcgcgtgc

SEQ ID NO: 26143 - DNA, 20 bp, Artificial sequence
  synthetic
agccccggacatctaagggc

SEQ ID NO: 26144 - DNA, 20 bp, Artificial sequence
  synthetic
atctaagggcatcacagacc

SEQ ID NO: 26145 - DNA, 20 bp, Artificial sequence
  synthetic
caatctcgggtggctgaacg

SEQ ID NO: 26146 - DNA, 20 bp, Artificial sequence
  synthetic
ccacttgtccctctaagaag

SEQ ID NO: 26147 - DNA, 20 bp, Artificial sequence
  synthetic
ctctaagaagttgggggacg

SEQ ID NO: 26148 - DNA, 20 bp, Artificial sequence
  synthetic
ttgggggacgccgaccgctc

SEQ ID NO: 26149 - DNA, 20 bp, Artificial sequence
  synthetic
ccaactaagaacggccatgc

SEQ ID NO: 26150 - DNA, 20 bp, Artificial sequence
  synthetic
accaccacccacggaatcga

SEQ ID NO: 26151 - DNA, 20 bp, Artificial sequence
  synthetic
tcaatctgtcaatcctgtcc

SEQ ID NO: 26152 - DNA, 20 bp, Artificial sequence
  synthetic
cgggtgaggtttcccgtgtt

SEQ ID NO: 26153 - DNA, 20 bp, Artificial sequence
  synthetic
ttcccgtgttgagtcaaatt

SEQ ID NO: 26154 - DNA, 20 bp, Artificial sequence
  synthetic
gagtcaaattaagccgcagg

SEQ ID NO: 26155 - DNA, 20 bp, Artificial sequence
  synthetic
aagccgcaggctccactcct

SEQ ID NO: 26156 - DNA, 20 bp, Artificial sequence
  synthetic
ttcagctttgcaaccatact

SEQ ID NO: 26157 - DNA, 20 bp, Artificial sequence
  synthetic
ttggtttcccggaagctgcc

SEQ ID NO: 26158 - DNA, 20 bp, Artificial sequence
  synthetic
ggaagctgcccggcgggtca

SEQ ID NO: 26159 - DNA, 20 bp, Artificial sequence
  synthetic
gccgccgcatcgccggtcgg

SEQ ID NO: 26160 - DNA, 20 bp, Artificial sequence
  synthetic
cgccggtcggcatcgtttat

SEQ ID NO: 26161 - DNA, 20 bp, Artificial sequence
  synthetic
catcgtttatggtcggaact

SEQ ID NO: 26162 - DNA, 20 bp, Artificial sequence
  synthetic
acgacggtatctgatcgtct

SEQ ID NO: 26163 - DNA, 20 bp, Artificial sequence
  synthetic
ctgatcgtcttcgaacctcc

SEQ ID NO: 26164 - DNA, 20 bp, Artificial sequence
  synthetic
gactttcgttcttgattaat

SEQ ID NO: 26165 - DNA, 20 bp, Artificial sequence
  synthetic
cttgattaatgaaaacattc

SEQ ID NO: 26166 - DNA, 20 bp, Artificial sequence
  synthetic
gaaaacattcttggcaaatg

SEQ ID NO: 26167 - DNA, 20 bp, Artificial sequence
  synthetic
ttggcaaatgctttcgctct

SEQ ID NO: 26168 - DNA, 20 bp, Artificial sequence
  synthetic
gcgccggtccaagaatttca

SEQ ID NO: 26169 - DNA, 20 bp, Artificial sequence
  synthetic
aagaatttcacctctagcgg

SEQ ID NO: 26170 - DNA, 20 bp, Artificial sequence
  synthetic
cgcaatacgaatgcccccgg

SEQ ID NO: 26171 - DNA, 20 bp, Artificial sequence
  synthetic
atgcccccggccgtccctct

SEQ ID NO: 26172 - DNA, 20 bp, Artificial sequence
  synthetic
ctcagttccgaaaaccaaca

SEQ ID NO: 26173 - DNA, 20 bp, Artificial sequence
  synthetic
aaatagaaccgcggtcctat

SEQ ID NO: 26174 - DNA, 20 bp, Artificial sequence
  synthetic
gcggtcctattccattattc

SEQ ID NO: 26175 - DNA, 20 bp, Artificial sequence
  synthetic
tccattattcctagctgcgg

SEQ ID NO: 26176 - DNA, 20 bp, Artificial sequence
  synthetic
ctctaattttttcaaagtaa

SEQ ID NO: 26177 - DNA, 20 bp, Artificial sequence
  synthetic
agagcatcgagggggcgccg

SEQ ID NO: 26178 - DNA, 20 bp, Artificial sequence
  synthetic
ggcggggacgggcggtggct

SEQ ID NO: 26179 - DNA, 20 bp, Artificial sequence
  synthetic
ggcggtggctcgcctcgcgg

SEQ ID NO: 26180 - DNA, 20 bp, Artificial sequence
  synthetic
cgcctcgcgggggaccgccc

SEQ ID NO: 26181 - DNA, 20 bp, Artificial sequence
  synthetic
gggaccgcccgcccgctccc

SEQ ID NO: 26182 - DNA, 20 bp, Artificial sequence
  synthetic
ggagctggaattaccgcggc

SEQ ID NO: 26183 - DNA, 20 bp, Artificial sequence
  synthetic
agacttgccctccaatggat

SEQ ID NO: 26184 - DNA, 20 bp, Artificial sequence
  synthetic
tccaatggatcctcgttaaa

SEQ ID NO: 26185 - DNA, 20 bp, Artificial sequence
  synthetic
tggactcattccaattacag

SEQ ID NO: 26186 - DNA, 20 bp, Artificial sequence
  synthetic
ccaattacagggcctcgaaa

SEQ ID NO: 26187 - DNA, 20 bp, Artificial sequence
  synthetic
ctccccgggtcgggagtggg

SEQ ID NO: 26188 - DNA, 20 bp, Artificial sequence
  synthetic
gcctgctgccttccttggat

SEQ ID NO: 26189 - DNA, 20 bp, Artificial sequence
  synthetic
ctgattccccgtcacccgtg

SEQ ID NO: 26190 - DNA, 20 bp, Artificial sequence
  synthetic
taggcacggcgactaccatc

SEQ ID NO: 26191 - DNA, 20 bp, Artificial sequence
  synthetic
gactaccatcgaaagttgat

SEQ ID NO: 26192 - DNA, 20 bp, Artificial sequence
  synthetic
agggcagacgttcgaatggg

SEQ ID NO: 26193 - DNA, 20 bp, Artificial sequence
  synthetic
ccaaagccgccggcgcccgc

SEQ ID NO: 26194 - DNA, 20 bp, Artificial sequence
  synthetic
cccccggccggggccggaga

SEQ ID NO: 26195 - DNA, 20 bp, Artificial sequence
  synthetic
tcccccccgcgaagggggtc

SEQ ID NO: 26196 - DNA, 20 bp, Artificial sequence
  synthetic
agctctagaattaccacagt

SEQ ID NO: 26197 - DNA, 20 bp, Artificial sequence
  synthetic
cgaggccaaccgaggctccg

SEQ ID NO: 26198 - DNA, 20 bp, Artificial sequence
  synthetic
cgaggctccgcggcgctgcc

SEQ ID NO: 26199 - DNA, 20 bp, Artificial sequence
  synthetic
cggcgctgccgtatcgttcc

SEQ ID NO: 26200 - DNA, 20 bp, Artificial sequence
  synthetic
gattctgacttagaggcgtt

SEQ ID NO: 26201 - DNA, 20 bp, Artificial sequence
  synthetic
tagaggcgttcagtcataat

SEQ ID NO: 26202 - DNA, 20 bp, Artificial sequence
  synthetic
cagtcataatcccacagatg

SEQ ID NO: 26203 - DNA, 20 bp, Artificial sequence
  synthetic
cccacagatggtagcttcgc

SEQ ID NO: 26204 - DNA, 20 bp, Artificial sequence
  synthetic
ctgagcaggattaccatggc

SEQ ID NO: 26205 - DNA, 20 bp, Artificial sequence
  synthetic
catcagtagggtaaaactaa

SEQ ID NO: 26206 - DNA, 20 bp, Artificial sequence
  synthetic
cgttccctattagtgggtga

SEQ ID NO: 26207 - DNA, 20 bp, Artificial sequence
  synthetic
caatgataggaagagccgac

SEQ ID NO: 26208 - DNA, 20 bp, Artificial sequence
  synthetic
atcgaaggatcaaaaagcga

SEQ ID NO: 26209 - DNA, 20 bp, Artificial sequence
  synthetic
cgtcgctatgaacgcttggc

SEQ ID NO: 26210 - DNA, 20 bp, Artificial sequence
  synthetic
tgtggtaacttttctgacac

SEQ ID NO: 26211 - DNA, 20 bp, Artificial sequence
  synthetic
aaacccaaaaggtcagaagg

SEQ ID NO: 26212 - DNA, 20 bp, Artificial sequence
  synthetic
cccgctttcacggtctgtat

SEQ ID NO: 26213 - DNA, 20 bp, Artificial sequence
  synthetic
tcgtactgaaaatcaagatc

SEQ ID NO: 26214 - DNA, 20 bp, Artificial sequence
  synthetic
aatcaagatcaagcgagctt

SEQ ID NO: 26215 - DNA, 20 bp, Artificial sequence
  synthetic
aagcgagcttttgcccttct

SEQ ID NO: 26216 - DNA, 20 bp, Artificial sequence
  synthetic
ttgcccttctgctccacggg

SEQ ID NO: 26217 - DNA, 20 bp, Artificial sequence
  synthetic
tacacctctcatgtctcttc

SEQ ID NO: 26218 - DNA, 20 bp, Artificial sequence
  synthetic
atgtctcttcaccgtgccag

SEQ ID NO: 26219 - DNA, 20 bp, Artificial sequence
  synthetic
accgtgccagactagagtca

SEQ ID NO: 26220 - DNA, 20 bp, Artificial sequence
  synthetic
actagagtcaagctcaacag

SEQ ID NO: 26221 - DNA, 20 bp, Artificial sequence
  synthetic
agctcaacagggtcttcttt

SEQ ID NO: 26222 - DNA, 20 bp, Artificial sequence
  synthetic
ggtcttctttccccgctgat

SEQ ID NO: 26223 - DNA, 20 bp, Artificial sequence
  synthetic
ccccgctgattccgccaagc

SEQ ID NO: 26224 - DNA, 20 bp, Artificial sequence
  synthetic
ccgttcccttggctgtggtt

SEQ ID NO: 26225 - DNA, 20 bp, Artificial sequence
  synthetic
tcgctggatagtaggtaggg

SEQ ID NO: 26226 - DNA, 20 bp, Artificial sequence
  synthetic
acagtgggaatctcgttcat

SEQ ID NO: 26227 - DNA, 20 bp, Artificial sequence
  synthetic
tctcgttcatccattcatgc

SEQ ID NO: 26228 - DNA, 20 bp, Artificial sequence
  synthetic
ccattcatgcgcgtcactaa

SEQ ID NO: 26229 - DNA, 20 bp, Artificial sequence
  synthetic
gcgtcactaattagatgacg

SEQ ID NO: 26230 - DNA, 20 bp, Artificial sequence
  synthetic
agagtcatagttactcccgc

SEQ ID NO: 26231 - DNA, 20 bp, Artificial sequence
  synthetic
cgcttcattgaatttcttca

SEQ ID NO: 26232 - DNA, 20 bp, Artificial sequence
  synthetic
aatttcttcactttgacatt

SEQ ID NO: 26233 - DNA, 20 bp, Artificial sequence
  synthetic
ctttgacattcagagcactg

SEQ ID NO: 26234 - DNA, 20 bp, Artificial sequence
  synthetic
cgccccagcccgaccgaccc

SEQ ID NO: 26235 - DNA, 20 bp, Artificial sequence
  synthetic
cgaccgacccagcccttaga

SEQ ID NO: 26236 - DNA, 20 bp, Artificial sequence
  synthetic
atcccgaagttacggatccg

SEQ ID NO: 26237 - DNA, 20 bp, Artificial sequence
  synthetic
tacggatccggcttgccgac

SEQ ID NO: 26238 - DNA, 20 bp, Artificial sequence
  synthetic
gcttgccgacttcccttacc

SEQ ID NO: 26239 - DNA, 20 bp, Artificial sequence
  synthetic
accttggagacctgctgcgg

SEQ ID NO: 26240 - DNA, 20 bp, Artificial sequence
  synthetic
atatgggtacggcccggcgc

SEQ ID NO: 26241 - DNA, 20 bp, Artificial sequence
  synthetic
gagatttacaccctctcccc

SEQ ID NO: 26242 - DNA, 20 bp, Artificial sequence
  synthetic
agggccagcgagagctcacc

SEQ ID NO: 26243 - DNA, 20 bp, Artificial sequence
  synthetic
agagctcaccggacgccgcc

SEQ ID NO: 26244 - DNA, 20 bp, Artificial sequence
  synthetic
ggacgccgccggaaccgcga

SEQ ID NO: 26245 - DNA, 20 bp, Artificial sequence
  synthetic
cgctttccaaggcacgggcc

SEQ ID NO: 26246 - DNA, 20 bp, Artificial sequence
  synthetic
cctctctcggggcgaaccca

SEQ ID NO: 26247 - DNA, 20 bp, Artificial sequence
  synthetic
ggcgaacccattccagggcg

SEQ ID NO: 26248 - DNA, 20 bp, Artificial sequence
  synthetic
cacaaagaaaagagaactct

SEQ ID NO: 26249 - DNA, 20 bp, Artificial sequence
  synthetic
cccgccggcttctccgggat

SEQ ID NO: 26250 - DNA, 20 bp, Artificial sequence
  synthetic
accgcactggacgcctcgcg

SEQ ID NO: 26251 - DNA, 20 bp, Artificial sequence
  synthetic
acgcctcgcggcgcccatct

SEQ ID NO: 26252 - DNA, 20 bp, Artificial sequence
  synthetic
gcgcccatctccgccactcc

SEQ ID NO: 26253 - DNA, 20 bp, Artificial sequence
  synthetic
ccgccactccggattcgggg

SEQ ID NO: 26254 - DNA, 20 bp, Artificial sequence
  synthetic
ggaacggcgctcgcccatct

SEQ ID NO: 26255 - DNA, 20 bp, Artificial sequence
  synthetic
tcgcccatctctcaggaccg

SEQ ID NO: 26256 - DNA, 20 bp, Artificial sequence
  synthetic
actgacccatgttcaactgc

SEQ ID NO: 26257 - DNA, 20 bp, Artificial sequence
  synthetic
gttcaactgctgttcacatg

SEQ ID NO: 26258 - DNA, 20 bp, Artificial sequence
  synthetic
ccacttcggccttcaaagtt

SEQ ID NO: 26259 - DNA, 20 bp, Artificial sequence
  synthetic
taccaccaagatctgcacct

SEQ ID NO: 26260 - DNA, 20 bp, Artificial sequence
  synthetic
gcggcggctccacccgggcc

SEQ ID NO: 26261 - DNA, 20 bp, Artificial sequence
  synthetic
ggccctcctactcgtcgcgg

SEQ ID NO: 26262 - DNA, 20 bp, Artificial sequence
  synthetic
gccgctcccgtccactctcg

SEQ ID NO: 26263 - DNA, 20 bp, Artificial sequence
  synthetic
acggccgggtatgggcccga

SEQ ID NO: 26264 - DNA, 20 bp, Artificial sequence
  synthetic
cgctccagcgccatccattt

SEQ ID NO: 26265 - DNA, 20 bp, Artificial sequence
  synthetic
ccatccattttcagggctag

SEQ ID NO: 26266 - DNA, 20 bp, Artificial sequence
  synthetic
tcagggctagttgattcggc

SEQ ID NO: 26267 - DNA, 20 bp, Artificial sequence
  synthetic
ttacacactccttagcggat

SEQ ID NO: 26268 - DNA, 20 bp, Artificial sequence
  synthetic
cttagcggattccgacttcc

SEQ ID NO: 26269 - DNA, 20 bp, Artificial sequence
  synthetic
atggccaccgtcctgctgtc

SEQ ID NO: 26270 - DNA, 20 bp, Artificial sequence
  synthetic
aacaccttttctggggtctg

SEQ ID NO: 26271 - DNA, 20 bp, Artificial sequence
  synthetic
ccttaacccggcgttcggtt

SEQ ID NO: 26272 - DNA, 20 bp, Artificial sequence
  synthetic
gcgttcggttcatcccgcag

SEQ ID NO: 26273 - DNA, 20 bp, Artificial sequence
  synthetic
catcccgcagcgccagttct

SEQ ID NO: 26274 - DNA, 20 bp, Artificial sequence
  synthetic
gcttaccaaaagtggcccac

SEQ ID NO: 26275 - DNA, 20 bp, Artificial sequence
  synthetic
taggcactcgcattccacgc

SEQ ID NO: 26276 - DNA, 20 bp, Artificial sequence
  synthetic
acccatttaaagtttgagaa

SEQ ID NO: 26277 - DNA, 20 bp, Artificial sequence
  synthetic
taggttgagatcgtttcggc

SEQ ID NO: 26278 - DNA, 20 bp, Artificial sequence
  synthetic
tcgtttcggccccaagacct

SEQ ID NO: 26279 - DNA, 20 bp, Artificial sequence
  synthetic
cccaagacctctaatcattc

SEQ ID NO: 26280 - DNA, 20 bp, Artificial sequence
  synthetic
ctaatcattcgctttaccgg

SEQ ID NO: 26281 - DNA, 20 bp, Artificial sequence
  synthetic
gctttaccggataaaactgc

SEQ ID NO: 26282 - DNA, 20 bp, Artificial sequence
  synthetic
ataaaactgcgtggcggggg

SEQ ID NO: 26283 - DNA, 20 bp, Artificial sequence
  synthetic
tgcgtcgggtctgcgagagc

SEQ ID NO: 26284 - DNA, 20 bp, Artificial sequence
  synthetic
ctgcgagagcgccagctatc

SEQ ID NO: 26285 - DNA, 20 bp, Artificial sequence
  synthetic
gccagctatcctgagggaaa

SEQ ID NO: 26286 - DNA, 20 bp, Artificial sequence
  synthetic
ctgagggaaacttcggaggg

SEQ ID NO: 26287 - DNA, 20 bp, Artificial sequence
  synthetic
tcgcccctatacccaggtcg

SEQ ID NO: 26288 - DNA, 20 bp, Artificial sequence
  synthetic
gacgaccgatttgcacgtca

SEQ ID NO: 26289 - DNA, 20 bp, Artificial sequence
  synthetic
ggaccgctacggacctccac

SEQ ID NO: 26290 - DNA, 20 bp, Artificial sequence
  synthetic
cagagtttcctctggcttcg

SEQ ID NO: 26291 - DNA, 20 bp, Artificial sequence
  synthetic
tctggcttcgccctgcccag

SEQ ID NO: 26292 - DNA, 20 bp, Artificial sequence
  synthetic
tgctccacctccccggcgcg

SEQ ID NO: 26293 - DNA, 20 bp, Artificial sequence
  synthetic
tcggccggcgagcgcgccgg

SEQ ID NO: 26294 - DNA, 20 bp, Artificial sequence
  synthetic
ccttcaccttcattgcgcca

SEQ ID NO: 26295 - DNA, 20 bp, Artificial sequence
  synthetic
cggcggctttcgtgcgagcc

SEQ ID NO: 26296 - DNA, 20 bp, Artificial sequence
  synthetic
gcacgtgttagactccttgg

SEQ ID NO: 26297 - DNA, 20 bp, Artificial sequence
  synthetic
ggtggcccggcccccccacg

SEQ ID NO: 26298 - DNA, 20 bp, Artificial sequence
  synthetic
tgggcgccgggaggggggag

SEQ ID NO: 26299 - DNA, 20 bp, Artificial sequence
  synthetic
gcgagtgctgctgccggggg

SEQ ID NO: 26300 - DNA, 20 bp, Artificial sequence
  synthetic
acgcggggccggggggcgga

SEQ ID NO: 26301 - DNA, 20 bp, Artificial sequence
  synthetic
ggcgggaaagatccgccggg

SEQ ID NO: 26302 - DNA, 20 bp, Artificial sequence
  synthetic
gccgccgggttgaatcctcc

SEQ ID NO: 26303 - DNA, 20 bp, Artificial sequence
  synthetic
acccgtttacctcttaacgg

SEQ ID NO: 26304 - DNA, 20 bp, Artificial sequence
  synthetic
ctcttaacggtttcacgccc

SEQ ID NO: 26305 - DNA, 20 bp, Artificial sequence
  synthetic
tcttgaactctctcttcaaa

SEQ ID NO: 26306 - DNA, 20 bp, Artificial sequence
  synthetic
gttcttttcaactttccctt

SEQ ID NO: 26307 - DNA, 20 bp, Artificial sequence
  synthetic
actttcccttacggtacttg

SEQ ID NO: 26308 - DNA, 20 bp, Artificial sequence
  synthetic
acggtacttgttgactatcg

SEQ ID NO: 26309 - DNA, 20 bp, Artificial sequence
  synthetic
gtttaccacccgctttgggc

SEQ ID NO: 26310 - DNA, 20 bp, Artificial sequence
  synthetic
cgctttgggctgcattccca

SEQ ID NO: 26311 - DNA, 20 bp, Artificial sequence
  synthetic
acccgggccccgcgcgccgg

SEQ ID NO: 26312 - DNA, 20 bp, Artificial sequence
  synthetic
cgcgcgccgggggccgctac

SEQ ID NO: 26313 - DNA, 20 bp, Artificial sequence
  synthetic
gatcagaaggacttgggccc

SEQ ID NO: 26314 - DNA, 20 bp, Artificial sequence
  synthetic
cccacgagcggcgccgggga

SEQ ID NO: 26315 - DNA, 20 bp, Artificial sequence
  synthetic
cgtacgccacatgtcccgcg

SEQ ID NO: 26316 - DNA, 20 bp, Artificial sequence
  synthetic
atgtcccgcgccccgccgcg

SEQ ID NO: 26317 - DNA, 20 bp, Artificial sequence
  synthetic
aacattccgcgctaccgagt

SEQ ID NO: 26318 - DNA, 20 bp, Artificial sequence
  synthetic
tatctcgcttctgttatttt

SEQ ID NO: 26319 - DNA, 20 bp, Artificial sequence
  synthetic
cctgtgagggctacctgtgc

SEQ ID NO: 26320 - DNA, 20 bp, Artificial sequence
  synthetic
agtggagtcttgggagcgct

SEQ ID NO: 26321 - DNA, 20 bp, Artificial sequence
  synthetic
tgcaagagtaccatttgtcg

SEQ ID NO: 26322 - DNA, 20 bp, Artificial sequence
  synthetic
ttagattcctgaagcttctg

SEQ ID NO: 26323 - DNA, 20 bp, Artificial sequence
  synthetic
tggattcgccgccgtcctgc

SEQ ID NO: 26324 - DNA, 20 bp, Artificial sequence
  synthetic
gctgggtcctgtttactccc

SEQ ID NO: 26325 - DNA, 20 bp, Artificial sequence
  synthetic
ccttgtaagaacacagccag

SEQ ID NO: 26326 - DNA, 20 bp, Artificial sequence
  synthetic
ctgagtcgcgtggcaggccg

SEQ ID NO: 26327 - DNA, 20 bp, Artificial sequence
  synthetic
cctctgcccgtgctgctgct

SEQ ID NO: 26328 - DNA, 20 bp, Artificial sequence
  synthetic
gtcctgggaccacatgggga

SEQ ID NO: 26329 - DNA, 20 bp, Artificial sequence
  synthetic
agacctgcccccgctcttgc

SEQ ID NO: 26330 - DNA, 20 bp, Artificial sequence
  synthetic
agtgcctgaggcagagactg

SEQ ID NO: 26331 - DNA, 20 bp, Artificial sequence
  synthetic
tgaacttccaaccgtatgta

SEQ ID NO: 26332 - DNA, 20 bp, Artificial sequence
  synthetic
gcaggcccgatttgttgaag

SEQ ID NO: 26333 - DNA, 20 bp, Artificial sequence
  synthetic
gtgtgtgtgtgtgtgcatgc

SEQ ID NO: 26334 - DNA, 20 bp, Artificial sequence
  synthetic
tcaatcgggtactccctcca

SEQ ID NO: 26335 - DNA, 20 bp, Artificial sequence
  synthetic
aacttcctctttcaacaaca

SEQ ID NO: 26336 - DNA, 20 bp, Artificial sequence
  synthetic
gccatgctgctcttcctcct

SEQ ID NO: 26337 - DNA, 20 bp, Artificial sequence
  synthetic
gacaaagccacgccttgccc

SEQ ID NO: 26338 - DNA, 20 bp, Artificial sequence
  synthetic
acccgaaaggccggacctac

SEQ ID NO: 26339 - DNA, 20 bp, Artificial sequence
  synthetic
gagatccgctgtcccttgag

SEQ ID NO: 26340 - DNA, 20 bp, Artificial sequence
  synthetic
cctgccccgaactgcccacg

SEQ ID NO: 26341 - DNA, 20 bp, Artificial sequence
  synthetic
acaaagctcccgctgccatt

SEQ ID NO: 26342 - DNA, 20 bp, Artificial sequence
  synthetic
agcggctctttcagcattgg

SEQ ID NO: 26343 - DNA, 20 bp, Artificial sequence
  synthetic
aacagtggagaacctaacgt

SEQ ID NO: 26344 - DNA, 20 bp, Artificial sequence
  synthetic
gccccgcgcgtcctgcgccg

SEQ ID NO: 26345 - DNA, 20 bp, Artificial sequence
  synthetic
gatctcttggagacggcgac

SEQ ID NO: 26346 - DNA, 20 bp, Artificial sequence
  synthetic
tgcccgctccccagacacac

SEQ ID NO: 26347 - DNA, 20 bp, Artificial sequence
  synthetic
tgtgcctatccctgctgtcc

SEQ ID NO: 26348 - DNA, 20 bp, Artificial sequence
  synthetic
cacccgggatggagccatgt

SEQ ID NO: 26349 - DNA, 20 bp, Artificial sequence
  synthetic
cttccagcgaagtctactcc

SEQ ID NO: 26350 - DNA, 20 bp, Artificial sequence
  synthetic
ggcccagcctctcctctgtc

SEQ ID NO: 26351 - DNA, 20 bp, Artificial sequence
  synthetic
ttggagacgtagaaccgtta

SEQ ID NO: 26352 - DNA, 20 bp, Artificial sequence
  synthetic
cggctggcagaagggggtga

SEQ ID NO: 26353 - DNA, 20 bp, Artificial sequence
  synthetic
gcggcgctgagcgggtcccc

SEQ ID NO: 26354 - DNA, 20 bp, Artificial sequence
  synthetic
tagagactggacaggggaga

SEQ ID NO: 26355 - DNA, 20 bp, Artificial sequence
  synthetic
tatcaggttctcataccgga

SEQ ID NO: 26356 - DNA, 20 bp, Artificial sequence
  synthetic
gactcgcgggtatcggagct

SEQ ID NO: 26357 - DNA, 20 bp, Artificial sequence
  synthetic
gggagcacaagcgcttccgg

SEQ ID NO: 26358 - DNA, 20 bp, Artificial sequence
  synthetic
actcactgcacgccatgaac

SEQ ID NO: 26359 - DNA, 20 bp, Artificial sequence
  synthetic
gtctccgccggcgcccgccc

SEQ ID NO: 26360 - DNA, 20 bp, Artificial sequence
  synthetic
gacgaagctgccggccaatg

SEQ ID NO: 26361 - DNA, 20 bp, Artificial sequence
  synthetic
tcgcgggctcagctggttgg

SEQ ID NO: 26362 - DNA, 20 bp, Artificial sequence
  synthetic
cgcggctgcggtacggcgtg

SEQ ID NO: 26363 - DNA, 20 bp, Artificial sequence
  synthetic
gtgcgcggctgcggtacggc

SEQ ID NO: 26364 - DNA, 20 bp, Artificial sequence
  synthetic
caccggcccttacactgtgg

SEQ ID NO: 26365 - DNA, 20 bp, Artificial sequence
  synthetic
gagccccgagagacgccccg

SEQ ID NO: 26366 - DNA, 20 bp, Artificial sequence
  synthetic
cgccgacagcccgagaaacc

SEQ ID NO: 26367 - DNA, 20 bp, Artificial sequence
  synthetic
cgcagccacgggatgggtcg

SEQ ID NO: 26368 - DNA, 20 bp, Artificial sequence
  synthetic
tcatcggccaccccagaagc

SEQ ID NO: 26369 - DNA, 20 bp, Artificial sequence
  synthetic
actgggcggggagaccaagg

SEQ ID NO: 26370 - DNA, 20 bp, Artificial sequence
  synthetic
cgctggcgctctactcgtgc

SEQ ID NO: 26371 - DNA, 20 bp, Artificial sequence
  synthetic
ccagcgccgccgaagcagct

SEQ ID NO: 26372 - DNA, 20 bp, Artificial sequence
  synthetic
cctccaccggcccttgcagg

SEQ ID NO: 26373 - DNA, 20 bp, Artificial sequence
  synthetic
ctccaggccacgcgagccgg

SEQ ID NO: 26374 - DNA, 20 bp, Artificial sequence
  synthetic
ccgcgggtgtgagcgcgcgc

SEQ ID NO: 26375 - DNA, 20 bp, Artificial sequence
  synthetic
ccctctgaccccagcccgga

SEQ ID NO: 26376 - DNA, 20 bp, Artificial sequence
  synthetic
gacagggagcttccttggct

SEQ ID NO: 26377 - DNA, 20 bp, Artificial sequence
  synthetic
ctgggcagctgggcactggg

SEQ ID NO: 26378 - DNA, 20 bp, Artificial sequence
  synthetic
ttgttccctatcctgggcca

SEQ ID NO: 26379 - DNA, 20 bp, Artificial sequence
  synthetic
ccgggtccgggccattttcc

SEQ ID NO: 26380 - DNA, 20 bp, Artificial sequence
  synthetic
ttctgcagtcggcgctccct

SEQ ID NO: 26381 - DNA, 20 bp, Artificial sequence
  synthetic
ttgctgccctcacagacttg

SEQ ID NO: 26382 - DNA, 20 bp, Artificial sequence
  synthetic
tgatccacttcctcctcagg

SEQ ID NO: 26383 - DNA, 20 bp, Artificial sequence
  synthetic
caccggcggtaccagtaagt

SEQ ID NO: 26384 - DNA, 20 bp, Artificial sequence
  synthetic
gaaagccgccggcggggaat

SEQ ID NO: 26385 - DNA, 20 bp, Artificial sequence
  synthetic
actggggatcccgccgccgg

SEQ ID NO: 26386 - DNA, 20 bp, Artificial sequence
  synthetic
ctgtgttgaacggttcttgt

SEQ ID NO: 26387 - DNA, 20 bp, Artificial sequence
  synthetic
ggctcaccatggaccgccgg

SEQ ID NO: 26388 - DNA, 20 bp, Artificial sequence
  synthetic
cctgagccgggaccgctagg

SEQ ID NO: 26389 - DNA, 20 bp, Artificial sequence
  synthetic
accggccgccgggcctctgg

SEQ ID NO: 26390 - DNA, 20 bp, Artificial sequence
  synthetic
aggaggtgccggccgagcac

SEQ ID NO: 26391 - DNA, 20 bp, Artificial sequence
  synthetic
aaatagtgagatttccaatg

SEQ ID NO: 26392 - DNA, 20 bp, Artificial sequence
  synthetic
tctgcaccgtcatctcctgc

SEQ ID NO: 26393 - DNA, 20 bp, Artificial sequence
  synthetic
ccctgagagtctgagcgctc

SEQ ID NO: 26394 - DNA, 20 bp, Artificial sequence
  synthetic
gtaaagcgccacgcaagcag

SEQ ID NO: 26395 - DNA, 20 bp, Artificial sequence
  synthetic
gccgccgcctgccgcgcccc

SEQ ID NO: 26396 - DNA, 20 bp, Artificial sequence
  synthetic
tttttggatagggttgacgt

SEQ ID NO: 26397 - DNA, 20 bp, Artificial sequence
  synthetic
gggctgcgcgcgcttttggg

SEQ ID NO: 26398 - DNA, 20 bp, Artificial sequence
  synthetic
tccaccggcggcaaggctcc

SEQ ID NO: 26399 - DNA, 20 bp, Artificial sequence
  synthetic
cagccaccggttccttatcc

SEQ ID NO: 26400 - DNA, 20 bp, Artificial sequence
  synthetic
taactaggtggagtaggtgt

SEQ ID NO: 26401 - DNA, 20 bp, Artificial sequence
  synthetic
ctctccctctttcataccca

SEQ ID NO: 26402 - DNA, 20 bp, Artificial sequence
  synthetic
ccgttatttaatacctgtca

SEQ ID NO: 26403 - DNA, 20 bp, Artificial sequence
  synthetic
gtggccactgttggcttctg

SEQ ID NO: 26404 - DNA, 20 bp, Artificial sequence
  synthetic
ccagcacccagactccagca

SEQ ID NO: 26405 - DNA, 20 bp, Artificial sequence
  synthetic
cgcccggctgctcctcactt

SEQ ID NO: 26406 - DNA, 20 bp, Artificial sequence
  synthetic
gtggcggcgggcggcgggcg

SEQ ID NO: 26407 - DNA, 20 bp, Artificial sequence
  synthetic
gggaaacatctgccgttggt

SEQ ID NO: 26408 - DNA, 20 bp, Artificial sequence
  synthetic
cggtagctgccccctgagct

SEQ ID NO: 26409 - DNA, 20 bp, Artificial sequence
  synthetic
cagcacctcctgagaccggc

SEQ ID NO: 26410 - DNA, 20 bp, Artificial sequence
  synthetic
cgaaactctcagggttggca

SEQ ID NO: 26411 - DNA, 20 bp, Artificial sequence
  synthetic
cgtgttcgcgcctggtagag

SEQ ID NO: 26412 - DNA, 20 bp, Artificial sequence
  synthetic
cgcggggtccaagatggtgg

SEQ ID NO: 26413 - DNA, 20 bp, Artificial sequence
  synthetic
ggggtgagcgtccccgtccc

SEQ ID NO: 26414 - DNA, 20 bp, Artificial sequence
  synthetic
ggcgttatttttattaactg

SEQ ID NO: 26415 - DNA, 20 bp, Artificial sequence
  synthetic
cgcgtctcttcgccacattc

SEQ ID NO: 26416 - DNA, 20 bp, Artificial sequence
  synthetic
cccggccgtgcgcccagctt

SEQ ID NO: 26417 - DNA, 20 bp, Artificial sequence
  synthetic
ccctctcctataaagcagac

SEQ ID NO: 26418 - DNA, 20 bp, Artificial sequence
  synthetic
tggggtgcttggggcgcacc

SEQ ID NO: 26419 - DNA, 20 bp, Artificial sequence
  synthetic
ccccgcgccgcccgcgcccc

SEQ ID NO: 26420 - DNA, 20 bp, Artificial sequence
  synthetic
tctccaggcagcggccgtcg

SEQ ID NO: 26421 - DNA, 20 bp, Artificial sequence
  synthetic
gcttataacctgggatgggc

SEQ ID NO: 26422 - DNA, 20 bp, Artificial sequence
  synthetic
ctcaggaccctcgccatgaa

SEQ ID NO: 26423 - DNA, 20 bp, Artificial sequence
  synthetic
cccccatgtagaaggtgcac

SEQ ID NO: 26424 - DNA, 20 bp, Artificial sequence
  synthetic
gggatgcggggctgggaccc

SEQ ID NO: 26425 - DNA, 20 bp, Artificial sequence
  synthetic
cgcctcgagcggggtccgag

SEQ ID NO: 26426 - DNA, 20 bp, Artificial sequence
  synthetic
gcccgcctcccgcccgccct

SEQ ID NO: 26427 - DNA, 20 bp, Artificial sequence
  synthetic
tgggtgctgggaaggggcct

SEQ ID NO: 26428 - DNA, 20 bp, Artificial sequence
  synthetic
agccacagcccgacgcacgg

SEQ ID NO: 26429 - DNA, 20 bp, Artificial sequence
  synthetic
aagaaagacatggatgcata

SEQ ID NO: 26430 - DNA, 20 bp, Artificial sequence
  synthetic
aggaaaaaaaaatcccggga

SEQ ID NO: 26431 - DNA, 20 bp, Artificial sequence
  synthetic
gccttaagaacccggcaacc

SEQ ID NO: 26432 - DNA, 20 bp, Artificial sequence
  synthetic
ggaggggcggggaggtggac

SEQ ID NO: 26433 - DNA, 20 bp, Artificial sequence
  synthetic
atgtattgctgtgctctccg

SEQ ID NO: 26434 - DNA, 20 bp, Artificial sequence
  synthetic
caccttctctgcctccagtc

SEQ ID NO: 26435 - DNA, 20 bp, Artificial sequence
  synthetic
ctgccctgaaactctagtcg

SEQ ID NO: 26436 - DNA, 20 bp, Artificial sequence
  synthetic
ggtcgggtgccgtacgccga

SEQ ID NO: 26437 - DNA, 20 bp, Artificial sequence
  synthetic
gcccgggtgtagcgcatcac

SEQ ID NO: 26438 - DNA, 20 bp, Artificial sequence
  synthetic
gagaaaaccctgtcggtctt

SEQ ID NO: 26439 - DNA, 20 bp, Artificial sequence
  synthetic
gaggcagccgaaccctagcg

SEQ ID NO: 26440 - DNA, 20 bp, Artificial sequence
  synthetic
gggtgcccggccatgggctg

SEQ ID NO: 26441 - DNA, 20 bp, Artificial sequence
  synthetic
tgtatgggggacagcaggcg

SEQ ID NO: 26442 - DNA, 20 bp, Artificial sequence
  synthetic
gctggtcccctcagagggtt

SEQ ID NO: 26443 - DNA, 20 bp, Artificial sequence
  synthetic
ggcgttccagagagtgggga

SEQ ID NO: 26444 - DNA, 20 bp, Artificial sequence
  synthetic
ggggaggaggtttactcagc

SEQ ID NO: 26445 - DNA, 20 bp, Artificial sequence
  synthetic
acccgcaagcaagggggcgg

SEQ ID NO: 26446 - DNA, 20 bp, Artificial sequence
  synthetic
acatttaagtatcttcgacc

SEQ ID NO: 26447 - DNA, 20 bp, Artificial sequence
  synthetic
gccagcagctgcagcagcta

SEQ ID NO: 26448 - DNA, 20 bp, Artificial sequence
  synthetic
ctggggcgccggcgggtgcg

SEQ ID NO: 26449 - DNA, 20 bp, Artificial sequence
  synthetic
acacgttggactcgctgggc

SEQ ID NO: 26450 - DNA, 20 bp, Artificial sequence
  synthetic
ggtgcggtggcggaagtgca

SEQ ID NO: 26451 - DNA, 20 bp, Artificial sequence
  synthetic
gtgaaggcaaggtccctgga

SEQ ID NO: 26452 - DNA, 20 bp, Artificial sequence
  synthetic
aaatttctatcttcttttgt

SEQ ID NO: 26453 - DNA, 20 bp, Artificial sequence
  synthetic
gaaagactttctgggcaaaa

SEQ ID NO: 26454 - DNA, 20 bp, Artificial sequence
  synthetic
ccggagcatcctgcactgca

SEQ ID NO: 26455 - DNA, 20 bp, Artificial sequence
  synthetic
cgggagctggggagccaggg

SEQ ID NO: 26456 - DNA, 20 bp, Artificial sequence
  synthetic
ggggacagagcccctttttt

SEQ ID NO: 26457 - DNA, 20 bp, Artificial sequence
  synthetic
gcttcccaggcatggagaag

SEQ ID NO: 26458 - DNA, 20 bp, Artificial sequence
  synthetic
actttgattattggcaaata

SEQ ID NO: 26459 - DNA, 20 bp, Artificial sequence
  synthetic
gaggtgcaggcagagcagcc

SEQ ID NO: 26460 - DNA, 20 bp, Artificial sequence
  synthetic
gcgtcaccaccctgcccacc

SEQ ID NO: 26461 - DNA, 20 bp, Artificial sequence
  synthetic
caaggactaattggtcttta

SEQ ID NO: 26462 - DNA, 20 bp, Artificial sequence
  synthetic
gagtccatgaaggtccccgc

SEQ ID NO: 26463 - DNA, 20 bp, Artificial sequence
  synthetic
tcggtggtgagaggaagcct

SEQ ID NO: 26464 - DNA, 20 bp, Artificial sequence
  synthetic
ccactgcgcgccagcaggtc

SEQ ID NO: 26465 - DNA, 20 bp, Artificial sequence
  synthetic
ccaggttgctctgatgatat

SEQ ID NO: 26466 - DNA, 20 bp, Artificial sequence
  synthetic
cttggactttcgccgaaagt

SEQ ID NO: 26467 - DNA, 20 bp, Artificial sequence
  synthetic
tacttggagcactatctgga

SEQ ID NO: 26468 - DNA, 20 bp, Artificial sequence
  synthetic
ttttcagagtagttcacaac

SEQ ID NO: 26469 - DNA, 20 bp, Artificial sequence
  synthetic
agaagaagaacccatgaagg

SEQ ID NO: 26470 - DNA, 20 bp, Artificial sequence
  synthetic
gaagtaccgcgagcaaggag

SEQ ID NO: 26471 - DNA, 20 bp, Artificial sequence
  synthetic
gcccccaggacccctgggga

SEQ ID NO: 26472 - DNA, 20 bp, Artificial sequence
  synthetic
agtccagaagcaagacctgt

SEQ ID NO: 26473 - DNA, 20 bp, Artificial sequence
  synthetic
ctcccctttctcgcccagcg

SEQ ID NO: 26474 - DNA, 20 bp, Artificial sequence
  synthetic
tgcggccgctgccccagggc

SEQ ID NO: 26475 - DNA, 20 bp, Artificial sequence
  synthetic
agtgcagccactgccgccgc

SEQ ID NO: 26476 - DNA, 20 bp, Artificial sequence
  synthetic
gccttttccctcgggtagta

SEQ ID NO: 26477 - DNA, 20 bp, Artificial sequence
  synthetic
caacgatgactcctgggaag

SEQ ID NO: 26478 - DNA, 20 bp, Artificial sequence
  synthetic
agccctgactacagctcttg

SEQ ID NO: 26479 - DNA, 20 bp, Artificial sequence
  synthetic
cggccggcctcgggcaccgg

SEQ ID NO: 26480 - DNA, 20 bp, Artificial sequence
  synthetic
ggcgtgtgaagataacccaa

SEQ ID NO: 26481 - DNA, 20 bp, Artificial sequence
  synthetic
gtacctttgcactccagcct

SEQ ID NO: 26482 - DNA, 20 bp, Artificial sequence
  synthetic
acgcagggctctcccaagtt

SEQ ID NO: 26483 - DNA, 20 bp, Artificial sequence
  synthetic
gagtgaagcatacagtcaaa

SEQ ID NO: 26484 - DNA, 20 bp, Artificial sequence
  synthetic
gataggagcaacatgcatgt

SEQ ID NO: 26485 - DNA, 20 bp, Artificial sequence
  synthetic
catccgagcatgaaacgctg

SEQ ID NO: 26486 - DNA, 20 bp, Artificial sequence
  synthetic
caagtgaaagagattagtcc

SEQ ID NO: 26487 - DNA, 20 bp, Artificial sequence
  synthetic
gcaggacccaggcagaaaag

SEQ ID NO: 26488 - DNA, 20 bp, Artificial sequence
  synthetic
ctgccatcttctccgcgcta

SEQ ID NO: 26489 - DNA, 20 bp, Artificial sequence
  synthetic
ctcccctgccctctaaaacc

SEQ ID NO: 26490 - DNA, 20 bp, Artificial sequence
  synthetic
cttcagagtttgaaaaaaaa

SEQ ID NO: 26491 - DNA, 20 bp, Artificial sequence
  synthetic
tcctttataaagcctggctc

SEQ ID NO: 26492 - DNA, 20 bp, Artificial sequence
  synthetic
gggctgctgtggctgttctg

SEQ ID NO: 26493 - DNA, 20 bp, Artificial sequence
  synthetic
gattaacagatgaccccaat

SEQ ID NO: 26494 - DNA, 20 bp, Artificial sequence
  synthetic
gcccatggatgagaaattga

SEQ ID NO: 26495 - DNA, 20 bp, Artificial sequence
  synthetic
aggagaagtaaggccctgga

SEQ ID NO: 26496 - DNA, 20 bp, Artificial sequence
  synthetic
ttgaggggctcttcgatgac

SEQ ID NO: 26497 - DNA, 20 bp, Artificial sequence
  synthetic
atgccgcctacgtgccccct

SEQ ID NO: 26498 - DNA, 20 bp, Artificial sequence
  synthetic
ataaagagaaagactcttat

SEQ ID NO: 26499 - DNA, 20 bp, Artificial sequence
  synthetic
cgttacttctgctgtggaag

SEQ ID NO: 26500 - DNA, 20 bp, Artificial sequence
  synthetic
gtgagaaggggagcaaggga

SEQ ID NO: 26501 - DNA, 20 bp, Artificial sequence
  synthetic
agatggagaggctggcccca

SEQ ID NO: 26502 - DNA, 20 bp, Artificial sequence
  synthetic
ctgcaggaccacctgctgga

SEQ ID NO: 26503 - DNA, 20 bp, Artificial sequence
  synthetic
ccaagttcaaggtcaccttc

SEQ ID NO: 26504 - DNA, 20 bp, Artificial sequence
  synthetic
tactatgtaaggaattgtcg

SEQ ID NO: 26505 - DNA, 20 bp, Artificial sequence
  synthetic
cctccttggtagggatcctc

SEQ ID NO: 26506 - DNA, 20 bp, Artificial sequence
  synthetic
ctccagcatggccgcctcca

SEQ ID NO: 26507 - DNA, 20 bp, Artificial sequence
  synthetic
gcccaccaagaagaaagcag

SEQ ID NO: 26508 - DNA, 20 bp, Artificial sequence
  synthetic
gagacttttctccctgaagt

SEQ ID NO: 26509 - DNA, 20 bp, Artificial sequence
  synthetic
gaggtgactgaagcgagcct

SEQ ID NO: 26510 - DNA, 20 bp, Artificial sequence
  synthetic
acggacggtggacgctggga

SEQ ID NO: 26511 - DNA, 20 bp, Artificial sequence
  synthetic
tccctgcaccatgccctaca

SEQ ID NO: 26512 - DNA, 20 bp, Artificial sequence
  synthetic
aacattttgggaggacgaag

SEQ ID NO: 26513 - DNA, 20 bp, Artificial sequence
  synthetic
gcaccatgtcttacagttgt

SEQ ID NO: 26514 - DNA, 20 bp, Artificial sequence
  synthetic
gatgggaggatgctcagggt

SEQ ID NO: 26515 - DNA, 20 bp, Artificial sequence
  synthetic
tgggttcgtgcgccttctac

SEQ ID NO: 26516 - DNA, 20 bp, Artificial sequence
  synthetic
tgctcccggtgccatgaacg

SEQ ID NO: 26517 - DNA, 20 bp, Artificial sequence
  synthetic
gacactccctaatgaaaaag

SEQ ID NO: 26518 - DNA, 20 bp, Artificial sequence
  synthetic
tcctcttgcccgcgcaggca

SEQ ID NO: 26519 - DNA, 20 bp, Artificial sequence
  synthetic
aaatcaaacctttgagaagc

SEQ ID NO: 26520 - DNA, 20 bp, Artificial sequence
  synthetic
gagggccctgcgccgccttt

SEQ ID NO: 26521 - DNA, 20 bp, Artificial sequence
  synthetic
gcgctggcggagacgccggc

SEQ ID NO: 26522 - DNA, 20 bp, Artificial sequence
  synthetic
tccttcccagccgcgcggct

SEQ ID NO: 26523 - DNA, 20 bp, Artificial sequence
  synthetic
tctgaaattcatcacctctc

SEQ ID NO: 26524 - DNA, 20 bp, Artificial sequence
  synthetic
ccgctgccgccgtcacccgc

SEQ ID NO: 26525 - DNA, 20 bp, Artificial sequence
  synthetic
cacatagccgagcccgacgg

SEQ ID NO: 26526 - DNA, 20 bp, Artificial sequence
  synthetic
ggtctgggtcggccacacag

SEQ ID NO: 26527 - DNA, 20 bp, Artificial sequence
  synthetic
tccacattcctctgtgggct

SEQ ID NO: 26528 - DNA, 20 bp, Artificial sequence
  synthetic
caacagccgacttagatgtg

SEQ ID NO: 26529 - DNA, 20 bp, Artificial sequence
  synthetic
aggtccggcacctgctgcgc

SEQ ID NO: 26530 - DNA, 20 bp, Artificial sequence
  synthetic
cgccgcgggaacgctgtcct

SEQ ID NO: 26531 - DNA, 20 bp, Artificial sequence
  synthetic
gatcgtctgctccctcagcc

SEQ ID NO: 26532 - DNA, 20 bp, Artificial sequence
  synthetic
ccaggctgggagcatcccct

SEQ ID NO: 26533 - DNA, 20 bp, Artificial sequence
  synthetic
cggccccacgcttcccactt

SEQ ID NO: 26534 - DNA, 20 bp, Artificial sequence
  synthetic
tctctgggccaggtggaacc

SEQ ID NO: 26535 - DNA, 20 bp, Artificial sequence
  synthetic
gtacctgcacttatttattg

SEQ ID NO: 26536 - DNA, 20 bp, Artificial sequence
  synthetic
ttgctggaggggctaccagg

SEQ ID NO: 26537 - DNA, 20 bp, Artificial sequence
  synthetic
agtaacaccatcaggtccta

SEQ ID NO: 26538 - DNA, 20 bp, Artificial sequence
  synthetic
ggagagactggacctaaatg

SEQ ID NO: 26539 - DNA, 20 bp, Artificial sequence
  synthetic
gaatatttgagattgaagat

SEQ ID NO: 26540 - DNA, 20 bp, Artificial sequence
  synthetic
ccagctctgagatttccagc

SEQ ID NO: 26541 - DNA, 20 bp, Artificial sequence
  synthetic
tccttcccctgaccagccca

SEQ ID NO: 26542 - DNA, 20 bp, Artificial sequence
  synthetic
ctctcagcttcagagggaaa

SEQ ID NO: 26543 - DNA, 20 bp, Artificial sequence
  synthetic
gaccctacagcttggggcct

SEQ ID NO: 26544 - DNA, 20 bp, Artificial sequence
  synthetic
gtcccgagcgcgatgacttg

SEQ ID NO: 26545 - DNA, 20 bp, Artificial sequence
  synthetic
aggtctgaattccagactcc

SEQ ID NO: 26546 - DNA, 20 bp, Artificial sequence
  synthetic
gcggatcccgagagggaaag

SEQ ID NO: 26547 - DNA, 20 bp, Artificial sequence
  synthetic
tccggcagcttctcgcggct

SEQ ID NO: 26548 - DNA, 20 bp, Artificial sequence
  synthetic
tggactccctgctgagcaag

SEQ ID NO: 26549 - DNA, 20 bp, Artificial sequence
  synthetic
gactgcactgcttctcccag

SEQ ID NO: 26550 - DNA, 20 bp, Artificial sequence
  synthetic
ccctgcccaccttcctcacc

SEQ ID NO: 26551 - DNA, 20 bp, Artificial sequence
  synthetic
gcccctcctccctggtttga

SEQ ID NO: 26552 - DNA, 20 bp, Artificial sequence
  synthetic
ctttcgtaaccgcaccacac

SEQ ID NO: 26553 - DNA, 20 bp, Artificial sequence
  synthetic
tcatcctaggcctcaggagc

SEQ ID NO: 26554 - DNA, 20 bp, Artificial sequence
  synthetic
gcggggcgctccggggaggc

SEQ ID NO: 26555 - DNA, 20 bp, Artificial sequence
  synthetic
accagaggctgctctgcttg

SEQ ID NO: 26556 - DNA, 20 bp, Artificial sequence
  synthetic
tgggctctgggcggtgccaa

SEQ ID NO: 26557 - DNA, 20 bp, Artificial sequence
  synthetic
ccaccatgccacccatgctg

SEQ ID NO: 26558 - DNA, 20 bp, Artificial sequence
  synthetic
agcaccggggcatccccggg

SEQ ID NO: 26559 - DNA, 20 bp, Artificial sequence
  synthetic
cctttcctctctgcctctgg

SEQ ID NO: 26560 - DNA, 20 bp, Artificial sequence
  synthetic
ccgcacccggttcagctcgc

SEQ ID NO: 26561 - DNA, 20 bp, Artificial sequence
  synthetic
ggccccttccccgcgggcgt

SEQ ID NO: 26562 - DNA, 20 bp, Artificial sequence
  synthetic
aacaccccagggagtgaaag

SEQ ID NO: 26563 - DNA, 20 bp, Artificial sequence
  synthetic
ctcaggtctgcagctgggtc

SEQ ID NO: 26564 - DNA, 20 bp, Artificial sequence
  synthetic
gatgggagagaaaggccagg

SEQ ID NO: 26565 - DNA, 20 bp, Artificial sequence
  synthetic
ggggagactctgcaggagcc

SEQ ID NO: 26566 - DNA, 20 bp, Artificial sequence
  synthetic
cgcggattgtgcacagttct

SEQ ID NO: 26567 - DNA, 20 bp, Artificial sequence
  synthetic
tggcccaaccatgcctctgt

SEQ ID NO: 26568 - DNA, 20 bp, Artificial sequence
  synthetic
ggcttcggccgccggggcca

SEQ ID NO: 26569 - DNA, 20 bp, Artificial sequence
  synthetic
tgtgtcccacccttcctagc

SEQ ID NO: 26570 - DNA, 20 bp, Artificial sequence
  synthetic
ggaaaagtgcccttgagcct

SEQ ID NO: 26571 - DNA, 20 bp, Artificial sequence
  synthetic
ctgcggacattcagggatcg

SEQ ID NO: 26572 - DNA, 20 bp, Artificial sequence
  synthetic
ggggtcacagctggccactg

SEQ ID NO: 26573 - DNA, 20 bp, Artificial sequence
  synthetic
cactctccctcgagcgccgc

SEQ ID NO: 26574 - DNA, 20 bp, Artificial sequence
  synthetic
caggaggactacttccagca

SEQ ID NO: 26575 - DNA, 20 bp, Artificial sequence
  synthetic
tacacccaccgaggcatggg

SEQ ID NO: 26576 - DNA, 20 bp, Artificial sequence
  synthetic
gcggatccccagccgtccct

SEQ ID NO: 26577 - DNA, 20 bp, Artificial sequence
  synthetic
cgcaccaccccccctcccgc

SEQ ID NO: 26578 - DNA, 20 bp, Artificial sequence
  synthetic
ttggctgcatttctggcctc

SEQ ID NO: 26579 - DNA, 20 bp, Artificial sequence
  synthetic
ctcttactccaaaaagatgg

SEQ ID NO: 26580 - DNA, 20 bp, Artificial sequence
  synthetic
gatggagccgttcctcagga

SEQ ID NO: 26581 - DNA, 20 bp, Artificial sequence
  synthetic
gtcctggccggataccgcgc

SEQ ID NO: 26582 - DNA, 20 bp, Artificial sequence
  synthetic
tttaacgagcagacgccccc

SEQ ID NO: 26583 - DNA, 20 bp, Artificial sequence
  synthetic
ctgggctgccggtgacctgg

SEQ ID NO: 26584 - DNA, 20 bp, Artificial sequence
  synthetic
ctcagcttcgagccgaggtg

SEQ ID NO: 26585 - DNA, 20 bp, Artificial sequence
  synthetic
ccgcggaggagcaggagagg

SEQ ID NO: 26586 - DNA, 20 bp, Artificial sequence
  synthetic
atggcgggagctccggacga

SEQ ID NO: 26587 - DNA, 20 bp, Artificial sequence
  synthetic
actcggattgctctccgccc

SEQ ID NO: 26588 - DNA, 20 bp, Artificial sequence
  synthetic
cttccgtcgctccttgccgg

SEQ ID NO: 26589 - DNA, 20 bp, Artificial sequence
  synthetic
ctgggagccgaggcgtcggt

SEQ ID NO: 26590 - DNA, 20 bp, Artificial sequence
  synthetic
gaagcagtaccttgaagaga

SEQ ID NO: 26591 - DNA, 20 bp, Artificial sequence
  synthetic
ccgtgtccgcgaccgcgtac

SEQ ID NO: 26592 - DNA, 20 bp, Artificial sequence
  synthetic
tccggcgggcgtgttgggtg

SEQ ID NO: 26593 - DNA, 20 bp, Artificial sequence
  synthetic
ctagcccctaaccatgggcc

SEQ ID NO: 26594 - DNA, 20 bp, Artificial sequence
  synthetic
cccacaggcgtgaacctgct

SEQ ID NO: 26595 - DNA, 20 bp, Artificial sequence
  synthetic
gccgtgccgggggctaactg

SEQ ID NO: 26596 - DNA, 20 bp, Artificial sequence
  synthetic
ccttggagccaccgccccct

SEQ ID NO: 26597 - DNA, 20 bp, Artificial sequence
  synthetic
gggactggtctgaagagacg

SEQ ID NO: 26598 - DNA, 20 bp, Artificial sequence
  synthetic
atgcggccgtgagccggcgg

SEQ ID NO: 26599 - DNA, 20 bp, Artificial sequence
  synthetic
tggataaagacctcctgaaa

SEQ ID NO: 26600 - DNA, 20 bp, Artificial sequence
  synthetic
caccggcaaaggctgtctag

SEQ ID NO: 26601 - DNA, 20 bp, Artificial sequence
  synthetic
caacaccccacccggcggga

SEQ ID NO: 26602 - DNA, 20 bp, Artificial sequence
  synthetic
cggtgggttcgggaacctgt

SEQ ID NO: 26603 - DNA, 20 bp, Artificial sequence
  synthetic
ggtccgatctggacgaacgc

SEQ ID NO: 26604 - DNA, 20 bp, Artificial sequence
  synthetic
cccttgacccagtggatatc

SEQ ID NO: 26605 - DNA, 20 bp, Artificial sequence
  synthetic
gtttcctctccgcgtactcg

SEQ ID NO: 26606 - DNA, 20 bp, Artificial sequence
  synthetic
gcaggcgactcctgtcccgg

SEQ ID NO: 26607 - DNA, 20 bp, Artificial sequence
  synthetic
ctttccttcgcgtcctgaac

SEQ ID NO: 26608 - DNA, 20 bp, Artificial sequence
  synthetic
ttgttgacactgcgagcact

SEQ ID NO: 26609 - DNA, 20 bp, Artificial sequence
  synthetic
caaggggcggccggcgagtc

SEQ ID NO: 26610 - DNA, 20 bp, Artificial sequence
  synthetic
cgaaggtcccggagcgttca

SEQ ID NO: 26611 - DNA, 20 bp, Artificial sequence
  synthetic
ttcgcacggccacaggggcg

SEQ ID NO: 26612 - DNA, 20 bp, Artificial sequence
  synthetic
ggtccgcgtgggcgctgggg

SEQ ID NO: 26613 - DNA, 20 bp, Artificial sequence
  synthetic
cttccttgaaaaacccggcg

SEQ ID NO: 26614 - DNA, 20 bp, Artificial sequence
  synthetic
tggagcaggcagggcagtct

SEQ ID NO: 26615 - DNA, 20 bp, Artificial sequence
  synthetic
gaaagggtctagccatgctg

SEQ ID NO: 26616 - DNA, 20 bp, Artificial sequence
  synthetic
caagtctctcctccctagcg

SEQ ID NO: 26617 - DNA, 20 bp, Artificial sequence
  synthetic
gagcgtcccgagacttcttc

SEQ ID NO: 26618 - DNA, 20 bp, Artificial sequence
  synthetic
ctgcgtgctgcagtagcgcc

SEQ ID NO: 26619 - DNA, 20 bp, Artificial sequence
  synthetic
gcgcaactgagaggaactga

SEQ ID NO: 26620 - DNA, 20 bp, Artificial sequence
  synthetic
gagctgggacgggcggcggc

SEQ ID NO: 26621 - DNA, 20 bp, Artificial sequence
  synthetic
gatgcagcgccccgggccct

SEQ ID NO: 26622 - DNA, 20 bp, Artificial sequence
  synthetic
tcagaggtaaggagaatttt

SEQ ID NO: 26623 - DNA, 20 bp, Artificial sequence
  synthetic
ggggcggctgtggagcctgt

SEQ ID NO: 26624 - DNA, 20 bp, Artificial sequence
  synthetic
gtcagagagcccgcggctta

SEQ ID NO: 26625 - DNA, 20 bp, Artificial sequence
  synthetic
tgtgagtgggaggcggcggc

SEQ ID NO: 26626 - DNA, 20 bp, Artificial sequence
  synthetic
tgtggtggtgtgagtgggag

SEQ ID NO: 26627 - DNA, 20 bp, Artificial sequence
  synthetic
ctcccgcgcggctgactcca

SEQ ID NO: 26628 - DNA, 20 bp, Artificial sequence
  synthetic
gcacggggggcgcgggagga

SEQ ID NO: 26629 - DNA, 20 bp, Artificial sequence
  synthetic
cgtgtgctcggcctttctgt

SEQ ID NO: 26630 - DNA, 20 bp, Artificial sequence
  synthetic
ctctgctgaggatggaagtg

SEQ ID NO: 26631 - DNA, 20 bp, Artificial sequence
  synthetic
gttttcggctctgaagaggt

SEQ ID NO: 26632 - DNA, 20 bp, Artificial sequence
  synthetic
gctcgggcggagctggagac

SEQ ID NO: 26633 - DNA, 20 bp, Artificial sequence
  synthetic
acgggtgcgtccgggcggct

SEQ ID NO: 26634 - DNA, 20 bp, Artificial sequence
  synthetic
ggtggctgtggcggtggcgc

SEQ ID NO: 26635 - DNA, 20 bp, Artificial sequence
  synthetic
gagactctgcgctccggcgg

SEQ ID NO: 26636 - DNA, 20 bp, Artificial sequence
  synthetic
accccgggacagtccctctc

SEQ ID NO: 26637 - DNA, 20 bp, Artificial sequence
  synthetic
aggcggcgcgggggctgctg

SEQ ID NO: 26638 - DNA, 20 bp, Artificial sequence
  synthetic
gcggctgacagcagcagcgg

SEQ ID NO: 26639 - DNA, 20 bp, Artificial sequence
  synthetic
tcctgggaatcttcaatcac

SEQ ID NO: 26640 - DNA, 20 bp, Artificial sequence
  synthetic
gtttgtctgtgtttctggac

SEQ ID NO: 26641 - DNA, 20 bp, Artificial sequence
  synthetic
cgaccagtgctgcgatcccg

SEQ ID NO: 26642 - DNA, 20 bp, Artificial sequence
  synthetic
gcacctggtgactgggaagc

SEQ ID NO: 26643 - DNA, 20 bp, Artificial sequence
  synthetic
tggctctttctcttcttggg

SEQ ID NO: 26644 - DNA, 20 bp, Artificial sequence
  synthetic
aaagagcaagcactgaggcc

SEQ ID NO: 26645 - DNA, 20 bp, Artificial sequence
  synthetic
acctgcgcccggaggtcgcc

SEQ ID NO: 26646 - DNA, 20 bp, Artificial sequence
  synthetic
tggtcttgaactcagggtcc

SEQ ID NO: 26647 - DNA, 20 bp, Artificial sequence
  synthetic
gcaggcgccgacgctgcggc

SEQ ID NO: 26648 - DNA, 20 bp, Artificial sequence
  synthetic
ccgtcgttgacgttagtcgc

SEQ ID NO: 26649 - DNA, 20 bp, Artificial sequence
  synthetic
cctaaacttcagcttctcag

SEQ ID NO: 26650 - DNA, 20 bp, Artificial sequence
  synthetic
tgtgcggggcgctgagcctg

SEQ ID NO: 26651 - DNA, 20 bp, Artificial sequence
  synthetic
acgcatctgcctttttttcc

SEQ ID NO: 26652 - DNA, 20 bp, Artificial sequence
  synthetic
aagtcagcattggcgcccct

SEQ ID NO: 26653 - DNA, 20 bp, Artificial sequence
  synthetic
atttgagccgctgttgagat

SEQ ID NO: 26654 - DNA, 20 bp, Artificial sequence
  synthetic
taaagacaaggattggatta

SEQ ID NO: 26655 - DNA, 20 bp, Artificial sequence
  synthetic
tggggctgggttcctctctt

SEQ ID NO: 26656 - DNA, 20 bp, Artificial sequence
  synthetic
gcacctagacctggggccag

SEQ ID NO: 26657 - DNA, 20 bp, Artificial sequence
  synthetic
caagatggcagcaatgagga

SEQ ID NO: 26658 - DNA, 20 bp, Artificial sequence
  synthetic
acacaccagccctcagtcac

SEQ ID NO: 26659 - DNA, 20 bp, Artificial sequence
  synthetic
gaaatttaccactctcctct

SEQ ID NO: 26660 - DNA, 20 bp, Artificial sequence
  synthetic
catttgcatggtggccctgt

SEQ ID NO: 26661 - DNA, 20 bp, Artificial sequence
  synthetic
agagagccagcatcttggca

SEQ ID NO: 26662 - DNA, 20 bp, Artificial sequence
  synthetic
tactgtggtttagggcttgg

SEQ ID NO: 26663 - DNA, 20 bp, Artificial sequence
  synthetic
gtgaaaactttgaggattac

SEQ ID NO: 26664 - DNA, 20 bp, Artificial sequence
  synthetic
gccaccctgccctgcccacc

SEQ ID NO: 26665 - DNA, 20 bp, Artificial sequence
  synthetic
tggcaacgcagtacacaagt

SEQ ID NO: 26666 - DNA, 20 bp, Artificial sequence
  synthetic
ccaaatctctttttgatttt

SEQ ID NO: 26667 - DNA, 20 bp, Artificial sequence
  synthetic
cttagagcttgagagtcaaa

SEQ ID NO: 26668 - DNA, 20 bp, Artificial sequence
  synthetic
tgcttaggctccgcggcctc

SEQ ID NO: 26669 - DNA, 20 bp, Artificial sequence
  synthetic
gggaacccgtgcggctggag

SEQ ID NO: 26670 - DNA, 20 bp, Artificial sequence
  synthetic
tttggaatctggcaaccatt

SEQ ID NO: 26671 - DNA, 20 bp, Artificial sequence
  synthetic
ttacaatcacaagcttttac

SEQ ID NO: 26672 - DNA, 20 bp, Artificial sequence
  synthetic
gagcgccggggctcccggag

SEQ ID NO: 26673 - DNA, 20 bp, Artificial sequence
  synthetic
cctccttggccaaggccagg

SEQ ID NO: 26674 - DNA, 20 bp, Artificial sequence
  synthetic
tgtatttcgggtcttgctgg

SEQ ID NO: 26675 - DNA, 20 bp, Artificial sequence
  synthetic
ccgggagacttccggcaggg

SEQ ID NO: 26676 - DNA, 20 bp, Artificial sequence
  synthetic
aatgtggagctaggatcaag

SEQ ID NO: 26677 - DNA, 20 bp, Artificial sequence
  synthetic
atttctgtgtgcaggcgagc

SEQ ID NO: 26678 - DNA, 20 bp, Artificial sequence
  synthetic
ttatcactgcacctcttgcc

SEQ ID NO: 26679 - DNA, 20 bp, Artificial sequence
  synthetic
gatgtggcagactttgctcc

SEQ ID NO: 26680 - DNA, 20 bp, Artificial sequence
  synthetic
agcgggagagacaaaagtcg

SEQ ID NO: 26681 - DNA, 20 bp, Artificial sequence
  synthetic
gttttctttgctaagattat

SEQ ID NO: 26682 - DNA, 20 bp, Artificial sequence
  synthetic
aaagtgtttgaaaatgaaca

SEQ ID NO: 26683 - DNA, 20 bp, Artificial sequence
  synthetic
atggctcaggttgtgcgcag

SEQ ID NO: 26684 - DNA, 20 bp, Artificial sequence
  synthetic
aggagacttgacagcttaaa

SEQ ID NO: 26685 - DNA, 20 bp, Artificial sequence
  synthetic
ggtgtcggaggagaactgtg

SEQ ID NO: 26686 - DNA, 20 bp, Artificial sequence
  synthetic
taactggttcggcatgttcc

SEQ ID NO: 26687 - DNA, 20 bp, Artificial sequence
  synthetic
ttctttgaattccgtggtcc

SEQ ID NO: 26688 - DNA, 20 bp, Artificial sequence
  synthetic
actctgaggagcagttggag

SEQ ID NO: 26689 - DNA, 20 bp, Artificial sequence
  synthetic
tgtctgctcgggacacggct

SEQ ID NO: 26690 - DNA, 20 bp, Artificial sequence
  synthetic
ctgtggctacaggcttcagc

SEQ ID NO: 26691 - DNA, 20 bp, Artificial sequence
  synthetic
gaacaaggcagcggctcctt

SEQ ID NO: 26692 - DNA, 20 bp, Artificial sequence
  synthetic
tctctggcttctcagccttc

SEQ ID NO: 26693 - DNA, 20 bp, Artificial sequence
  synthetic
acttctttccccctttgcag

SEQ ID NO: 26694 - DNA, 20 bp, Artificial sequence
  synthetic
tggtgggcctcttcagtcac

SEQ ID NO: 26695 - DNA, 20 bp, Artificial sequence
  synthetic
gcttctcctcctttggtgag

SEQ ID NO: 26696 - DNA, 20 bp, Artificial sequence
  synthetic
gtgaggagatggaagaggaa

SEQ ID NO: 26697 - DNA, 20 bp, Artificial sequence
  synthetic
tgcccgtatctatcgtggcg

SEQ ID NO: 26698 - DNA, 20 bp, Artificial sequence
  synthetic
agccatgaggatgcttctgc

SEQ ID NO: 26699 - DNA, 20 bp, Artificial sequence
  synthetic
gcatcgccgccgccagagga

SEQ ID NO: 26700 - DNA, 20 bp, Artificial sequence
  synthetic
ttggactccgcccgtggagc

SEQ ID NO: 26701 - DNA, 20 bp, Artificial sequence
  synthetic
tttctgattgataggctttg

SEQ ID NO: 26702 - DNA, 20 bp, Artificial sequence
  synthetic
aaaaatgagggagagagaaa

SEQ ID NO: 26703 - DNA, 20 bp, Artificial sequence
  synthetic
acgttggaagaagacctggc

SEQ ID NO: 26704 - DNA, 20 bp, Artificial sequence
  synthetic
agattggcagggataagcag

SEQ ID NO: 26705 - DNA, 20 bp, Artificial sequence
  synthetic
acatccaacaagatcggcgt

SEQ ID NO: 26706 - DNA, 20 bp, Artificial sequence
  synthetic
aactccttgtgctagctgtg

SEQ ID NO: 26707 - DNA, 20 bp, Artificial sequence
  synthetic
tttctgttgcgggaagctcc

SEQ ID NO: 26708 - DNA, 20 bp, Artificial sequence
  synthetic
ttccagtgggcctgggccca

SEQ ID NO: 26709 - DNA, 20 bp, Artificial sequence
  synthetic
tgttgcacctgttcctccct

SEQ ID NO: 26710 - DNA, 20 bp, Artificial sequence
  synthetic
tctgccttcccagtgcataa

SEQ ID NO: 26711 - DNA, 20 bp, Artificial sequence
  synthetic
acctcagccagagtccggga

SEQ ID NO: 26712 - DNA, 20 bp, Artificial sequence
  synthetic
gcaaggcagacttcgtgctg

SEQ ID NO: 26713 - DNA, 20 bp, Artificial sequence
  synthetic
ttcgtttcttgccagatttg

SEQ ID NO: 26714 - DNA, 20 bp, Artificial sequence
  synthetic
tcgaccccagccagcgcagc

SEQ ID NO: 26715 - DNA, 20 bp, Artificial sequence
  synthetic
taaacatggccgtcaccgac

SEQ ID NO: 26716 - DNA, 20 bp, Artificial sequence
  synthetic
ggacaaccttctcctgacag

SEQ ID NO: 26717 - DNA, 20 bp, Artificial sequence
  synthetic
ggcctggtgtgaatgctccg

SEQ ID NO: 26718 - DNA, 20 bp, Artificial sequence
  synthetic
cgctcgactggcctaggagc

SEQ ID NO: 26719 - DNA, 20 bp, Artificial sequence
  synthetic
cctttccttctgctgctact

SEQ ID NO: 26720 - DNA, 20 bp, Artificial sequence
  synthetic
ggagtggagcttggtttcgg

SEQ ID NO: 26721 - DNA, 20 bp, Artificial sequence
  synthetic
caggcacccgtgtggctgcc

SEQ ID NO: 26722 - DNA, 20 bp, Artificial sequence
  synthetic
cctgtctaccatgttctctg

SEQ ID NO: 26723 - DNA, 20 bp, Artificial sequence
  synthetic
ggctgactcaactgaaatca

SEQ ID NO: 26724 - DNA, 20 bp, Artificial sequence
  synthetic
gtggtctgtacaggcggcac

SEQ ID NO: 26725 - DNA, 20 bp, Artificial sequence
  synthetic
gcagctcatggagaggctga

SEQ ID NO: 26726 - DNA, 20 bp, Artificial sequence
  synthetic
taagaagccgccccaactcc

SEQ ID NO: 26727 - DNA, 20 bp, Artificial sequence
  synthetic
tgtatgcacaaagcagggtc

SEQ ID NO: 26728 - DNA, 20 bp, Artificial sequence
  synthetic
tcgttagcaccctttagcgt

SEQ ID NO: 26729 - DNA, 20 bp, Artificial sequence
  synthetic
acgagagatccaatgaaagt

SEQ ID NO: 26730 - DNA, 20 bp, Artificial sequence
  synthetic
gctaatacaacaaatagcaa

SEQ ID NO: 26731 - DNA, 20 bp, Artificial sequence
  synthetic
actcggcctataaacatcag

SEQ ID NO: 26732 - DNA, 20 bp, Artificial sequence
  synthetic
cgcatctgagccagccacgc

SEQ ID NO: 26733 - DNA, 20 bp, Artificial sequence
  synthetic
tagtagatggattacacggt

SEQ ID NO: 26734 - DNA, 20 bp, Artificial sequence
  synthetic
tcggtgtaccccccccggtg

SEQ ID NO: 26735 - DNA, 20 bp, Artificial sequence
  synthetic
cacgcgcggtctctgcggaa

SEQ ID NO: 26736 - DNA, 20 bp, Artificial sequence
  synthetic
gcacatggcggccaatctgt

SEQ ID NO: 26737 - DNA, 20 bp, Artificial sequence
  synthetic
agagccgcaatgctggagcc

SEQ ID NO: 26738 - DNA, 20 bp, Artificial sequence
  synthetic
aggccccatggagaaaggtc

SEQ ID NO: 26739 - DNA, 20 bp, Artificial sequence
  synthetic
cgaggggatcgcccctgaag

SEQ ID NO: 26740 - DNA, 20 bp, Artificial sequence
  synthetic
catggccggtcacactaaat

SEQ ID NO: 26741 - DNA, 20 bp, Artificial sequence
  synthetic
accattaatcctgcgacctg

SEQ ID NO: 26742 - DNA, 20 bp, Artificial sequence
  synthetic
cgacaagaggtgggcgacct

SEQ ID NO: 26743 - DNA, 20 bp, Artificial sequence
  synthetic
cctaaattacccaccccccg

SEQ ID NO: 26744 - DNA, 20 bp, Artificial sequence
  synthetic
tcgcccccttgtgtctttac

SEQ ID NO: 26745 - DNA, 20 bp, Artificial sequence
  synthetic
ccacttggcatccctcccct

SEQ ID NO: 26746 - DNA, 20 bp, Artificial sequence
  synthetic
attccggcgcctgcgaagca

SEQ ID NO: 26747 - DNA, 20 bp, Artificial sequence
  synthetic
atcgcacgactagggatggg

SEQ ID NO: 26748 - DNA, 20 bp, Artificial sequence
  synthetic
gggggtgcagcctcagaatg

SEQ ID NO: 26749 - DNA, 20 bp, Artificial sequence
  synthetic
atcacatggttgtagtatta

SEQ ID NO: 26750 - DNA, 20 bp, Artificial sequence
  synthetic
cagggtgtatacgttagttc

SEQ ID NO: 26751 - DNA, 20 bp, Artificial sequence
  synthetic
ccgcacgcggcatctgcctt

SEQ ID NO: 26752 - DNA, 20 bp, Artificial sequence
  synthetic
gcccccgatttgacgggcag

SEQ ID NO: 26753 - DNA, 20 bp, Artificial sequence
  synthetic
tagttctcctcccaggctag

SEQ ID NO: 26754 - DNA, 20 bp, Artificial sequence
  synthetic
ctcgaccccaaatcccctgt

SEQ ID NO: 26755 - DNA, 20 bp, Artificial sequence
  synthetic
ccgccacctgtgtccgtgtc

SEQ ID NO: 26756 - DNA, 20 bp, Artificial sequence
  synthetic
ccgtcacgccgaccagcgat

SEQ ID NO: 26757 - DNA, 20 bp, Artificial sequence
  synthetic
atccgctcgtcagcccaccg

SEQ ID NO: 26758 - DNA, 20 bp, Artificial sequence
  synthetic
acgtcgggccccccttagtc

SEQ ID NO: 26759 - DNA, 20 bp, Artificial sequence
  synthetic
cggtgtgctgtctggtccca

SEQ ID NO: 26760 - DNA, 20 bp, Artificial sequence
  synthetic
cgtgtaccccggtgcaccct

SEQ ID NO: 26761 - DNA, 20 bp, Artificial sequence
  synthetic
ccgcttgactaccaccaggt

SEQ ID NO: 26762 - DNA, 20 bp, Artificial sequence
  synthetic
ctctgctaaccgcaacgccg

SEQ ID NO: 26763 - DNA, 20 bp, Artificial sequence
  synthetic
ccacgttcccccagaagcga

SEQ ID NO: 26764 - DNA, 20 bp, Artificial sequence
  synthetic
ccacgcttccgccgcagggc

SEQ ID NO: 26765 - DNA, 20 bp, Artificial sequence
  synthetic
accgcgaagagacgggaaat

SEQ ID NO: 26766 - DNA, 20 bp, Artificial sequence
  synthetic
tgtgtttatactacgagtat

SEQ ID NO: 26767 - DNA, 20 bp, Artificial sequence
  synthetic
agcgctaagcgctcgtgccc

SEQ ID NO: 26768 - DNA, 20 bp, Artificial sequence
  synthetic
tgctttcctagtaacaatgg

SEQ ID NO: 26769 - DNA, 20 bp, Artificial sequence
  synthetic
agtccactcatagaatatct

SEQ ID NO: 26770 - DNA, 20 bp, Artificial sequence
  synthetic
tgaaatgggacctcctgcag

SEQ ID NO: 26771 - DNA, 20 bp, Artificial sequence
  synthetic
gagatatgcgataactaagt

SEQ ID NO: 26772 - DNA, 20 bp, Artificial sequence
  synthetic
gtccctgctcgagtgtcggg

SEQ ID NO: 26773 - DNA, 20 bp, Artificial sequence
  synthetic
ggttggcgcgtgggtccggg

SEQ ID NO: 26774 - DNA, 20 bp, Artificial sequence
  synthetic
cggggtctggcactagtcac

SEQ ID NO: 26775 - DNA, 20 bp, Artificial sequence
  synthetic
ttatacgaacccactttatt

SEQ ID NO: 26776 - DNA, 20 bp, Artificial sequence
  synthetic
gacaggagtgcggactttga

SEQ ID NO: 26777 - DNA, 20 bp, Artificial sequence
  synthetic
tgataataattaccctgtct

SEQ ID NO: 26778 - DNA, 20 bp, Artificial sequence
  synthetic
tgtcgtagcgtaaaacccgc

SEQ ID NO: 26779 - DNA, 20 bp, Artificial sequence
  synthetic
agagaagccgtaaacgaagt

SEQ ID NO: 26780 - DNA, 20 bp, Artificial sequence
  synthetic
ttatgtttaacttcacgaaa

SEQ ID NO: 26781 - DNA, 20 bp, Artificial sequence
  synthetic
ggtaatagagttatatattt

SEQ ID NO: 26782 - DNA, 20 bp, Artificial sequence
  synthetic
tacatcataccagaatcacc

SEQ ID NO: 26783 - DNA, 20 bp, Artificial sequence
  synthetic
gccacgattttggctttggt

SEQ ID NO: 26784 - DNA, 20 bp, Artificial sequence
  synthetic
gataaggacaaagagcatac

SEQ ID NO: 26785 - DNA, 20 bp, Artificial sequence
  synthetic
gcgtgctaagataggtaaga

SEQ ID NO: 26786 - DNA, 20 bp, Artificial sequence
  synthetic
ctttgcaccggtgtcgttgt

SEQ ID NO: 26787 - DNA, 20 bp, Artificial sequence
  synthetic
ctacgcgggtttctggcgaa

SEQ ID NO: 26788 - DNA, 20 bp, Artificial sequence
  synthetic
ccatggattgggtggcccac

SEQ ID NO: 26789 - DNA, 20 bp, Artificial sequence
  synthetic
caagcgcgcagcagggatcc

SEQ ID NO: 26790 - DNA, 20 bp, Artificial sequence
  synthetic
gaaagtgtggtggtatacgt

SEQ ID NO: 26791 - DNA, 20 bp, Artificial sequence
  synthetic
acccccagctctgggggcga

SEQ ID NO: 26792 - DNA, 20 bp, Artificial sequence
  synthetic
aagttcggtgaggttgtact

SEQ ID NO: 26793 - DNA, 20 bp, Artificial sequence
  synthetic
gtatctagatgatcaagagg

SEQ ID NO: 26794 - DNA, 20 bp, Artificial sequence
  synthetic
tagttctagcgaaatcctga

SEQ ID NO: 26795 - DNA, 20 bp, Artificial sequence
  synthetic
aactaacagactcaaacaag

SEQ ID NO: 26796 - DNA, 20 bp, Artificial sequence
  synthetic
aaggtaccccattgtatggg

SEQ ID NO: 26797 - DNA, 20 bp, Artificial sequence
  synthetic
agttatttttatgtcataag

SEQ ID NO: 26798 - DNA, 20 bp, Artificial sequence
  synthetic
aaagcgaaagggaaaccaga

SEQ ID NO: 26799 - DNA, 20 bp, Artificial sequence
  synthetic
actcctgttgccgtttccct

SEQ ID NO: 26800 - DNA, 20 bp, Artificial sequence
  synthetic
acagtacccgaagatggcag

SEQ ID NO: 26801 - DNA, 20 bp, Artificial sequence
  synthetic
acagccgggacgccgaggcg

SEQ ID NO: 26802 - DNA, 20 bp, Artificial sequence
  synthetic
gcggatgaagaagaaaaccc

SEQ ID NO: 26803 - DNA, 20 bp, Artificial sequence
  synthetic
ccccctcgtccaagaatgca

SEQ ID NO: 26804 - DNA, 20 bp, Artificial sequence
  synthetic
ggatcctgaggaggcagctg

SEQ ID NO: 26805 - DNA, 20 bp, Artificial sequence
  synthetic
gggtggggagttggcccaga

SEQ ID NO: 26806 - DNA, 20 bp, Artificial sequence
  synthetic
gccttctcagccccgccagc

SEQ ID NO: 26807 - DNA, 20 bp, Artificial sequence
  synthetic
ctgcagcagcctgcctgcag

SEQ ID NO: 26808 - DNA, 20 bp, Artificial sequence
  synthetic
ttgagttggtgggggttttg

SEQ ID NO: 26809 - DNA, 20 bp, Artificial sequence
  synthetic
cgaacctgtgcggctgcagg

SEQ ID NO: 26810 - DNA, 20 bp, Artificial sequence
  synthetic
ttgtccccgggtcttccaac

SEQ ID NO: 26811 - DNA, 20 bp, Artificial sequence
  synthetic
ctttgggctcgggggctccc

SEQ ID NO: 26812 - DNA, 20 bp, Artificial sequence
  synthetic
aaggctctggatggtgtact

SEQ ID NO: 26813 - DNA, 20 bp, Artificial sequence
  synthetic
aggacatttaaagctaaatt

SEQ ID NO: 26814 - DNA, 20 bp, Artificial sequence
  synthetic
attacgccgcttttgaaaaa

SEQ ID NO: 26815 - DNA, 20 bp, Artificial sequence
  synthetic
agaatgtaaaagagccagag

SEQ ID NO: 26816 - DNA, 20 bp, Artificial sequence
  synthetic
ccacatccaggcagcgcagg

SEQ ID NO: 26817 - DNA, 20 bp, Artificial sequence
  synthetic
tgccgctgcgcagcagtatc

SEQ ID NO: 26818 - DNA, 20 bp, Artificial sequence
  synthetic
gatctacaatttgaagtact

SEQ ID NO: 26819 - DNA, 20 bp, Artificial sequence
  synthetic
ataggtgaccggaggccggc

SEQ ID NO: 26820 - DNA, 20 bp, Artificial sequence
  synthetic
aagccgtgtattcccccgca

SEQ ID NO: 26821 - DNA, 20 bp, Artificial sequence
  synthetic
gtgctaaaaaatcaaaaaac

SEQ ID NO: 26822 - DNA, 20 bp, Artificial sequence
  synthetic
cggagagctatcgtgctgag

SEQ ID NO: 26823 - DNA, 20 bp, Artificial sequence
  synthetic
caaaagaatggagagaacag

SEQ ID NO: 26824 - DNA, 20 bp, Artificial sequence
  synthetic
caggtagttggtctatcaac

SEQ ID NO: 26825 - DNA, 20 bp, Artificial sequence
  synthetic
ccctcttaccaattcaaggg

SEQ ID NO: 26826 - DNA, 20 bp, Artificial sequence
  synthetic
gtttgcgcttgtcggcatct

SEQ ID NO: 26827 - DNA, 20 bp, Artificial sequence
  synthetic
ccgcacgcacccaccgggac

SEQ ID NO: 26828 - DNA, 20 bp, Artificial sequence
  synthetic
taacagaaatggttccggag

SEQ ID NO: 26829 - DNA, 20 bp, Artificial sequence
  synthetic
tgaatgcatcctgtgcagcc

SEQ ID NO: 26830 - DNA, 20 bp, Artificial sequence
  synthetic
ttaatgcatcctgtgcagca

SEQ ID NO: 26831 - DNA, 20 bp, Artificial sequence
  synthetic
ccaaggccattagaagccaa

SEQ ID NO: 26832 - DNA, 20 bp, Artificial sequence
  synthetic
cgaggagatctggagctgct

SEQ ID NO: 26833 - DNA, 20 bp, Artificial sequence
  synthetic
actcgggtggtggccgctga

SEQ ID NO: 26834 - DNA, 20 bp, Artificial sequence
  synthetic
tctatagacgaacgtgtcat

SEQ ID NO: 26835 - DNA, 20 bp, Artificial sequence
  synthetic
gtacccccgtcgttggcgtg

SEQ ID NO: 26836 - DNA, 20 bp, Artificial sequence
  synthetic
agtccgggactttttgaagc

SEQ ID NO: 26837 - DNA, 20 bp, Artificial sequence
  synthetic
acgccactcgatctcgctcc

SEQ ID NO: 26838 - DNA, 20 bp, Artificial sequence
  synthetic
gaatattaataaatatcttc

SEQ ID NO: 26839 - DNA, 20 bp, Artificial sequence
  synthetic
atggcgggaccgtcgattcc

SEQ ID NO: 26840 - DNA, 20 bp, Artificial sequence
  synthetic
atggcgggaccgttgattcc

SEQ ID NO: 26841 - DNA, 20 bp, Artificial sequence
  synthetic
tagggactgttctcttcagt

SEQ ID NO: 26842 - DNA, 20 bp, Artificial sequence
  synthetic
cttgcacctattaaagaggg

SEQ ID NO: 26843 - DNA, 20 bp, Artificial sequence
  synthetic
tcgtcggaaacgagaagaca

SEQ ID NO: 26844 - DNA, 20 bp, Artificial sequence
  synthetic
cggttgctgcttgctgtcct

SEQ ID NO: 26845 - DNA, 20 bp, Artificial sequence
  synthetic
gctttggaagcagttagatc

SEQ ID NO: 26846 - DNA, 20 bp, Artificial sequence
  synthetic
atgcctacctgacctcccac

SEQ ID NO: 26847 - DNA, 20 bp, Artificial sequence
  synthetic
ttgcaaattatttaaaaggt

SEQ ID NO: 26848 - DNA, 20 bp, Artificial sequence
  synthetic
agaagccaagaggaccccgg

SEQ ID NO: 26849 - DNA, 20 bp, Artificial sequence
  synthetic
aaataagggtgcatgagggg

SEQ ID NO: 26850 - DNA, 20 bp, Artificial sequence
  synthetic
agcagatctgaggacatctc

SEQ ID NO: 26851 - DNA, 20 bp, Artificial sequence
  synthetic
tcgatatcgtcgatcccatt

SEQ ID NO: 26852 - DNA, 20 bp, Artificial sequence
  synthetic
atgtaaagacttgcagatga

SEQ ID NO: 26853 - DNA, 20 bp, Artificial sequence
  synthetic
ggctaaaacggtttccgccc

SEQ ID NO: 26854 - DNA, 20 bp, Artificial sequence
  synthetic
tgacaataacatattcatcc

SEQ ID NO: 26855 - DNA, 20 bp, Artificial sequence
  synthetic
acgagcaacaccggctcttt

SEQ ID NO: 26856 - DNA, 20 bp, Artificial sequence
  synthetic
gtacctttttgctcacacca

SEQ ID NO: 26857 - DNA, 20 bp, Artificial sequence
  synthetic
ttccgtgtagaagggcacac

SEQ ID NO: 26858 - DNA, 20 bp, Artificial sequence
  synthetic
ggttgaaggtatcttcagac

SEQ ID NO: 26859 - DNA, 20 bp, Artificial sequence
  synthetic
cgtgtgtcggtcgcctagtc

SEQ ID NO: 26860 - DNA, 20 bp, Artificial sequence
  synthetic
ttctatctatcccggccata

SEQ ID NO: 26861 - DNA, 20 bp, Artificial sequence
  synthetic
tatgactactgacaatctta

SEQ ID NO: 26862 - DNA, 20 bp, Artificial sequence
  synthetic
cagatggagaggagaaaacc

SEQ ID NO: 26863 - DNA, 20 bp, Artificial sequence
  synthetic
ccagcggtcataaaagaatt

SEQ ID NO: 26864 - DNA, 20 bp, Artificial sequence
  synthetic
ccccacgcactacgtgccgg

SEQ ID NO: 26865 - DNA, 20 bp, Artificial sequence
  synthetic
cagaagtttggacagctcaa

SEQ ID NO: 26866 - DNA, 20 bp, Artificial sequence
  synthetic
tggctcgggaggcaactcag

SEQ ID NO: 26867 - DNA, 20 bp, Artificial sequence
  synthetic
ctatccacgctatcattgct

SEQ ID NO: 26868 - DNA, 20 bp, Artificial sequence
  synthetic
acaaaagatatggacccgca

SEQ ID NO: 26869 - DNA, 20 bp, Artificial sequence
  synthetic
acatgtgtgaaaggcgagcc

SEQ ID NO: 26870 - DNA, 20 bp, Artificial sequence
  synthetic
tgtgcgaataactatgagga

SEQ ID NO: 26871 - DNA, 20 bp, Artificial sequence
  synthetic
gaagtagcagctcacacgcc

SEQ ID NO: 26872 - DNA, 20 bp, Artificial sequence
  synthetic
aagatgtcaatatgggtgca

SEQ ID NO: 26873 - DNA, 20 bp, Artificial sequence
  synthetic
cctttgggggctacctgtac

SEQ ID NO: 26874 - DNA, 20 bp, Artificial sequence
  synthetic
cccacgggggttacttgcac

SEQ ID NO: 26875 - DNA, 20 bp, Artificial sequence
  synthetic
gccaagtgtgtttgaagaac

SEQ ID NO: 26876 - DNA, 20 bp, Artificial sequence
  synthetic
tgcttctgattgtgaacgtt

SEQ ID NO: 26877 - DNA, 20 bp, Artificial sequence
  synthetic
gtccgtgtttcttttgttca

SEQ ID NO: 26878 - DNA, 20 bp, Artificial sequence
  synthetic
atccttgcgaccacgttggc

SEQ ID NO: 26879 - DNA, 20 bp, Artificial sequence
  synthetic
acgtggggagctcaactggt

SEQ ID NO: 26880 - DNA, 20 bp, Artificial sequence
  synthetic
ggtgttcgggtatgaggctg

SEQ ID NO: 26881 - DNA, 20 bp, Artificial sequence
  synthetic
ttcacgctcaccgtgcccag

SEQ ID NO: 26882 - DNA, 20 bp, Artificial sequence
  synthetic
aaaaaccttaaaggctggtc

SEQ ID NO: 26883 - DNA, 20 bp, Artificial sequence
  synthetic
tgtgtcaagctttcaggtag

SEQ ID NO: 26884 - DNA, 20 bp, Artificial sequence
  synthetic
aaatcatggcgtcccaaggc

SEQ ID NO: 26885 - DNA, 20 bp, Artificial sequence
  synthetic
gacaatgcttcaacccgatg

SEQ ID NO: 26886 - DNA, 20 bp, Artificial sequence
  synthetic
tcagctaggacaacaacagc

SEQ ID NO: 26887 - DNA, 20 bp, Artificial sequence
  synthetic
gggcgagcatcgggtcatcg

SEQ ID NO: 26888 - DNA, 20 bp, Artificial sequence
  synthetic
agactctgaggcaggacagg

SEQ ID NO: 26889 - DNA, 20 bp, Artificial sequence
  synthetic
gcagttccgctggctagtgt

SEQ ID NO: 26890 - DNA, 20 bp, Artificial sequence
  synthetic
caatgatctggagtgtcccg

SEQ ID NO: 26891 - DNA, 20 bp, Artificial sequence
  synthetic
ggaagcaaattggaaatgac

SEQ ID NO: 26892 - DNA, 20 bp, Artificial sequence
  synthetic
ggatcaacgtggaccgcatt

SEQ ID NO: 26893 - DNA, 20 bp, Artificial sequence
  synthetic
acggctggatgggacactag

SEQ ID NO: 26894 - DNA, 20 bp, Artificial sequence
  synthetic
gccggcggtgctccttctgc

SEQ ID NO: 26895 - DNA, 20 bp, Artificial sequence
  synthetic
gtagtggtaagaaagcgcca

SEQ ID NO: 26896 - DNA, 20 bp, Artificial sequence
  synthetic
tggatccactactctcgact

SEQ ID NO: 26897 - DNA, 20 bp, Artificial sequence
  synthetic
gcagcctagcactagaaggc

SEQ ID NO: 26898 - DNA, 20 bp, Artificial sequence
  synthetic
ctcggtgcgcttgtcatttc

SEQ ID NO: 26899 - DNA, 20 bp, Artificial sequence
  synthetic
gcgctagcgatacgctcgac

SEQ ID NO: 26900 - DNA, 20 bp, Artificial sequence
  synthetic
ctcgatatcttcgacgatag

SEQ ID NO: 26901 - DNA, 20 bp, Artificial sequence
  synthetic
cagagtcgcaattgacaata

SEQ ID NO: 26902 - DNA, 20 bp, Artificial sequence
  synthetic
agtgcggatttctatcgaag

SEQ ID NO: 26903 - DNA, 20 bp, Artificial sequence
  synthetic
ggactgctctgccggggcgg

SEQ ID NO: 26904 - DNA, 20 bp, Artificial sequence
  synthetic
gagtcgcgggacccccggtt

SEQ ID NO: 26905 - DNA, 20 bp, Artificial sequence
  synthetic
ccgttctctgtgggctcaaa

SEQ ID NO: 26906 - DNA, 20 bp, Artificial sequence
  synthetic
gcatagtctcgccgcgcgtc

SEQ ID NO: 26907 - DNA, 20 bp, Artificial sequence
  synthetic
cgaatcaaccctatctactg

SEQ ID NO: 26908 - DNA, 20 bp, Artificial sequence
  synthetic
ttctgtcatttgtctgttca

SEQ ID NO: 26909 - DNA, 20 bp, Artificial sequence
  synthetic
ataccaaacttcgacgcaat

SEQ ID NO: 26910 - DNA, 20 bp, Artificial sequence
  synthetic
acgtggttgctggtcaggaa

SEQ ID NO: 26911 - DNA, 20 bp, Artificial sequence
  synthetic
gtatccaataaaccctcttg

SEQ ID NO: 26912 - DNA, 20 bp, Artificial sequence
  synthetic
tgataatctcgcggtggaga

SEQ ID NO: 26913 - DNA, 20 bp, Artificial sequence
  synthetic
tctttcttggtttggtgctt

SEQ ID NO: 26914 - DNA, 20 bp, Artificial sequence
  synthetic
gtcgcgccgcgcgttctttc

SEQ ID NO: 26915 - DNA, 20 bp, Artificial sequence
  synthetic
ccccaaaccaagtggtcttg

SEQ ID NO: 26916 - DNA, 20 bp, Artificial sequence
  synthetic
cggaggctctcttcagtaaa

SEQ ID NO: 26917 - DNA, 20 bp, Artificial sequence
  synthetic
acatggacgaaccctggccc

SEQ ID NO: 26918 - DNA, 20 bp, Artificial sequence
  synthetic
aatttccaccaagtggagac

SEQ ID NO: 26919 - DNA, 20 bp, Artificial sequence
  synthetic
attctcggtatccatgtcgc

SEQ ID NO: 26920 - DNA, 20 bp, Artificial sequence
  synthetic
tcccctgcctttggcgcctt

SEQ ID NO: 26921 - DNA, 20 bp, Artificial sequence
  synthetic
cttcgcacaccgcgacgctc

SEQ ID NO: 26922 - DNA, 20 bp, Artificial sequence
  synthetic
catcacccagggcacgatcc

SEQ ID NO: 26923 - DNA, 20 bp, Artificial sequence
  synthetic
gggtgctggtcaccggggca

SEQ ID NO: 26924 - DNA, 20 bp, Artificial sequence
  synthetic
gccggttgctgagccgggag

SEQ ID NO: 26925 - DNA, 20 bp, Artificial sequence
  synthetic
aacatggacttcccgtgcct

SEQ ID NO: 26926 - DNA, 20 bp, Artificial sequence
  synthetic
atggacgtatctagtggttc

SEQ ID NO: 26927 - DNA, 20 bp, Artificial sequence
  synthetic
agacggcagcgaactcgtcg

SEQ ID NO: 26928 - DNA, 20 bp, Artificial sequence
  synthetic
ctacagcgggggagacattt

SEQ ID NO: 26929 - DNA, 20 bp, Artificial sequence
  synthetic
tcatcaacacaattttgaat

SEQ ID NO: 26930 - DNA, 20 bp, Artificial sequence
  synthetic
tccgcgtcgctagctagtcg

SEQ ID NO: 26931 - DNA, 20 bp, Artificial sequence
  synthetic
ccgtaccctaagatacgggg

SEQ ID NO: 26932 - DNA, 20 bp, Artificial sequence
  synthetic
agaataaatttgcaggtcaa

SEQ ID NO: 26933 - DNA, 20 bp, Artificial sequence
  synthetic
tatctcttgctggaaaaatc

SEQ ID NO: 26934 - DNA, 20 bp, Artificial sequence
  synthetic
cacgcgcttttgtatcagag

SEQ ID NO: 26935 - DNA, 20 bp, Artificial sequence
  synthetic
ttccccatccccttcccaac

SEQ ID NO: 26936 - DNA, 20 bp, Artificial sequence
  synthetic
cgcgcgcctttgtctcagag

SEQ ID NO: 26937 - DNA, 20 bp, Artificial sequence
  synthetic
gaactctgcaatttattgag

SEQ ID NO: 26938 - DNA, 20 bp, Artificial sequence
  synthetic
cccttgcgagtgaacaccac

SEQ ID NO: 26939 - DNA, 20 bp, Artificial sequence
  synthetic
gcctgtctggccctgttgct

SEQ ID NO: 26940 - DNA, 20 bp, Artificial sequence
  synthetic
cagcttaatcaactgacccg

SEQ ID NO: 26941 - DNA, 20 bp, Artificial sequence
  synthetic
cgctgtctccctggagttct

SEQ ID NO: 26942 - DNA, 20 bp, Artificial sequence
  synthetic
ttccagcagttggggccacg

SEQ ID NO: 26943 - DNA, 20 bp, Artificial sequence
  synthetic
gggagagttgggagagtaaa

SEQ ID NO: 26944 - DNA, 20 bp, Artificial sequence
  synthetic
ggatctggataaagatacat

SEQ ID NO: 26945 - DNA, 20 bp, Artificial sequence
  synthetic
gcctaaaagagcaaggacta

SEQ ID NO: 26946 - DNA, 20 bp, Artificial sequence
  synthetic
attttccggcccaggctaag

SEQ ID NO: 26947 - DNA, 20 bp, Artificial sequence
  synthetic
aagagtgtgttctgccaggg

SEQ ID NO: 26948 - DNA, 20 bp, Artificial sequence
  synthetic
gaagggctattgcaacaccc

SEQ ID NO: 26949 - DNA, 20 bp, Artificial sequence
  synthetic
gctgttccagtcaacgctag

SEQ ID NO: 26950 - DNA, 20 bp, Artificial sequence
  synthetic
gcaatctcggctgtctgtac

SEQ ID NO: 26951 - DNA, 20 bp, Artificial sequence
  synthetic
caggaaatttcctcctccta

SEQ ID NO: 26952 - DNA, 20 bp, Artificial sequence
  synthetic
cctggatctgtctgacagcg

SEQ ID NO: 26953 - DNA, 20 bp, Artificial sequence
  synthetic
ggcctagggctccgcttgac

SEQ ID NO: 26954 - DNA, 20 bp, Artificial sequence
  synthetic
acagtgacaggtatcttttt

SEQ ID NO: 26955 - DNA, 20 bp, Artificial sequence
  synthetic
ccctgtattaatatggggac

SEQ ID NO: 26956 - DNA, 20 bp, Artificial sequence
  synthetic
ttctgctacgtcattaccag

SEQ ID NO: 26957 - DNA, 20 bp, Artificial sequence
  synthetic
agtagcaagaccgggaatag

SEQ ID NO: 26958 - DNA, 20 bp, Artificial sequence
  synthetic
atctctagcatgaccagacc

SEQ ID NO: 26959 - DNA, 20 bp, Artificial sequence
  synthetic
tggagacaacatgtggttct

SEQ ID NO: 26960 - DNA, 20 bp, Artificial sequence
  synthetic
tcagtctgtgtttactctca

SEQ ID NO: 26961 - DNA, 20 bp, Artificial sequence
  synthetic
cgcgcacctcatggttccgg

SEQ ID NO: 26962 - DNA, 20 bp, Artificial sequence
  synthetic
gtggcgtagtactctggtat

SEQ ID NO: 26963 - DNA, 20 bp, Artificial sequence
  synthetic
aaaatcctccctgagagagc

SEQ ID NO: 26964 - DNA, 20 bp, Artificial sequence
  synthetic
gtggcgtagtacttggtatt

SEQ ID NO: 26965 - DNA, 20 bp, Artificial sequence
  synthetic
tgggcgctagcactctgatt

SEQ ID NO: 26966 - DNA, 20 bp, Artificial sequence
  synthetic
tgggcgctagtacactgata

SEQ ID NO: 26967 - DNA, 20 bp, Artificial sequence
  synthetic
gggcgctagcactctggtat

SEQ ID NO: 26968 - DNA, 20 bp, Artificial sequence
  synthetic
tgggcgctagtacactggta

SEQ ID NO: 26969 - DNA, 20 bp, Artificial sequence
  synthetic
gtgaggattaacaacaatta

SEQ ID NO: 26970 - DNA, 20 bp, Artificial sequence
  synthetic
ttccctccacccgcagtaac

SEQ ID NO: 26971 - DNA, 20 bp, Artificial sequence
  synthetic
tcacgcgttgtcgcgagctc

SEQ ID NO: 26972 - DNA, 20 bp, Artificial sequence
  synthetic
ttcgtctccgatgattatga

SEQ ID NO: 26973 - DNA, 20 bp, Artificial sequence
  synthetic
tcctcctcgcccccacccag

SEQ ID NO: 26974 - DNA, 20 bp, Artificial sequence
  synthetic
agagatttgaacatgagtat

SEQ ID NO: 26975 - DNA, 20 bp, Artificial sequence
  synthetic
gtggcggctagtactccggt

SEQ ID NO: 26976 - DNA, 20 bp, Artificial sequence
  synthetic
ggtcccctccacggaggacc

SEQ ID NO: 26977 - DNA, 20 bp, Artificial sequence
  synthetic
aatgttcatttcaagccgac

SEQ ID NO: 26978 - DNA, 20 bp, Artificial sequence
  synthetic
gtcaccgaaataaattcgca

SEQ ID NO: 26979 - DNA, 20 bp, Artificial sequence
  synthetic
ggagtggtagtgggggctgc

SEQ ID NO: 26980 - DNA, 20 bp, Artificial sequence
  synthetic
gagtcgcggctggccgactc

SEQ ID NO: 26981 - DNA, 20 bp, Artificial sequence
  synthetic
tcctgggaatcttcaatcat

SEQ ID NO: 26982 - DNA, 20 bp, Artificial sequence
  synthetic
ggagcaggacccataaggtt

SEQ ID NO: 26983 - DNA, 20 bp, Artificial sequence
  synthetic
tacttcattctgcactcaaa

SEQ ID NO: 26984 - DNA, 20 bp, Artificial sequence
  synthetic
gagcaactctattctagatc

SEQ ID NO: 26985 - DNA, 20 bp, Artificial sequence
  synthetic
tgtcattttggcagatagtc

SEQ ID NO: 26986 - DNA, 20 bp, Artificial sequence
  synthetic
aagttttcgacgtggtcaga

SEQ ID NO: 26987 - DNA, 20 bp, Artificial sequence
  synthetic
gtcacgaaggggagggaata

SEQ ID NO: 26988 - DNA, 20 bp, Artificial sequence
  synthetic
gtgggtggctgcccagctcg

SEQ ID NO: 26989 - DNA, 20 bp, Artificial sequence
  synthetic
tcttctcgactgactccatg

SEQ ID NO: 26990 - DNA, 20 bp, Artificial sequence
  synthetic
cgccactcttgggagaggaa

SEQ ID NO: 26991 - DNA, 20 bp, Artificial sequence
  synthetic
gggatgtcaaattcctggtc

SEQ ID NO: 26992 - DNA, 20 bp, Artificial sequence
  synthetic
ccacgggacgctagttgtga

SEQ ID NO: 26993 - DNA, 20 bp, Artificial sequence
  synthetic
gcgtcggagggagctctact

SEQ ID NO: 26994 - DNA, 20 bp, Artificial sequence
  synthetic
ggccacaatctttttgatct

SEQ ID NO: 26995 - DNA, 20 bp, Artificial sequence
  synthetic
cacagttgccgcggacggag

SEQ ID NO: 26996 - DNA, 20 bp, Artificial sequence
  synthetic
gacagctcctgcgctgcact

SEQ ID NO: 26997 - DNA, 20 bp, Artificial sequence
  synthetic
cgaccgtccctgcgactcac

SEQ ID NO: 26998 - DNA, 20 bp, Artificial sequence
  synthetic
gcagtccctgcgatacactc

SEQ ID NO: 26999 - DNA, 20 bp, Artificial sequence
  synthetic
cccttcattgtccccatggc

SEQ ID NO: 27000 - DNA, 20 bp, Artificial sequence
  synthetic
gagcgtcatctaataaagat

SEQ ID NO: 27001 - DNA, 20 bp, Artificial sequence
  synthetic
ttttccggtggccacccgcc

SEQ ID NO: 27002 - DNA, 20 bp, Artificial sequence
  synthetic
cggggccgggcaagtttgtt

SEQ ID NO: 27003 - DNA, 20 bp, Artificial sequence
  synthetic
ctgatccgaggctggagcca

SEQ ID NO: 27004 - DNA, 20 bp, Artificial sequence
  synthetic
aaggtctcgagatgccacgt

SEQ ID NO: 27005 - DNA, 20 bp, Artificial sequence
  synthetic
aatcaagtcatcgagatttc

SEQ ID NO: 27006 - DNA, 20 bp, Artificial sequence
  synthetic
gtctggcgatggttatggtc

SEQ ID NO: 27007 - DNA, 20 bp, Artificial sequence
  synthetic
gttctggaagacaataaccc

SEQ ID NO: 27008 - DNA, 20 bp, Artificial sequence
  synthetic
atgtgtatcccagaagaagc

SEQ ID NO: 27009 - DNA, 20 bp, Artificial sequence
  synthetic
cggaagcttgcttaacgtag

SEQ ID NO: 27010 - DNA, 20 bp, Artificial sequence
  synthetic
tcggagattcgcccgggccc

SEQ ID NO: 27011 - DNA, 20 bp, Artificial sequence
  synthetic
ttaaacttaagcgcgccgtg

SEQ ID NO: 27012 - DNA, 20 bp, Artificial sequence
  synthetic
cgcgtgaggctgcggctctg

SEQ ID NO: 27013 - DNA, 20 bp, Artificial sequence
  synthetic
gcagcgaccaacgcttctct

SEQ ID NO: 27014 - DNA, 20 bp, Artificial sequence
  synthetic
cagagggccagtacgtttcg

SEQ ID NO: 27015 - DNA, 20 bp, Artificial sequence
  synthetic
gaggcccactattaggctag

SEQ ID NO: 27016 - DNA, 20 bp, Artificial sequence
  synthetic
ataccgcaaccaaaatatcg

SEQ ID NO: 27017 - DNA, 20 bp, Artificial sequence
  synthetic
cagcgagtagagttttctct

SEQ ID NO: 27018 - DNA, 20 bp, Artificial sequence
  synthetic
tgcggacgcagttgcgtgag

SEQ ID NO: 27019 - DNA, 20 bp, Artificial sequence
  synthetic
ggaactctccagtttgtgga

SEQ ID NO: 27020 - DNA, 20 bp, Artificial sequence
  synthetic
gatagggtgcttgcgagtgc

SEQ ID NO: 27021 - DNA, 20 bp, Artificial sequence
  synthetic
accaaccgcaatggacccag

SEQ ID NO: 27022 - DNA, 20 bp, Artificial sequence
  synthetic
acgcagatctgtttgtcacg

SEQ ID NO: 27023 - DNA, 20 bp, Artificial sequence
  synthetic
tcgtcaaccgatgagatagg

SEQ ID NO: 27024 - DNA, 20 bp, Artificial sequence
  synthetic
aggagaagttgatttccgtg

SEQ ID NO: 27025 - DNA, 20 bp, Artificial sequence
  synthetic
ggggcgcgggtcactgaccc

SEQ ID NO: 27026 - DNA, 20 bp, Artificial sequence
  synthetic
tggacatccttaggcaaaac

SEQ ID NO: 27027 - DNA, 20 bp, Artificial sequence
  synthetic
agcagcagggacttaacttc

SEQ ID NO: 27028 - DNA, 20 bp, Artificial sequence
  synthetic
cgggggctgtagctgggttt

SEQ ID NO: 27029 - DNA, 20 bp, Artificial sequence
  synthetic
ccccaggctacctgacgggg

SEQ ID NO: 27030 - DNA, 20 bp, Artificial sequence
  synthetic
ggcggcggcagtactgggac

SEQ ID NO: 27031 - DNA, 20 bp, Artificial sequence
  synthetic
ctgcggtctggccttggagg

SEQ ID NO: 27032 - DNA, 20 bp, Artificial sequence
  synthetic
ctggggtccgacctggaagg

SEQ ID NO: 27033 - DNA, 20 bp, Artificial sequence
  synthetic
cctccaaagaaggaagcatc

SEQ ID NO: 27034 - DNA, 20 bp, Artificial sequence
  synthetic
agggcgtggtctaccaagaa

SEQ ID NO: 27035 - DNA, 20 bp, Artificial sequence
  synthetic
gatctcactccattgaacgt

SEQ ID NO: 27036 - DNA, 20 bp, Artificial sequence
  synthetic
ccttggttgatgccattgtc

SEQ ID NO: 27037 - DNA, 20 bp, Artificial sequence
  synthetic
caacatgatatatttgtcct

SEQ ID NO: 27038 - DNA, 20 bp, Artificial sequence
  synthetic
tttgaacttttatacaaaac

SEQ ID NO: 27039 - DNA, 20 bp, Artificial sequence
  synthetic
ttcaattgtggctttgacgt

SEQ ID NO: 27040 - DNA, 20 bp, Artificial sequence
  synthetic
ccgtggaccctctggtataa

SEQ ID NO: 27041 - DNA, 20 bp, Artificial sequence
  synthetic
agggactccagaccttccta

SEQ ID NO: 27042 - DNA, 20 bp, Artificial sequence
  synthetic
accaacacacactcgacgtg

SEQ ID NO: 27043 - DNA, 20 bp, Artificial sequence
  synthetic
ccaagaggcaaagttgtgga

SEQ ID NO: 27044 - DNA, 20 bp, Artificial sequence
  synthetic
agtccaaagtggaccaggcc

SEQ ID NO: 27045 - DNA, 20 bp, Artificial sequence
  synthetic
atatgacgcttgtttctttt

SEQ ID NO: 27046 - DNA, 20 bp, Artificial sequence
  synthetic
cggctagtaatgattctgga

SEQ ID NO: 27047 - DNA, 20 bp, Artificial sequence
  synthetic
gaggtgactgacagttacga

SEQ ID NO: 27048 - DNA, 20 bp, Artificial sequence
  synthetic
attgggtgcgcgactcggtt

SEQ ID NO: 27049 - DNA, 20 bp, Artificial sequence
  synthetic
cacgtaaaggctgccgacac

SEQ ID NO: 27050 - DNA, 20 bp, Artificial sequence
  synthetic
cagattctgctctgagtgtg

SEQ ID NO: 27051 - DNA, 20 bp, Artificial sequence
  synthetic
accgtggaacatctcgagaa

SEQ ID NO: 27052 - DNA, 20 bp, Artificial sequence
  synthetic
ccatcatcaacaccatcatc

SEQ ID NO: 27053 - DNA, 20 bp, Artificial sequence
  synthetic
tgcaatggcaacccagtcgc

SEQ ID NO: 27054 - DNA, 20 bp, Artificial sequence
  synthetic
caaggggagaagaaggaaga

SEQ ID NO: 27055 - DNA, 20 bp, Artificial sequence
  synthetic
aagaaggctttacccacttc

SEQ ID NO: 27056 - DNA, 20 bp, Artificial sequence
  synthetic
gtaggggaagcccccactat

SEQ ID NO: 27057 - DNA, 20 bp, Artificial sequence
  synthetic
cctccgcggctggccattgt

SEQ ID NO: 27058 - DNA, 20 bp, Artificial sequence
  synthetic
ggacctgttgggaacagatg

SEQ ID NO: 27059 - DNA, 20 bp, Artificial sequence
  synthetic
caaagttggcgttttattat

SEQ ID NO: 27060 - DNA, 20 bp, Artificial sequence
  synthetic
tgacaaggagagaagtccac

SEQ ID NO: 27061 - DNA, 20 bp, Artificial sequence
  synthetic
ctggtttgtttccccggtgc

SEQ ID NO: 27062 - DNA, 20 bp, Artificial sequence
  synthetic
gagaacagagtatcgttctg

SEQ ID NO: 27063 - DNA, 20 bp, Artificial sequence
  synthetic
aagtcgaaaggttaaaacat

SEQ ID NO: 27064 - DNA, 20 bp, Artificial sequence
  synthetic
agcaaaatgggtgtttattt

SEQ ID NO: 27065 - DNA, 20 bp, Artificial sequence
  synthetic
gggtaagaactgagggggca

SEQ ID NO: 27066 - DNA, 20 bp, Artificial sequence
  synthetic
cagaacggcggagacccagg

SEQ ID NO: 27067 - DNA, 20 bp, Artificial sequence
  synthetic
ggcctccttcttgataaagt

SEQ ID NO: 27068 - DNA, 20 bp, Artificial sequence
  synthetic
ttcgtggaacgttgttcccg

SEQ ID NO: 27069 - DNA, 20 bp, Artificial sequence
  synthetic
atagatgaaatagcaggagg

SEQ ID NO: 27070 - DNA, 20 bp, Artificial sequence
  synthetic
aggcagcgactgtgattgtg

SEQ ID NO: 27071 - DNA, 20 bp, Artificial sequence
  synthetic
ttctgtgtttttacgtaggt

SEQ ID NO: 27072 - DNA, 20 bp, Artificial sequence
  synthetic
tttccttctttcttacctta

SEQ ID NO: 27073 - DNA, 20 bp, Artificial sequence
  synthetic
ctcgaaagcgaaagttccag

SEQ ID NO: 27074 - DNA, 20 bp, Artificial sequence
  synthetic
gcgaaagcgaaagtagaacc

SEQ ID NO: 27075 - DNA, 20 bp, Artificial sequence
  synthetic
tcgaaagcgaaagtgttcca

SEQ ID NO: 27076 - DNA, 20 bp, Artificial sequence
  synthetic
ttgaaagcgaaagttccaga

SEQ ID NO: 27077 - DNA, 20 bp, Artificial sequence
  synthetic
ttgaaagcgacagtagaacc

SEQ ID NO: 27078 - DNA, 20 bp, Artificial sequence
  synthetic
gagaaagcgaaagtagaacc

SEQ ID NO: 27079 - DNA, 20 bp, Artificial sequence
  synthetic
ggaaagcgaaagagaaacca

SEQ ID NO: 27080 - DNA, 20 bp, Artificial sequence
  synthetic
tgaaagcgaaagtaccagag

SEQ ID NO: 27081 - DNA, 20 bp, Artificial sequence
  synthetic
cgaaagcgaaagtagaacca

SEQ ID NO: 27082 - DNA, 20 bp, Artificial sequence
  synthetic
cgaaagcgaaagttccagag

SEQ ID NO: 27083 - DNA, 20 bp, Artificial sequence
  synthetic
ggaaaagcgaaagtaaaacc

SEQ ID NO: 27084 - DNA, 20 bp, Artificial sequence
  synthetic
tgaaagcgaaagagaaacca

SEQ ID NO: 27085 - DNA, 20 bp, Artificial sequence
  synthetic
tgaaagtgaaagtagaacca

SEQ ID NO: 27086 - DNA, 20 bp, Artificial sequence
  synthetic
ctcgaaagcggaagttccca

SEQ ID NO: 27087 - DNA, 20 bp, Artificial sequence
  synthetic
gtaaaaatctctagcagtgg

SEQ ID NO: 27088 - DNA, 20 bp, Artificial sequence
  synthetic
ataaaaatctctagcagtgg

SEQ ID NO: 27089 - DNA, 20 bp, Artificial sequence
  synthetic
gtaaaattctctagcagtgg

SEQ ID NO: 27090 - DNA, 20 bp, Artificial sequence
  synthetic
gaaagcgaaagtagaaccag

SEQ ID NO: 27091 - DNA, 20 bp, Artificial sequence
  synthetic
gaaagcgaaagtaaaaccag

SEQ ID NO: 27092 - DNA, 20 bp, Artificial sequence
  synthetic
gaaagcgaaagtaagaccag

SEQ ID NO: 27093 - DNA, 20 bp, Artificial sequence
  synthetic
gaaaacgaaagtaaaaccag

SEQ ID NO: 27094 - DNA, 20 bp, Artificial sequence
  synthetic
gaaagcgaaagagaaaccag

SEQ ID NO: 27095 - DNA, 20 bp, Artificial sequence
  synthetic
gaaagcgaaagtgagaccag

SEQ ID NO: 27096 - DNA, 20 bp, Artificial sequence
  synthetic
gaaaacgaaagtaaactgga

SEQ ID NO: 27097 - DNA, 20 bp, Artificial sequence
  synthetic
gaaaacgaaagtagaaccag

SEQ ID NO: 27098 - DNA, 20 bp, Artificial sequence
  synthetic
gaaaacgaaagtagaaccgg

SEQ ID NO: 27099 - DNA, 20 bp, Artificial sequence
  synthetic
gaaagcgaaagtagaaccgg

SEQ ID NO: 27100 - DNA, 20 bp, Artificial sequence
  synthetic
gaaaaggaaaatgagacccg

SEQ ID NO: 27101 - DNA, 20 bp, Artificial sequence
  synthetic
gaaaacgaaagcggaaccgg

SEQ ID NO: 27102 - DNA, 20 bp, Artificial sequence
  synthetic
gaaagccaaagttagaaccc

SEQ ID NO: 27103 - DNA, 20 bp, Artificial sequence
  synthetic
aagaaaacctccgacgcaac

SEQ ID NO: 27104 - DNA, 20 bp, Artificial sequence
  synthetic
tcgaaagcgaaagttccaga

SEQ ID NO: 27105 - DNA, 20 bp, Artificial sequence
  synthetic
cgaaagcggaagttccagag

SEQ ID NO: 27106 - DNA, 20 bp, Artificial sequence
  synthetic
taaaaatctctagcagtggc

SEQ ID NO: 27107 - DNA, 20 bp, Artificial sequence
  synthetic
taaaaatctctaccagtggc

SEQ ID NO: 27108 - DNA, 20 bp, Artificial sequence
  synthetic
taaaaatctctagaagtggc

SEQ ID NO: 27109 - DNA, 20 bp, Artificial sequence
  synthetic
aatcaaaagaaggttgccaa

SEQ ID NO: 27110 - DNA, 20 bp, Artificial sequence
  synthetic
aaagcaaagaaggatgtcaa

SEQ ID NO: 27111 - DNA, 20 bp, Artificial sequence
  synthetic
aaagtaggaccagaggagat

SEQ ID NO: 27112 - DNA, 20 bp, Artificial sequence
  synthetic
ctcagacctctttagtccgg

SEQ ID NO: 27113 - DNA, 20 bp, Artificial sequence
  synthetic
ctcagatattaagtgtctgt

SEQ ID NO: 27114 - DNA, 20 bp, Artificial sequence
  synthetic
ctcagaccatctggactgag

SEQ ID NO: 27115 - DNA, 20 bp, Artificial sequence
  synthetic
aaagcgaaagtagaaccaga

SEQ ID NO: 27116 - DNA, 20 bp, Artificial sequence
  synthetic
aaagcgaaagtgagaccaga

SEQ ID NO: 27117 - DNA, 20 bp, Artificial sequence
  synthetic
aaagtgaaagtaagaccaga

SEQ ID NO: 27118 - DNA, 20 bp, Artificial sequence
  synthetic
aaaagcgaaagtaaaaccag

SEQ ID NO: 27119 - DNA, 20 bp, Artificial sequence
  synthetic
aaagcgaaagtaagaccaga

SEQ ID NO: 27120 - DNA, 20 bp, Artificial sequence
  synthetic
aaaagcgaaaataaaaccag

SEQ ID NO: 27121 - DNA, 20 bp, Artificial sequence
  synthetic
gaaagtgaaagagaaaccag

SEQ ID NO: 27122 - DNA, 20 bp, Artificial sequence
  synthetic
aaaacgaaagtaaggccaga

SEQ ID NO: 27123 - DNA, 20 bp, Artificial sequence
  synthetic
aaaacgaaagtgtaaccgga

SEQ ID NO: 27124 - DNA, 20 bp, Artificial sequence
  synthetic
aaagcgaaagagaaaccaga

SEQ ID NO: 27125 - DNA, 20 bp, Artificial sequence
  synthetic
aaagcgaaagtaaaaccaga

SEQ ID NO: 27126 - DNA, 20 bp, Artificial sequence
  synthetic
aagcgaaagcgaaagccaga

SEQ ID NO: 27127 - DNA, 20 bp, Artificial sequence
  synthetic
agatcacttagactgaagca

SEQ ID NO: 27128 - DNA, 20 bp, Artificial sequence
  synthetic
ctcaaacccttttagtcagt

SEQ ID NO: 27129 - DNA, 20 bp, Artificial sequence
  synthetic
ctcagaccattctagtcagt

SEQ ID NO: 27130 - DNA, 20 bp, Artificial sequence
  synthetic
actgtctgcgtcatttggtg

SEQ ID NO: 27131 - DNA, 20 bp, Artificial sequence
  synthetic
agaaaacctccgacgcaacg

SEQ ID NO: 27132 - DNA, 20 bp, Artificial sequence
  synthetic
cgaaaacgaaagttccagag

SEQ ID NO: 27133 - DNA, 20 bp, Artificial sequence
  synthetic
cctcagaccatctagactga

SEQ ID NO: 27134 - DNA, 20 bp, Artificial sequence
  synthetic
cctcagacctctttggtcag

SEQ ID NO: 27135 - DNA, 20 bp, Artificial sequence
  synthetic
agcctttttaatactgtctg

SEQ ID NO: 27136 - DNA, 20 bp, Artificial sequence
  synthetic
gaaaacctccgacgcaacgg

SEQ ID NO: 27137 - DNA, 20 bp, Artificial sequence
  synthetic
tccctcagaccactctagac

SEQ ID NO: 27138 - DNA, 20 bp, Artificial sequence
  synthetic
ggactcgaaagcggaagttc

SEQ ID NO: 27139 - DNA, 20 bp, Artificial sequence
  synthetic
ggactcgaaagcgaaagttc

SEQ ID NO: 27140 - DNA, 20 bp, Artificial sequence
  synthetic
gactcgaaagcgaaagttcc

SEQ ID NO: 27141 - DNA, 20 bp, Artificial sequence
  synthetic
ccctcagaccctttagtcag

SEQ ID NO: 27142 - DNA, 20 bp, Artificial sequence
  synthetic
ccctcagaccactctagact

SEQ ID NO: 27143 - DNA, 20 bp, Artificial sequence
  synthetic
atgaattagaaaaagttagg

SEQ ID NO: 27144 - DNA, 20 bp, Artificial sequence
  synthetic
cctcagactactctagacag

SEQ ID NO: 27145 - DNA, 20 bp, Artificial sequence
  synthetic
cctcagaccaatttggtagt

SEQ ID NO: 27146 - DNA, 20 bp, Artificial sequence
  synthetic
cctcagacctctgtagtcag

SEQ ID NO: 27147 - DNA, 20 bp, Artificial sequence
  synthetic
cctcagacctttttggcagt

SEQ ID NO: 27148 - DNA, 20 bp, Artificial sequence
  synthetic
cctcagacctttttggtagt

SEQ ID NO: 27149 - DNA, 20 bp, Artificial sequence
  synthetic
ctcagacaattctagtcagt

SEQ ID NO: 27150 - DNA, 20 bp, Artificial sequence
  synthetic
cctcagaccattttggtagt

SEQ ID NO: 27151 - DNA, 20 bp, Artificial sequence
  synthetic
aaaaatctctagcagtggcg

SEQ ID NO: 27152 - DNA, 20 bp, Artificial sequence
  synthetic
cgaaagtagaaccagagacg

SEQ ID NO: 27153 - DNA, 20 bp, Artificial sequence
  synthetic
ccctcagattaaattatagt

SEQ ID NO: 27154 - DNA, 20 bp, Artificial sequence
  synthetic
cctcagaccttttagtcagt

SEQ ID NO: 27155 - DNA, 20 bp, Artificial sequence
  synthetic
agcgaaaggaaaaccagagg

SEQ ID NO: 27156 - DNA, 20 bp, Artificial sequence
  synthetic
agactgtgtaaaaatctcta

SEQ ID NO: 27157 - DNA, 20 bp, Artificial sequence
  synthetic
gtttgtgtaaaaatctctag

SEQ ID NO: 27158 - DNA, 20 bp, Artificial sequence
  synthetic
acttagtgaaaaatctctag

SEQ ID NO: 27159 - DNA, 20 bp, Artificial sequence
  synthetic
actgtgtaaaaaatctctag

SEQ ID NO: 27160 - DNA, 20 bp, Artificial sequence
  synthetic
atcacttagactgaagcaga

SEQ ID NO: 27161 - DNA, 20 bp, Artificial sequence
  synthetic
cagaccaccttagcagagtg

SEQ ID NO: 27162 - DNA, 20 bp, Artificial sequence
  synthetic
cagactctcgtagtcagtgt

SEQ ID NO: 27163 - DNA, 20 bp, Artificial sequence
  synthetic
ctcagaccaattgtggtagt

SEQ ID NO: 27164 - DNA, 20 bp, Artificial sequence
  synthetic
atgaattagaaaaaattagg

SEQ ID NO: 27165 - DNA, 20 bp, Artificial sequence
  synthetic
ctcgaaagcgaaagttacag

SEQ ID NO: 27166 - DNA, 20 bp, Artificial sequence
  synthetic
cgcgaaagcgaaagtagaac

SEQ ID NO: 27167 - DNA, 20 bp, Artificial sequence
  synthetic
cttgaaagcgaaagtagaac

SEQ ID NO: 27168 - DNA, 20 bp, Artificial sequence
  synthetic
gaagaaaacctccgacgcga

SEQ ID NO: 27169 - DNA, 20 bp, Artificial sequence
  synthetic
actcgaaagcggcggttcca

SEQ ID NO: 27170 - DNA, 20 bp, Artificial sequence
  synthetic
actcgaaagcggaagttcca

SEQ ID NO: 27171 - DNA, 20 bp, Artificial sequence
  synthetic
ctcgaaaacgaaagttccag

SEQ ID NO: 27172 - DNA, 20 bp, Artificial sequence
  synthetic
actcgaaagcgaaagttcca

SEQ ID NO: 27173 - DNA, 20 bp, Artificial sequence
  synthetic
atgaattagaaagaattagg

SEQ ID NO: 27174 - DNA, 20 bp, Artificial sequence
  synthetic
ctcagacccttgttggttgc

SEQ ID NO: 27175 - DNA, 20 bp, Artificial sequence
  synthetic
atgaattagaaaaggttagg

SEQ ID NO: 27176 - DNA, 20 bp, Artificial sequence
  synthetic
gggactcgaaagcgaaagtt

SEQ ID NO: 27177 - DNA, 20 bp, Artificial sequence
  synthetic
ggagcgtggcccctggacgc

SEQ ID NO: 27178 - DNA, 20 bp, Artificial sequence
  synthetic
atccctcagaccactataga

SEQ ID NO: 27179 - DNA, 20 bp, Artificial sequence
  synthetic
atccctcagaccactctaga

SEQ ID NO: 27180 - DNA, 20 bp, Artificial sequence
  synthetic
atccctcagaccactctagg

SEQ ID NO: 27181 - DNA, 20 bp, Artificial sequence
  synthetic
acttgaaagcgaaagtagaa

SEQ ID NO: 27182 - DNA, 20 bp, Artificial sequence
  synthetic
agtcaaaagaaggttgccaa

SEQ ID NO: 27183 - DNA, 20 bp, Artificial sequence
  synthetic
agaccaaagacggttgtcaa

SEQ ID NO: 27184 - DNA, 20 bp, Artificial sequence
  synthetic
agtcaaaagaagggtgtcaa

SEQ ID NO: 27185 - DNA, 20 bp, Artificial sequence
  synthetic
aaagtaaagaaggctgtcaa

SEQ ID NO: 27186 - DNA, 20 bp, Artificial sequence
  synthetic
actcgaaagcgaaagtgcca

SEQ ID NO: 27187 - DNA, 20 bp, Artificial sequence
  synthetic
gaatctctcgacgcacggac

SEQ ID NO: 27188 - DNA, 20 bp, Artificial sequence
  synthetic
agtgtaaaatctctagcagt

SEQ ID NO: 27189 - DNA, 20 bp, Artificial sequence
  synthetic
gactcgaaagcgaaagtgtt

SEQ ID NO: 27190 - DNA, 20 bp, Artificial sequence
  synthetic
gtgtaaaaatctctagcagt

SEQ ID NO: 27191 - DNA, 20 bp, Artificial sequence
  synthetic
tgtggaaaatctctagcagt

SEQ ID NO: 27192 - DNA, 20 bp, Artificial sequence
  synthetic
ctcagacccctttagtcagt

SEQ ID NO: 27193 - DNA, 20 bp, Artificial sequence
  synthetic
ctcagacccttttagccagt

SEQ ID NO: 27194 - DNA, 20 bp, Artificial sequence
  synthetic
ctcagaacattttagtccgg

SEQ ID NO: 27195 - DNA, 20 bp, Artificial sequence
  synthetic
ctcagaacctattagtcagt

SEQ ID NO: 27196 - DNA, 20 bp, Artificial sequence
  synthetic
ctcagacacattttgtccgt

SEQ ID NO: 27197 - DNA, 20 bp, Artificial sequence
  synthetic
ctcagacacttgtagtcagt

SEQ ID NO: 27198 - DNA, 20 bp, Artificial sequence
  synthetic
ctcagacatttgtagtcagt

SEQ ID NO: 27199 - DNA, 20 bp, Artificial sequence
  synthetic
ctcagaccaactttggtagt

SEQ ID NO: 27200 - DNA, 20 bp, Artificial sequence
  synthetic
ctcagaccaatttagtcagg

SEQ ID NO: 27201 - DNA, 20 bp, Artificial sequence
  synthetic
ctcagaccaatttagtccgt

SEQ ID NO: 27202 - DNA, 20 bp, Artificial sequence
  synthetic
ctcagaccatcttagtcagt

SEQ ID NO: 27203 - DNA, 20 bp, Artificial sequence
  synthetic
ctcagaccattcgtggtagt

SEQ ID NO: 27204 - DNA, 20 bp, Artificial sequence
  synthetic
ctcagaccatttagtcagtg

SEQ ID NO: 27205 - DNA, 20 bp, Artificial sequence
  synthetic
ctcagaccattttagtcagt

SEQ ID NO: 27206 - DNA, 20 bp, Artificial sequence
  synthetic
ctcagacccttaaagtcaat

SEQ ID NO: 27207 - DNA, 20 bp, Artificial sequence
  synthetic
ctcagacccttgtagtcagt

SEQ ID NO: 27208 - DNA, 20 bp, Artificial sequence
  synthetic
ctcagacccttttagtcagt

SEQ ID NO: 27209 - DNA, 20 bp, Artificial sequence
  synthetic
ctcagacccttttagtccgt

SEQ ID NO: 27210 - DNA, 20 bp, Artificial sequence
  synthetic
ctcagaccctttttggtagt

SEQ ID NO: 27211 - DNA, 20 bp, Artificial sequence
  synthetic
ctcagacctcggtagtcagt

SEQ ID NO: 27212 - DNA, 20 bp, Artificial sequence
  synthetic
ctcagacctctttagtcagt

SEQ ID NO: 27213 - DNA, 20 bp, Artificial sequence
  synthetic
ctcagactcttttagtcagt

SEQ ID NO: 27214 - DNA, 20 bp, Artificial sequence
  synthetic
ctcagaccatcctagttagt

SEQ ID NO: 27215 - DNA, 20 bp, Artificial sequence
  synthetic
ctcagatccttttagttagc

SEQ ID NO: 27216 - DNA, 20 bp, Artificial sequence
  synthetic
ctcatacccttttagtcagt

SEQ ID NO: 27217 - DNA, 20 bp, Artificial sequence
  synthetic
ctcagaccctattagtcagt

SEQ ID NO: 27218 - DNA, 20 bp, Artificial sequence
  synthetic
ctcagacccttgttggtagt

SEQ ID NO: 27219 - DNA, 20 bp, Artificial sequence
  synthetic
ctcagacccttgttggtatt

SEQ ID NO: 27220 - DNA, 20 bp, Artificial sequence
  synthetic
ctcagacaccttttgtcagt

SEQ ID NO: 27221 - DNA, 20 bp, Artificial sequence
  synthetic
ctcagaccctttgtggtagt

SEQ ID NO: 27222 - DNA, 20 bp, Artificial sequence
  synthetic
ggacgcgaaagcgaaagttc

SEQ ID NO: 27223 - DNA, 20 bp, Artificial sequence
  synthetic
gtagagatccctcagatctc

SEQ ID NO: 27224 - DNA, 20 bp, Artificial sequence
  synthetic
gtagagatccctcagatttg

SEQ ID NO: 27225 - DNA, 20 bp, Artificial sequence
  synthetic
agtaaaaatctctagcagtg

SEQ ID NO: 27226 - DNA, 20 bp, Artificial sequence
  synthetic
cgaacagggacttgaaaacg

SEQ ID NO: 27227 - DNA, 20 bp, Artificial sequence
  synthetic
gaaagtagaaccagaggaga

SEQ ID NO: 27228 - DNA, 20 bp, Artificial sequence
  synthetic
gaaagtagaaccagagaaga

SEQ ID NO: 27229 - DNA, 20 bp, Artificial sequence
  synthetic
ctcagaactcttaaaagtag

SEQ ID NO: 27230 - DNA, 20 bp, Artificial sequence
  synthetic
tcagaccacttgggctgagt

SEQ ID NO: 27231 - DNA, 20 bp, Artificial sequence
  synthetic
aaagtaaaaccagaggagat

SEQ ID NO: 27232 - DNA, 20 bp, Artificial sequence
  synthetic
aagcgaaagtaagaccagag

SEQ ID NO: 27233 - DNA, 20 bp, Artificial sequence
  synthetic
aagcgaaagtagaaccagag

SEQ ID NO: 27234 - DNA, 20 bp, Artificial sequence
  synthetic
aagcgaaagtaagaccggag

SEQ ID NO: 27235 - DNA, 20 bp, Artificial sequence
  synthetic
aagcgaaagtgagaccagag

SEQ ID NO: 27236 - DNA, 20 bp, Artificial sequence
  synthetic
aaacgaaagtaagaccagag

SEQ ID NO: 27237 - DNA, 20 bp, Artificial sequence
  synthetic
aagcgaaagtaaaaccagag

SEQ ID NO: 27238 - DNA, 20 bp, Artificial sequence
  synthetic
aagtgaaagtagaaccagag

SEQ ID NO: 27239 - DNA, 20 bp, Artificial sequence
  synthetic
gactgtgtaaaaatctctag

SEQ ID NO: 27240 - DNA, 20 bp, Artificial sequence
  synthetic
gattgagtaaaaatctctag

SEQ ID NO: 27241 - DNA, 20 bp, Artificial sequence
  synthetic
gacggtgtaaaaatctctag

SEQ ID NO: 27242 - DNA, 20 bp, Artificial sequence
  synthetic
gcttgagtagaaatctctag

SEQ ID NO: 27243 - DNA, 20 bp, Artificial sequence
  synthetic
gtcactgtagaaaatctcta

SEQ ID NO: 27244 - DNA, 20 bp, Artificial sequence
  synthetic
gtcagtgtaaaaatctctag

SEQ ID NO: 27245 - DNA, 20 bp, Artificial sequence
  synthetic
gatcacgtagactgaggcag

SEQ ID NO: 27246 - DNA, 20 bp, Artificial sequence
  synthetic
gatcacttagactgaagcag

SEQ ID NO: 27247 - DNA, 20 bp, Artificial sequence
  synthetic
gatcacatagactgaagcag

SEQ ID NO: 27248 - DNA, 20 bp, Artificial sequence
  synthetic
tcagaccattttagtcagag

SEQ ID NO: 27249 - DNA, 20 bp, Artificial sequence
  synthetic
tcagaccattttagtcagtg

SEQ ID NO: 27250 - DNA, 20 bp, Artificial sequence
  synthetic
tcagacccttttagtcagtg

SEQ ID NO: 27251 - DNA, 20 bp, Artificial sequence
  synthetic
tcagacagctttagtccggg

SEQ ID NO: 27252 - DNA, 20 bp, Artificial sequence
  synthetic
ccctcagatcacgtagactg

SEQ ID NO: 27253 - DNA, 20 bp, Artificial sequence
  synthetic
acgcggcccctggacgcagg

SEQ ID NO: 27254 - DNA, 20 bp, Artificial sequence
  synthetic
tgtgtggaaaatctctagca

SEQ ID NO: 27255 - DNA, 20 bp, Artificial sequence
  synthetic
agacccttttagtcagtgtg

SEQ ID NO: 27256 - DNA, 20 bp, Artificial sequence
  synthetic
tgtgtgactctggtaactag

SEQ ID NO: 27257 - DNA, 20 bp, Artificial sequence
  synthetic
agagcacttcccaacgctgc

SEQ ID NO: 27258 - DNA, 20 bp, Artificial sequence
  synthetic
gcctccctgcgcacccgcag

SEQ ID NO: 27259 - DNA, 20 bp, Artificial sequence
  synthetic
cagccttcgctccaggggaa

SEQ ID NO: 27260 - DNA, 20 bp, Artificial sequence
  synthetic
cagccttcgctctaggggaa

SEQ ID NO: 27261 - DNA, 20 bp, Artificial sequence
  synthetic
aagccttcatccttctgggt

SEQ ID NO: 27262 - DNA, 20 bp, Artificial sequence
  synthetic
gcacagagtcggcgctccct

SEQ ID NO: 27263 - DNA, 20 bp, Artificial sequence
  synthetic
acacattggactcgctgggc

SEQ ID NO: 27264 - DNA, 20 bp, Artificial sequence
  synthetic
acacgttggactggctgggc

SEQ ID NO: 27265 - DNA, 20 bp, Artificial sequence
  synthetic
acacgttggattcgctgggc

SEQ ID NO: 27266 - DNA, 20 bp, Artificial sequence
  synthetic
gaagacaccagtgggcccgt

SEQ ID NO: 27267 - DNA, 20 bp, Artificial sequence
  synthetic
ccgccaggcacttctttccg

SEQ ID NO: 27268 - DNA, 20 bp, Artificial sequence
  synthetic
acttttttcacatatcaact

SEQ ID NO: 27269 - DNA, 20 bp, Artificial sequence
  synthetic
ttggggtgtttcgcgagtgt

SEQ ID NO: 27270 - DNA, 20 bp, Artificial sequence
  synthetic
gaagatagtctccacttttt

SEQ ID NO: 27271 - DNA, 20 bp, Artificial sequence
  synthetic
tcttactggtgtgaggattt

SEQ ID NO: 27272 - DNA, 20 bp, Artificial sequence
  synthetic
ggcaggatgcgctaccgggc

SEQ ID NO: 27273 - DNA, 20 bp, Artificial sequence
  synthetic
aatcaggctcaggttctgag

SEQ ID NO: 27274 - DNA, 20 bp, Artificial sequence
  synthetic
gtttccttggttttaggtgc

SEQ ID NO: 27275 - DNA, 20 bp, Artificial sequence
  synthetic
taatacattctttttagccg

SEQ ID NO: 27276 - DNA, 20 bp, Artificial sequence
  synthetic
cccagcgctttggcttctct

SEQ ID NO: 27277 - DNA, 20 bp, Artificial sequence
  synthetic
tgcctcatgacctactcggc

SEQ ID NO: 27278 - DNA, 20 bp, Artificial sequence
  synthetic
cgttacggatcggcttactc

SEQ ID NO: 27279 - DNA, 20 bp, Artificial sequence
  synthetic
cgttacgaatcggcttactc

SEQ ID NO: 27280 - DNA, 20 bp, Artificial sequence
  synthetic
cgttacggatcggtttactc

SEQ ID NO: 27281 - DNA, 20 bp, Artificial sequence
  synthetic
agtcttcagcggcgctggct

SEQ ID NO: 27282 - DNA, 20 bp, Artificial sequence
  synthetic
aggaactggccggggtccgc

SEQ ID NO: 27283 - DNA, 20 bp, Artificial sequence
  synthetic
tcctcagcttctcatccctg

SEQ ID NO: 27284 - DNA, 20 bp, Artificial sequence
  synthetic
tcctcggcttctcatccctg

SEQ ID NO: 27285 - DNA, 20 bp, Artificial sequence
  synthetic
ggcagccgccgcttcccctt

SEQ ID NO: 27286 - DNA, 20 bp, Artificial sequence
  synthetic
gacctcgcgagccttccgca

SEQ ID NO: 27287 - DNA, 20 bp, Artificial sequence
  synthetic
cattgttttatacatagcac

SEQ ID NO: 27288 - DNA, 20 bp, Artificial sequence
  synthetic
ttcacggttcccacccagga

SEQ ID NO: 27289 - DNA, 20 bp, Artificial sequence
  synthetic
ttcacggttcccatccagga

SEQ ID NO: 27290 - DNA, 20 bp, Artificial sequence
  synthetic
ttcatggttcccacccagga

SEQ ID NO: 27291 - DNA, 20 bp, Artificial sequence
  synthetic
ctcccgcaacttgcggagct

SEQ ID NO: 27292 - DNA, 20 bp, Artificial sequence
  synthetic
ccagtagaatggccaggaca

SEQ ID NO: 27293 - DNA, 20 bp, Artificial sequence
  synthetic
gggttcgcgcgccctccccc

SEQ ID NO: 27294 - DNA, 20 bp, Artificial sequence
  synthetic
cttggccctccaactccttt

SEQ ID NO: 27295 - DNA, 20 bp, Artificial sequence
  synthetic
cacaagcgacacaaatgaac

SEQ ID NO: 27296 - DNA, 20 bp, Artificial sequence
  synthetic
aagtctccgccggaccctcc

SEQ ID NO: 27297 - DNA, 20 bp, Artificial sequence
  synthetic
tgtgaattactgtctcacag

SEQ ID NO: 27298 - DNA, 20 bp, Artificial sequence
  synthetic
gcactggaacttacaacacc

SEQ ID NO: 27299 - DNA, 20 bp, Artificial sequence
  synthetic
gcaaggcgccacgcaaacag

SEQ ID NO: 27300 - DNA, 20 bp, Artificial sequence
  synthetic
gtctgtgtcttttggctccg

SEQ ID NO: 27301 - DNA, 20 bp, Artificial sequence
  synthetic
ccggagcccggggcgtccgc

SEQ ID NO: 27302 - DNA, 20 bp, Artificial sequence
  synthetic
atccctcatccttcatccct

SEQ ID NO: 27303 - DNA, 20 bp, Artificial sequence
  synthetic
agtatgttctgccacgttcc

SEQ ID NO: 27304 - DNA, 20 bp, Artificial sequence
  synthetic
ggcgtgctctcttccctgag

SEQ ID NO: 27305 - DNA, 20 bp, Artificial sequence
  synthetic
cctttgtgaaagcaaagatg

SEQ ID NO: 27306 - DNA, 20 bp, Artificial sequence
  synthetic
cctttttgaaagcaaagatg

SEQ ID NO: 27307 - DNA, 20 bp, Artificial sequence
  synthetic
cgtttttgaaagcaaagatg

SEQ ID NO: 27308 - DNA, 20 bp, Artificial sequence
  synthetic
gctttgtgaaagcaaagatg

SEQ ID NO: 27309 - DNA, 20 bp, Artificial sequence
  synthetic
gctttttgaaagcaaagatg

SEQ ID NO: 27310 - DNA, 20 bp, Artificial sequence
  synthetic
ggcgcgcgccccggggcggg

SEQ ID NO: 27311 - DNA, 20 bp, Artificial sequence
  synthetic
aacgcgcacgcgcttaagga

SEQ ID NO: 27312 - DNA, 20 bp, Artificial sequence
  synthetic
tccagcgatgccgccccagc

SEQ ID NO: 27313 - DNA, 20 bp, Artificial sequence
  synthetic
tgttgctgagttggtctctt

SEQ ID NO: 27314 - DNA, 20 bp, Artificial sequence
  synthetic
gaggttttggcagctctgga

SEQ ID NO: 27315 - DNA, 20 bp, Artificial sequence
  synthetic
cacagccccaaccgccgccg

SEQ ID NO: 27316 - DNA, 20 bp, Artificial sequence
  synthetic
aaagcgcgcgagcaagatgg

SEQ ID NO: 27317 - DNA, 20 bp, Artificial sequence
  synthetic
ggtccacggggaacccgaag

SEQ ID NO: 27318 - DNA, 20 bp, Artificial sequence
  synthetic
ggtccacggggaacctgaag

SEQ ID NO: 27319 - DNA, 20 bp, Artificial sequence
  synthetic
ctggagcctccagagggctg

SEQ ID NO: 27320 - DNA, 20 bp, Artificial sequence
  synthetic
tgagcacagaaccggaaact

SEQ ID NO: 27321 - DNA, 20 bp, Artificial sequence
  synthetic
ttaccgtggcgagttccgcg

SEQ ID NO: 27322 - DNA, 20 bp, Artificial sequence
  synthetic
tccccaggctcacgagcccc

SEQ ID NO: 27323 - DNA, 20 bp, Artificial sequence
  synthetic
caggggagcgagcccggccc

SEQ ID NO: 27324 - DNA, 20 bp, Artificial sequence
  synthetic
cgacgttgacttcgaaattg

SEQ ID NO: 27325 - DNA, 20 bp, Artificial sequence
  synthetic
tttttgaggctgcgcactcg

SEQ ID NO: 27326 - DNA, 20 bp, Artificial sequence
  synthetic
tctcttcctttctgggctcg

SEQ ID NO: 27327 - DNA, 20 bp, Artificial sequence
  synthetic
ttcttccgcttcctgtacca

SEQ ID NO: 27328 - DNA, 20 bp, Artificial sequence
  synthetic
ggctgaaggacttggggagc

SEQ ID NO: 27329 - DNA, 20 bp, Artificial sequence
  synthetic
cgggtcagagcccctttttt

SEQ ID NO: 27330 - DNA, 20 bp, Artificial sequence
  synthetic
accggccgccagcccatctg

SEQ ID NO: 27331 - DNA, 20 bp, Artificial sequence
  synthetic
accacccaggtagggggtta

SEQ ID NO: 27332 - DNA, 20 bp, Artificial sequence
  synthetic
atcacccaggtagggggtta

SEQ ID NO: 27333 - DNA, 20 bp, Artificial sequence
  synthetic
tattgtaaatattttatgaa

SEQ ID NO: 27334 - DNA, 20 bp, Artificial sequence
  synthetic
ggcagcatggcggcgggggc

SEQ ID NO: 27335 - DNA, 20 bp, Artificial sequence
  synthetic
ttgggggcctttccagaaaa

SEQ ID NO: 27336 - DNA, 20 bp, Artificial sequence
  synthetic
ttcccacatcggatcgcagg

SEQ ID NO: 27337 - DNA, 20 bp, Artificial sequence
  synthetic
cctgggaagtggccgcagag

SEQ ID NO: 27338 - DNA, 20 bp, Artificial sequence
  synthetic
ggctcaccatggaccgctgg

SEQ ID NO: 27339 - DNA, 20 bp, Artificial sequence
  synthetic
ccatcccggcagtcgtggct

SEQ ID NO: 27340 - DNA, 20 bp, Artificial sequence
  synthetic
tatgtatgtgtatgtatgtg

SEQ ID NO: 27341 - DNA, 20 bp, Artificial sequence
  synthetic
gaggcggggtttatagcccg

SEQ ID NO: 27342 - DNA, 20 bp, Artificial sequence
  synthetic
ccctgcccacccgcggaaac

SEQ ID NO: 27343 - DNA, 20 bp, Artificial sequence
  synthetic
ccaggactggtttctgtaag

SEQ ID NO: 27344 - DNA, 20 bp, Artificial sequence
  synthetic
gagatgctaagcgtcaccga

SEQ ID NO: 27345 - DNA, 20 bp, Artificial sequence
  synthetic
gaggtgccaagcgtcaccga

SEQ ID NO: 27346 - DNA, 20 bp, Artificial sequence
  synthetic
gaggtgctaagcgtcaccga

SEQ ID NO: 27347 - DNA, 20 bp, Artificial sequence
  synthetic
cctcgccgcaccacacacag

SEQ ID NO: 27348 - DNA, 20 bp, Artificial sequence
  synthetic
ttctttttctttttttccca

SEQ ID NO: 27349 - DNA, 20 bp, Artificial sequence
  synthetic
gtggggaggctattctgccc

SEQ ID NO: 27350 - DNA, 20 bp, Artificial sequence
  synthetic
gcgcttcattccttcttcca

SEQ ID NO: 27351 - DNA, 20 bp, Artificial sequence
  synthetic
cgccccgtgcaggctgtgga

SEQ ID NO: 27352 - DNA, 20 bp, Artificial sequence
  synthetic
gccacagccgcaacgccacc

SEQ ID NO: 27353 - DNA, 20 bp, Artificial sequence
  synthetic
gcgacagccgcaacgccacc

SEQ ID NO: 27354 - DNA, 20 bp, Artificial sequence
  synthetic
ctcccagcaaccggtctggc

SEQ ID NO: 27355 - DNA, 20 bp, Artificial sequence
  synthetic
ctgggcagctggacactggg

SEQ ID NO: 27356 - DNA, 20 bp, Artificial sequence
  synthetic
ctcttgagatctccggttgg

SEQ ID NO: 27357 - DNA, 20 bp, Artificial sequence
  synthetic
ctaatgcccaggaacatggc

SEQ ID NO: 27358 - DNA, 20 bp, Artificial sequence
  synthetic
gagatgattaaggccccgct

SEQ ID NO: 27359 - DNA, 20 bp, Artificial sequence
  synthetic
gtgggttgcaggaggtgctt

SEQ ID NO: 27360 - DNA, 20 bp, Artificial sequence
  synthetic
gtgggttgcaggtggtgctt

SEQ ID NO: 27361 - DNA, 20 bp, Artificial sequence
  synthetic
cgagtggcggctgcagcagc

SEQ ID NO: 27362 - DNA, 20 bp, Artificial sequence
  synthetic
aaccatgggctgctgtggct

SEQ ID NO: 27363 - DNA, 20 bp, Artificial sequence
  synthetic
ccggaggcgggagtcacagg

SEQ ID NO: 27364 - DNA, 20 bp, Artificial sequence
  synthetic
gcacaaggtgtcttttggta

SEQ ID NO: 27365 - DNA, 20 bp, Artificial sequence
  synthetic
gaaaagcggcccgacctgct

SEQ ID NO: 27366 - DNA, 20 bp, Artificial sequence
  synthetic
gcataccagatctcaccaga

SEQ ID NO: 27367 - DNA, 20 bp, Artificial sequence
  synthetic
cagcgaagtctactcccctc

SEQ ID NO: 27368 - DNA, 20 bp, Artificial sequence
  synthetic
ccatgcctgaaccggcaaaa

SEQ ID NO: 27369 - DNA, 20 bp, Artificial sequence
  synthetic
actagttttgttagatagtc

SEQ ID NO: 27370 - DNA, 20 bp, Artificial sequence
  synthetic
gctccagcgccagcgcagcc

SEQ ID NO: 27371 - DNA, 20 bp, Artificial sequence
  synthetic
ttaagccacaaaaaagccac

SEQ ID NO: 27372 - DNA, 20 bp, Artificial sequence
  synthetic
tgggatctggctacgccaga

SEQ ID NO: 27373 - DNA, 20 bp, Artificial sequence
  synthetic
gacgtcatcggggcgccgga

SEQ ID NO: 27374 - DNA, 20 bp, Artificial sequence
  synthetic
ggctaaagctgggagactga

SEQ ID NO: 27375 - DNA, 20 bp, Artificial sequence
  synthetic
cgggaccttcgcgacacacc

SEQ ID NO: 27376 - DNA, 20 bp, Artificial sequence
  synthetic
ccttgggaagaggatgatcc

SEQ ID NO: 27377 - DNA, 20 bp, Artificial sequence
  synthetic
caagtcctcggcagcctgat

SEQ ID NO: 27378 - DNA, 20 bp, Artificial sequence
  synthetic
gccccccaggctcccagacc

SEQ ID NO: 27379 - DNA, 20 bp, Artificial sequence
  synthetic
gactaccactgctttttcct

SEQ ID NO: 27380 - DNA, 20 bp, Artificial sequence
  synthetic
acttgagtgagatgagagag

SEQ ID NO: 27381 - DNA, 20 bp, Artificial sequence
  synthetic
ctccattctgggctcttgcc

SEQ ID NO: 27382 - DNA, 20 bp, Artificial sequence
  synthetic
gggacagcagagaagaaact

SEQ ID NO: 27383 - DNA, 20 bp, Artificial sequence
  synthetic
gatttgcaacatcctcaaag

SEQ ID NO: 27384 - DNA, 20 bp, Artificial sequence
  synthetic
tcctcctcccttgtcttaac

SEQ ID NO: 27385 - DNA, 20 bp, Artificial sequence
  synthetic
tctctggaagagaaaggaag

SEQ ID NO: 27386 - DNA, 20 bp, Artificial sequence
  synthetic
gtgtgttttgctctccagcc

SEQ ID NO: 27387 - DNA, 20 bp, Artificial sequence
  synthetic
aacccagaagtctcaagttt

SEQ ID NO: 27388 - DNA, 20 bp, Artificial sequence
  synthetic
ccattcaccggagcgcgcag

SEQ ID NO: 27389 - DNA, 20 bp, Artificial sequence
  synthetic
cgctgttgagaagctacccg

SEQ ID NO: 27390 - DNA, 20 bp, Artificial sequence
  synthetic
agaaaggaggagggcgctcc

SEQ ID NO: 27391 - DNA, 20 bp, Artificial sequence
  synthetic
gtgtgcccgctctccaagaa

SEQ ID NO: 27392 - DNA, 20 bp, Artificial sequence
  synthetic
ctgcttggatggtgtcttcc

SEQ ID NO: 27393 - DNA, 20 bp, Artificial sequence
  synthetic
attacgctctctacggcctg

SEQ ID NO: 27394 - DNA, 20 bp, Artificial sequence
  synthetic
acacgaagcttgcttctgcc

SEQ ID NO: 27395 - DNA, 20 bp, Artificial sequence
  synthetic
tgtggcgggatagttttcgg

SEQ ID NO: 27396 - DNA, 20 bp, Artificial sequence
  synthetic
agcgtgggctgacgcctcgc

SEQ ID NO: 27397 - DNA, 20 bp, Artificial sequence
  synthetic
tactcggagactgcgccgcg

SEQ ID NO: 27398 - DNA, 20 bp, Artificial sequence
  synthetic
tcttctcgcggatccagtgt

SEQ ID NO: 27399 - DNA, 20 bp, Artificial sequence
  synthetic
tgtgtgtccctctgagagtt

SEQ ID NO: 27400 - DNA, 20 bp, Artificial sequence
  synthetic
tagcgttcgtctggagtagc

SEQ ID NO: 27401 - DNA, 20 bp, Artificial sequence
  synthetic
gcagtactcgctgggctgag

SEQ ID NO: 27402 - DNA, 20 bp, Artificial sequence
  synthetic
tgtctcctccacctagcagt

SEQ ID NO: 27403 - DNA, 20 bp, Artificial sequence
  synthetic
gtcccttcttagctctcgcc

SEQ ID NO: 27404 - DNA, 20 bp, Artificial sequence
  synthetic
ctagctgctcgcacaggact

SEQ ID NO: 27405 - DNA, 20 bp, Artificial sequence
  synthetic
aggctgaaccacaaaaggcc

SEQ ID NO: 27406 - DNA, 20 bp, Artificial sequence
  synthetic
ggaaccaaggtgccagtgag

SEQ ID NO: 27407 - DNA, 20 bp, Artificial sequence
  synthetic
ccactccgccagaaggtcgc

SEQ ID NO: 27408 - DNA, 20 bp, Artificial sequence
  synthetic
aattcttctgtgggatcaga

SEQ ID NO: 27409 - DNA, 20 bp, Artificial sequence
  synthetic
ccagcgaccctaaagcttcc

SEQ ID NO: 27410 - DNA, 20 bp, Artificial sequence
  synthetic
tggcctaggctttgcctatt

SEQ ID NO: 27411 - DNA, 20 bp, Artificial sequence
  synthetic
atgaaagatgtacatgactt

SEQ ID NO: 27412 - DNA, 20 bp, Artificial sequence
  synthetic
cgacgcgtctttgtggtaac

SEQ ID NO: 27413 - DNA, 20 bp, Artificial sequence
  synthetic
attcctttggctcctccgaa

SEQ ID NO: 27414 - DNA, 20 bp, Artificial sequence
  synthetic
cagccattcctgaggaggac

SEQ ID NO: 27415 - DNA, 20 bp, Artificial sequence
  synthetic
taacccgctgaaagtttctc

SEQ ID NO: 27416 - DNA, 20 bp, Artificial sequence
  synthetic
tgctgctggtaacagggcct

SEQ ID NO: 27417 - DNA, 20 bp, Artificial sequence
  synthetic
tggaagcggatcgcgtggag

SEQ ID NO: 27418 - DNA, 20 bp, Artificial sequence
  synthetic
cccagatcttctcaactgga

SEQ ID NO: 27419 - DNA, 20 bp, Artificial sequence
  synthetic
gctggtaacagggccttgcc

SEQ ID NO: 27420 - DNA, 20 bp, Artificial sequence
  synthetic
ctgagacggccttggccgga

SEQ ID NO: 27421 - DNA, 20 bp, Artificial sequence
  synthetic
ggctcttctcggcgtgctgc

SEQ ID NO: 27422 - DNA, 20 bp, Artificial sequence
  synthetic
cccacgagccgaggcctcct

SEQ ID NO: 27423 - DNA, 20 bp, Artificial sequence
  synthetic
tgggctgctgcgcgccgcct

SEQ ID NO: 27424 - DNA, 20 bp, Artificial sequence
  synthetic
ccctgagccccagatctgac

SEQ ID NO: 27425 - DNA, 20 bp, Artificial sequence
  synthetic
ggcgcaacccacggctgctg

SEQ ID NO: 27426 - DNA, 20 bp, Artificial sequence
  synthetic
taggggcttcatctctctgc

SEQ ID NO: 27427 - DNA, 20 bp, Artificial sequence
  synthetic
accctagagaaatgagttgt

SEQ ID NO: 27428 - DNA, 20 bp, Artificial sequence
  synthetic
agttggaatgaatgatcaga

SEQ ID NO: 27429 - DNA, 20 bp, Artificial sequence
  synthetic
aggcggtagagcggagaaag

SEQ ID NO: 27430 - DNA, 20 bp, Artificial sequence
  synthetic
gttttaatagacctacggca

SEQ ID NO: 27431 - DNA, 20 bp, Artificial sequence
  synthetic
gctagcccgcagcgctcggc

SEQ ID NO: 27432 - DNA, 20 bp, Artificial sequence
  synthetic
ctcccgctgcgaagcagcgc

SEQ ID NO: 27433 - DNA, 20 bp, Artificial sequence
  synthetic
tcctgtgtgaaattgcttct

SEQ ID NO: 27434 - DNA, 20 bp, Artificial sequence
  synthetic
tgatgatttgtcattctagt

SEQ ID NO: 27435 - DNA, 20 bp, Artificial sequence
  synthetic
aagcgggtcctacgcacgct

SEQ ID NO: 27436 - DNA, 20 bp, Artificial sequence
  synthetic
cccacagatgctagaagctt

SEQ ID NO: 27437 - DNA, 20 bp, Artificial sequence
  synthetic
gcgttgttctggattcccgt

SEQ ID NO: 27438 - DNA, 20 bp, Artificial sequence
  synthetic
tcaccttgagccgggcgagc

SEQ ID NO: 27439 - DNA, 20 bp, Artificial sequence
  synthetic
ttggcgtcccatgactccac

SEQ ID NO: 27440 - DNA, 20 bp, Artificial sequence
  synthetic
cgcaacggatcgtttccgga

SEQ ID NO: 27441 - DNA, 20 bp, Artificial sequence
  synthetic
gcgaaatgttcttttggggc

SEQ ID NO: 27442 - DNA, 20 bp, Artificial sequence
  synthetic
gataccgagtccgcaacccc

SEQ ID NO: 27443 - DNA, 20 bp, Artificial sequence
  synthetic
actgtcaagacatttcttcg

SEQ ID NO: 27444 - DNA, 20 bp, Artificial sequence
  synthetic
ttgcatctcttcgcctctcg

SEQ ID NO: 27445 - DNA, 20 bp, Artificial sequence
  synthetic
ctaatgccagaatttgaaag

SEQ ID NO: 27446 - DNA, 20 bp, Artificial sequence
  synthetic
tcccgcgacaggaacatggc

SEQ ID NO: 27447 - DNA, 20 bp, Artificial sequence
  synthetic
ctctcagcgaaggccgaaaa

SEQ ID NO: 27448 - DNA, 20 bp, Artificial sequence
  synthetic
ttacagagaaggcagagatc

SEQ ID NO: 27449 - DNA, 20 bp, Artificial sequence
  synthetic
ttacagagggcatcacctag

SEQ ID NO: 27450 - DNA, 20 bp, Artificial sequence
  synthetic
acttgtgaaaggcagagatc

SEQ ID NO: 27451 - DNA, 20 bp, Artificial sequence
  synthetic
tgggacaagtgaaaatgtct

SEQ ID NO: 27452 - DNA, 20 bp, Artificial sequence
  synthetic
acctgcaggcattttgtgaa

SEQ ID NO: 27453 - DNA, 20 bp, Artificial sequence
  synthetic
tgtgcgggtttaataaaaaa

SEQ ID NO: 27454 - DNA, 20 bp, Artificial sequence
  synthetic
cccggcccaaccaagtttaa

SEQ ID NO: 27455 - DNA, 20 bp, Artificial sequence
  synthetic
aaacttaatgatctaagcgt

SEQ ID NO: 27456 - DNA, 20 bp, Artificial sequence
  synthetic
cattgttcccagccggatcc

SEQ ID NO: 27457 - DNA, 20 bp, Artificial sequence
  synthetic
gtaaaccgatcagatctagt

SEQ ID NO: 27458 - DNA, 20 bp, Artificial sequence
  synthetic
cgagcctcccaagatggcgg

SEQ ID NO: 27459 - DNA, 20 bp, Artificial sequence
  synthetic
ctgggtggtctaagtcctga

SEQ ID NO: 27460 - DNA, 20 bp, Artificial sequence
  synthetic
ctgggtggatctttaaaccc

SEQ ID NO: 27461 - DNA, 20 bp, Artificial sequence
  synthetic
gcataacttctaagtcctga

SEQ ID NO: 27462 - DNA, 20 bp, Artificial sequence
  synthetic
tagtggttcgcgcaacacgc

SEQ ID NO: 27463 - DNA, 20 bp, Artificial sequence
  synthetic
ggagccggctcccgggcgcg

SEQ ID NO: 27464 - DNA, 20 bp, Artificial sequence
  synthetic
tggaggttcttgtctcccct

SEQ ID NO: 27465 - DNA, 20 bp, Artificial sequence
  synthetic
accagtagcaaatgagatga

SEQ ID NO: 27466 - DNA, 20 bp, Artificial sequence
  synthetic
ttatctctccacgaatccag

SEQ ID NO: 27467 - DNA, 20 bp, Artificial sequence
  synthetic
cctcactaccacgaatccag

SEQ ID NO: 27468 - DNA, 20 bp, Artificial sequence
  synthetic
ctctcaccattgcaacagta

SEQ ID NO: 27469 - DNA, 20 bp, Artificial sequence
  synthetic
tttgtttttggcggaactac

SEQ ID NO: 27470 - DNA, 20 bp, Artificial sequence
  synthetic
aaatggggcaaataagaatt

SEQ ID NO: 27471 - DNA, 20 bp, Artificial sequence
  synthetic
ttgaacaccaaataagaatt

SEQ ID NO: 27472 - DNA, 20 bp, Artificial sequence
  synthetic
tgcagcagttcttggtattg

SEQ ID NO: 27473 - DNA, 20 bp, Artificial sequence
  synthetic
gagtaaaagggatttcaggc

SEQ ID NO: 27474 - DNA, 20 bp, Artificial sequence
  synthetic
gagtaaaatcatgcaagatg

SEQ ID NO: 27475 - DNA, 20 bp, Artificial sequence
  synthetic
cctcccactgtctcttgtat

SEQ ID NO: 27476 - DNA, 20 bp, Artificial sequence
  synthetic
agatatttccaatgcgacgg

SEQ ID NO: 27477 - DNA, 20 bp, Artificial sequence
  synthetic
agatatttgtgcctaatgca

SEQ ID NO: 27478 - DNA, 20 bp, Artificial sequence
  synthetic
tttatatcttctgtatatta

SEQ ID NO: 27479 - DNA, 20 bp, Artificial sequence
  synthetic
atgtgtgtgtatgtatatgt

SEQ ID NO: 27480 - DNA, 20 bp, Artificial sequence
  synthetic
tgaaagcgtttgtgttcatc

SEQ ID NO: 27481 - DNA, 20 bp, Artificial sequence
  synthetic
gcctctctttgaacctctcc

SEQ ID NO: 27482 - DNA, 20 bp, Artificial sequence
  synthetic
ttagtatcttgaacctctcc

SEQ ID NO: 27483 - DNA, 20 bp, Artificial sequence
  synthetic
tcccgggggggtcccgcctc

SEQ ID NO: 27484 - DNA, 20 bp, Artificial sequence
  synthetic
gtgttctccgagttcctgtc

SEQ ID NO: 27485 - DNA, 20 bp, Artificial sequence
  synthetic
aaaagggaagaaaaacaaaa

SEQ ID NO: 27486 - DNA, 20 bp, Artificial sequence
  synthetic
aaaagggactctttcagggt

SEQ ID NO: 27487 - DNA, 20 bp, Artificial sequence
  synthetic
tgtcttaacagtggatgcat

SEQ ID NO: 27488 - DNA, 20 bp, Artificial sequence
  synthetic
ctctcatccagtggatgcat

SEQ ID NO: 27489 - DNA, 20 bp, Artificial sequence
  synthetic
ctctcatcggacttgatatg

SEQ ID NO: 27490 - DNA, 20 bp, Artificial sequence
  synthetic
acggtcgggccctggaagga

SEQ ID NO: 27491 - DNA, 20 bp, Artificial sequence
  synthetic
aagcctcttttggcttctct

SEQ ID NO: 27492 - DNA, 20 bp, Artificial sequence
  synthetic
caggctgggctgcaggctct

SEQ ID NO: 27493 - DNA, 20 bp, Artificial sequence
  synthetic
ctgatgcgtgccctactctc

SEQ ID NO: 27494 - DNA, 20 bp, Artificial sequence
  synthetic
agttcactggtgcaatgagg

SEQ ID NO: 27495 - DNA, 20 bp, Artificial sequence
  synthetic
gtggggtaggtgcaatgagg

SEQ ID NO: 27496 - DNA, 20 bp, Artificial sequence
  synthetic
atgagacggacacaccttaa

SEQ ID NO: 27497 - DNA, 20 bp, Artificial sequence
  synthetic
catgccaagacacaccttaa

SEQ ID NO: 27498 - DNA, 20 bp, Artificial sequence
  synthetic
catgccaatggcataacact

SEQ ID NO: 27499 - DNA, 20 bp, Artificial sequence
  synthetic
aggaggctgcgaggagccgg

SEQ ID NO: 27500 - DNA, 20 bp, Artificial sequence
  synthetic
ggatctgcagctgggcaccg

SEQ ID NO: 27501 - DNA, 20 bp, Artificial sequence
  synthetic
ggatctgcagctgggctagc

SEQ ID NO: 27502 - DNA, 20 bp, Artificial sequence
  synthetic
atgctgatgaagataataat

SEQ ID NO: 27503 - DNA, 20 bp, Artificial sequence
  synthetic
cagcaccgctccttgggtcc

SEQ ID NO: 27504 - DNA, 20 bp, Artificial sequence
  synthetic
caggagagcgcggattggtc

SEQ ID NO: 27505 - DNA, 20 bp, Artificial sequence
  synthetic
cctctgctggtgaccagaag

SEQ ID NO: 27506 - DNA, 20 bp, Artificial sequence
  synthetic
gtctacggggtgaccagaag

SEQ ID NO: 27507 - DNA, 20 bp, Artificial sequence
  synthetic
tattctagtacacttaggat

SEQ ID NO: 27508 - DNA, 20 bp, Artificial sequence
  synthetic
cgcggctgcgcttcggtccc

SEQ ID NO: 27509 - DNA, 20 bp, Artificial sequence
  synthetic
gcgaaggccgaaaagaggct

SEQ ID NO: 27510 - DNA, 20 bp, Artificial sequence
  synthetic
gcgaaggcactgtgattctc

SEQ ID NO: 27511 - DNA, 20 bp, Artificial sequence
  synthetic
tagtgctatttttgtattta

SEQ ID NO: 27512 - DNA, 20 bp, Artificial sequence
  synthetic
ctcagaaacacagcaagcga

SEQ ID NO: 27513 - DNA, 20 bp, Artificial sequence
  synthetic
cgctggtaaacatccacacg

SEQ ID NO: 27514 - DNA, 20 bp, Artificial sequence
  synthetic
aacggaaaatcatcggccgt

SEQ ID NO: 27515 - DNA, 20 bp, Artificial sequence
  synthetic
acttttttccgtttcgtagt

SEQ ID NO: 27516 - DNA, 20 bp, Artificial sequence
  synthetic
ctcctggcgccagcgctagg

SEQ ID NO: 27517 - DNA, 20 bp, Artificial sequence
  synthetic
tttctccgggatccaagaga

SEQ ID NO: 27518 - DNA, 20 bp, Artificial sequence
  synthetic
aaaacttaggatccaagaga

SEQ ID NO: 27519 - DNA, 20 bp, Artificial sequence
  synthetic
agtgattggcctgtcgtaac

SEQ ID NO: 27520 - DNA, 20 bp, Artificial sequence
  synthetic
tagtccatgcctgtcgtaac

SEQ ID NO: 27521 - DNA, 20 bp, Artificial sequence
  synthetic
cactatctgctagacctaga

SEQ ID NO: 27522 - DNA, 20 bp, Artificial sequence
  synthetic
tgtggcctcattctgaacaa

SEQ ID NO: 27523 - DNA, 20 bp, Artificial sequence
  synthetic
tgtggccttccaggtggttg

SEQ ID NO: 27524 - DNA, 20 bp, Artificial sequence
  synthetic
aggcagggcggcgcaggatc

SEQ ID NO: 27525 - DNA, 20 bp, Artificial sequence
  synthetic
gaaagcgaaagggaaaccag

SEQ ID NO: 27526 - DNA, 20 bp, Artificial sequence
  synthetic
aggacatcagcgacagcgag

SEQ ID NO: 27527 - DNA, 20 bp, Artificial sequence
  synthetic
cgaattcttatacagtagat

SEQ ID NO: 27528 - DNA, 20 bp, Artificial sequence
  synthetic
aggttaataaattacaagta

SEQ ID NO: 27529 - DNA, 20 bp, Artificial sequence
  synthetic
aggttaatccggcgttgtct

SEQ ID NO: 27530 - DNA, 20 bp, Artificial sequence
  synthetic
aattactcagtttcaaaagg

SEQ ID NO: 27531 - DNA, 20 bp, Artificial sequence
  synthetic
ctgtctctgctgtgtggtgg

SEQ ID NO: 27532 - DNA, 20 bp, Artificial sequence
  synthetic
tcatttggccttaaatggga

SEQ ID NO: 27533 - DNA, 20 bp, Artificial sequence
  synthetic
cagggaccccttaaatggga

SEQ ID NO: 27534 - DNA, 20 bp, Artificial sequence
  synthetic
agccaaacactccattggga

SEQ ID NO: 27535 - DNA, 20 bp, Artificial sequence
  synthetic
gatcaaaagtaagaaaaact

SEQ ID NO: 27536 - DNA, 20 bp, Artificial sequence
  synthetic
ttagtttggtaagaaaaact

SEQ ID NO: 27537 - DNA, 20 bp, Artificial sequence
  synthetic
ctgctggtggggtagggatg

SEQ ID NO: 27538 - DNA, 20 bp, Artificial sequence
  synthetic
ttaggtgtcatacctaagat

SEQ ID NO: 27539 - DNA, 20 bp, Artificial sequence
  synthetic
gcgttgtccatacctaagat

SEQ ID NO: 27540 - DNA, 20 bp, Artificial sequence
  synthetic
tcctgggcctgcccatccaa

SEQ ID NO: 27541 - DNA, 20 bp, Artificial sequence
  synthetic
tcctgggctaatgggcgacg

SEQ ID NO: 27542 - DNA, 20 bp, Artificial sequence
  synthetic
actctgcagcggaaccgact

SEQ ID NO: 27543 - DNA, 20 bp, Artificial sequence
  synthetic
gttaccatatagctattgga

SEQ ID NO: 27544 - DNA, 20 bp, Artificial sequence
  synthetic
ctacaccttggtctttccgg

SEQ ID NO: 27545 - DNA, 20 bp, Artificial sequence
  synthetic
acctccatagaggagcagca

SEQ ID NO: 27546 - DNA, 20 bp, Artificial sequence
  synthetic
ggtcagggcttgggcgctag

SEQ ID NO: 27547 - DNA, 20 bp, Artificial sequence
  synthetic
tcacctctttacaaaaccac

SEQ ID NO: 27548 - DNA, 20 bp, Artificial sequence
  synthetic
agtatagtgccggccgccca

SEQ ID NO: 27549 - DNA, 20 bp, Artificial sequence
  synthetic
ccaccccggccggccgccca

SEQ ID NO: 27550 - DNA, 20 bp, Artificial sequence
  synthetic
gaacagatgatgataaacct

SEQ ID NO: 27551 - DNA, 20 bp, Artificial sequence
  synthetic
ccgtctgggatgataaacct

SEQ ID NO: 27552 - DNA, 20 bp, Artificial sequence
  synthetic
aaatagaagatttatttggg

SEQ ID NO: 27553 - DNA, 20 bp, Artificial sequence
  synthetic
agactcaaaatgtatggccc

SEQ ID NO: 27554 - DNA, 20 bp, Artificial sequence
  synthetic
ttatcataaagcgagttgga

SEQ ID NO: 27555 - DNA, 20 bp, Artificial sequence
  synthetic
aggcagaagtatgcaaagca

SEQ ID NO: 27556 - DNA, 20 bp, Artificial sequence
  synthetic
tccacccggtatgcaaagca

SEQ ID NO: 27557 - DNA, 20 bp, Artificial sequence
  synthetic
tgctcactcagcacaggatc

SEQ ID NO: 27558 - DNA, 20 bp, Artificial sequence
  synthetic
tgctcactggtggggctcct

SEQ ID NO: 27559 - DNA, 20 bp, Artificial sequence
  synthetic
cgggtggaacgagagggaac

SEQ ID NO: 27560 - DNA, 20 bp, Artificial sequence
  synthetic
cgggtggacgagccccacta

SEQ ID NO: 27561 - DNA, 20 bp, Artificial sequence
  synthetic
taccgaacacgagagggaac

SEQ ID NO: 27562 - DNA, 20 bp, Artificial sequence
  synthetic
tagggactgttctcttcaca

SEQ ID NO: 27563 - DNA, 20 bp, Artificial sequence
  synthetic
accttcaggttctcttcaca

SEQ ID NO: 27564 - DNA, 20 bp, Artificial sequence
  synthetic
gaagcgccggcctcggggct

SEQ ID NO: 27565 - DNA, 20 bp, Artificial sequence
  synthetic
atgtgtgatccagatatgct

SEQ ID NO: 27566 - DNA, 20 bp, Artificial sequence
  synthetic
ccgccccttcagccccggct

SEQ ID NO: 27567 - DNA, 20 bp, Artificial sequence
  synthetic
ggaaagacaggtccttaggt

SEQ ID NO: 27568 - DNA, 20 bp, Artificial sequence
  synthetic
ggaaagaccatcgggctcaa

SEQ ID NO: 27569 - DNA, 20 bp, Artificial sequence
  synthetic
agccggggcggaaaggctgc

SEQ ID NO: 27570 - DNA, 20 bp, Artificial sequence
  synthetic
caagcctacggaaaggctgc

SEQ ID NO: 27571 - DNA, 20 bp, Artificial sequence
  synthetic
agcaactaatcgaatcaaca

SEQ ID NO: 27572 - DNA, 20 bp, Artificial sequence
  synthetic
acctactggaaataacataa

SEQ ID NO: 27573 - DNA, 20 bp, Artificial sequence
  synthetic
acacgcttccctggattggc

SEQ ID NO: 27574 - DNA, 20 bp, Artificial sequence
  synthetic
ttcggagaggcagcgcggtt

SEQ ID NO: 27575 - DNA, 20 bp, Artificial sequence
  synthetic
ggaaattggccgcccgagcg

SEQ ID NO: 27576 - DNA, 20 bp, Artificial sequence
  synthetic
gttgacaatcccagtggggg

SEQ ID NO: 27577 - DNA, 20 bp, Artificial sequence
  synthetic
tcttctagactaggtgcgag

SEQ ID NO: 27578 - DNA, 20 bp, Artificial sequence
  synthetic
tcttctagttcgtcccatgt

SEQ ID NO: 27579 - DNA, 20 bp, Artificial sequence
  synthetic
cttcttgtgttttgttgtct

SEQ ID NO: 27580 - DNA, 20 bp, Artificial sequence
  synthetic
atgccaattttctcgagaaa

SEQ ID NO: 27581 - DNA, 20 bp, Artificial sequence
  synthetic
agagcataaggaatctactt

SEQ ID NO: 27582 - DNA, 20 bp, Artificial sequence
  synthetic
acttgaccaggagactgaag

SEQ ID NO: 27583 - DNA, 20 bp, Artificial sequence
  synthetic
cggactgaaggagactgaag

SEQ ID NO: 27584 - DNA, 20 bp, Artificial sequence
  synthetic
attgggcgggctgccacggc

SEQ ID NO: 27585 - DNA, 20 bp, Artificial sequence
  synthetic
gagaatctagttattagaca

SEQ ID NO: 27586 - DNA, 20 bp, Artificial sequence
  synthetic
gagaatctcccatgatttgc

SEQ ID NO: 27587 - DNA, 20 bp, Artificial sequence
  synthetic
ctagccacagctaactgccc

SEQ ID NO: 27588 - DNA, 20 bp, Artificial sequence
  synthetic
gataaataagctaactgccc

SEQ ID NO: 27589 - DNA, 20 bp, Artificial sequence
  synthetic
ctcacagtaaaatagcacag

SEQ ID NO: 27590 - DNA, 20 bp, Artificial sequence
  synthetic
tgttgctattagaggttctt

SEQ ID NO: 27591 - DNA, 20 bp, Artificial sequence
  synthetic
cagaatgcttagaggttctt

SEQ ID NO: 27592 - DNA, 20 bp, Artificial sequence
  synthetic
gacattctttgaagtgaagc

SEQ ID NO: 27593 - DNA, 20 bp, Artificial sequence
  synthetic
cctgggagtctcggaggggg

SEQ ID NO: 27594 - DNA, 20 bp, Artificial sequence
  synthetic
cctgggagtctcggagggga

SEQ ID NO: 27595 - DNA, 20 bp, Artificial sequence
  synthetic
agaccatatctcggagggga

SEQ ID NO: 27596 - DNA, 20 bp, Artificial sequence
  synthetic
gcggcgccgccagagtctga

SEQ ID NO: 27597 - DNA, 20 bp, Artificial sequence
  synthetic
tcgaatcatgcacacctgtt

SEQ ID NO: 27598 - DNA, 20 bp, Artificial sequence
  synthetic
aattcatttgcacacctgtt

SEQ ID NO: 27599 - DNA, 20 bp, Artificial sequence
  synthetic
ttcgtcgatgttggagtgtc

SEQ ID NO: 27600 - DNA, 20 bp, Artificial sequence
  synthetic
ctctacctcaccgtccaggg

SEQ ID NO: 27601 - DNA, 20 bp, Artificial sequence
  synthetic
tctagagccaccgtccaggg

SEQ ID NO: 27602 - DNA, 20 bp, Artificial sequence
  synthetic
tcacccttgacttggggagc

SEQ ID NO: 27603 - DNA, 20 bp, Artificial sequence
  synthetic
tatccgcctacgtatttccg

SEQ ID NO: 27604 - DNA, 20 bp, Artificial sequence
  synthetic
gcgaaaattacgtatttccg

SEQ ID NO: 27605 - DNA, 20 bp, Artificial sequence
  synthetic
ccttcccattcaccctagtc

SEQ ID NO: 27606 - DNA, 20 bp, Artificial sequence
  synthetic
caccgacccggggccggggc

SEQ ID NO: 27607 - DNA, 20 bp, Artificial sequence
  synthetic
ggggagggacatatacttct

SEQ ID NO: 27608 - DNA, 20 bp, Artificial sequence
  synthetic
ggggagggcggggccggggc

SEQ ID NO: 27609 - DNA, 20 bp, Artificial sequence
  synthetic
actggaaccccgcggggttc

SEQ ID NO: 27610 - DNA, 20 bp, Artificial sequence
  synthetic
actggaacttacaacacccg

SEQ ID NO: 27611 - DNA, 20 bp, Artificial sequence
  synthetic
cagtgcggagctcctgagac

SEQ ID NO: 27612 - DNA, 20 bp, Artificial sequence
  synthetic
cagatgaggagactgtcctt

SEQ ID NO: 27613 - DNA, 20 bp, Artificial sequence
  synthetic
agcactgagtttagtaatag

SEQ ID NO: 27614 - DNA, 20 bp, Artificial sequence
  synthetic
aacggaaaccaggtggaacc

SEQ ID NO: 27615 - DNA, 20 bp, Artificial sequence
  synthetic
ggccttaaatgggattctgt

SEQ ID NO: 27616 - DNA, 20 bp, Artificial sequence
  synthetic
ggagcctgggaggctgggtg

SEQ ID NO: 27617 - DNA, 20 bp, Artificial sequence
  synthetic
ccctcccaatcgatatgggc

SEQ ID NO: 27618 - DNA, 20 bp, Artificial sequence
  synthetic
ccctcccagcactatgccct

SEQ ID NO: 27619 - DNA, 20 bp, Artificial sequence
  synthetic
agaggtaggcactatgccct

SEQ ID NO: 27620 - DNA, 20 bp, Artificial sequence
  synthetic
gccaggtgtcctggggactc

SEQ ID NO: 27621 - DNA, 20 bp, Artificial sequence
  synthetic
aaggcagctcctggggactc

SEQ ID NO: 27622 - DNA, 20 bp, Artificial sequence
  synthetic
atcctcctctaaacgcgtgt

SEQ ID NO: 27623 - DNA, 20 bp, Artificial sequence
  synthetic
gcggatgcctaaacgcgtgt

SEQ ID NO: 27624 - DNA, 20 bp, Artificial sequence
  synthetic
agaactactgagaaaaacca

SEQ ID NO: 27625 - DNA, 20 bp, Artificial sequence
  synthetic
gtcactggttaacttaggat

SEQ ID NO: 27626 - DNA, 20 bp, Artificial sequence
  synthetic
ggatctgctctccggcaaag

SEQ ID NO: 27627 - DNA, 20 bp, Artificial sequence
  synthetic
aacatatttctccggcaaag

SEQ ID NO: 27628 - DNA, 20 bp, Artificial sequence
  synthetic
tgtttgggctaagacctggt

SEQ ID NO: 27629 - DNA, 20 bp, Artificial sequence
  synthetic
tgtttgggtatcagggaaaa

SEQ ID NO: 27630 - DNA, 20 bp, Artificial sequence
  synthetic
caatatggccggagctggcc

SEQ ID NO: 27631 - DNA, 20 bp, Artificial sequence
  synthetic
aactatggggtccgtgcgga

SEQ ID NO: 27632 - DNA, 20 bp, Artificial sequence
  synthetic
gcaggcagggtccgtgcgga

SEQ ID NO: 27633 - DNA, 20 bp, Artificial sequence
  synthetic
gtcccaaggcttcccagagc

SEQ ID NO: 27634 - DNA, 20 bp, Artificial sequence
  synthetic
ttagctctgtattaataata

SEQ ID NO: 27635 - DNA, 20 bp, Artificial sequence
  synthetic
attttttaccgaaaggcctg

SEQ ID NO: 27636 - DNA, 20 bp, Artificial sequence
  synthetic
gatgcttccaggagaatcaa

SEQ ID NO: 27637 - DNA, 20 bp, Artificial sequence
  synthetic
ttggagaagaagcactatct

SEQ ID NO: 27638 - DNA, 20 bp, Artificial sequence
  synthetic
gccccggggacttctctctg

SEQ ID NO: 27639 - DNA, 20 bp, Artificial sequence
  synthetic
gcccggggcgcggggtcgcc

SEQ ID NO: 27640 - DNA, 20 bp, Artificial sequence
  synthetic
tcaacctcgaaccgactact

SEQ ID NO: 27641 - DNA, 20 bp, Artificial sequence
  synthetic
cgccgcgggagcggttcgag

SEQ ID NO: 27642 - DNA, 20 bp, Artificial sequence
  synthetic
cgccgcggtgtgaaagtcga

SEQ ID NO: 27643 - DNA, 20 bp, Artificial sequence
  synthetic
ataaatttgagcggttcgag

SEQ ID NO: 27644 - DNA, 20 bp, Artificial sequence
  synthetic
caaggaggtgtacagccctg

SEQ ID NO: 27645 - DNA, 20 bp, Artificial sequence
  synthetic
ttgtactactaactcattaa

SEQ ID NO: 27646 - DNA, 20 bp, Artificial sequence
  synthetic
tgtgcggcgaggccgcccac

SEQ ID NO: 27647 - DNA, 20 bp, Artificial sequence
  synthetic
tgtgcggctccaggtgggct

SEQ ID NO: 27648 - DNA, 20 bp, Artificial sequence
  synthetic
aacatcagacaaagggccgc

SEQ ID NO: 27649 - DNA, 20 bp, Artificial sequence
  synthetic
ggaggacactcgcctaggat

SEQ ID NO: 27650 - DNA, 20 bp, Artificial sequence
  synthetic
aagtgagtctggtctgtggg

SEQ ID NO: 27651 - DNA, 20 bp, Artificial sequence
  synthetic
aagtgagtgcttctgccatc

SEQ ID NO: 27652 - DNA, 20 bp, Artificial sequence
  synthetic
gcaatcacgcttctgccatc

SEQ ID NO: 27653 - DNA, 20 bp, Artificial sequence
  synthetic
atgataggccaagatggcgg

SEQ ID NO: 27654 - DNA, 20 bp, Artificial sequence
  synthetic
cgcaagtccgtggcggaacc

SEQ ID NO: 27655 - DNA, 20 bp, Artificial sequence
  synthetic
tcggacagcacatgttagtc

SEQ ID NO: 27656 - DNA, 20 bp, Artificial sequence
  synthetic
aagaaggtccgggggctgga

SEQ ID NO: 27657 - DNA, 20 bp, Artificial sequence
  synthetic
cttgtgtgtagatctttggt

SEQ ID NO: 27658 - DNA, 20 bp, Artificial sequence
  synthetic
cttgtgtgcgatgggagatg

SEQ ID NO: 27659 - DNA, 20 bp, Artificial sequence
  synthetic
gcccgcaatagatctttggt

SEQ ID NO: 27660 - DNA, 20 bp, Artificial sequence
  synthetic
ccgctcaagatacttgttca

SEQ ID NO: 27661 - DNA, 20 bp, Artificial sequence
  synthetic
ccgctcaatgcctggagatt

SEQ ID NO: 27662 - DNA, 20 bp, Artificial sequence
  synthetic
agggagctaagctcaacgta

SEQ ID NO: 27663 - DNA, 20 bp, Artificial sequence
  synthetic
gttggcggtagttccaaccc

SEQ ID NO: 27664 - DNA, 20 bp, Artificial sequence
  synthetic
ccctaaaacagcaacgacac

SEQ ID NO: 27665 - DNA, 20 bp, Artificial sequence
  synthetic
aaccagtaagggaaccgccg

SEQ ID NO: 27666 - DNA, 20 bp, Artificial sequence
  synthetic
cgaacggcttgttggaatca

SEQ ID NO: 27667 - DNA, 20 bp, Artificial sequence
  synthetic
tagtgctattgttggaatca

SEQ ID NO: 27668 - DNA, 20 bp, Artificial sequence
  synthetic
ttcctccggactcctgcacg

SEQ ID NO: 27669 - DNA, 20 bp, Artificial sequence
  synthetic
aggacacccccgcccccccg

SEQ ID NO: 27670 - DNA, 20 bp, Artificial sequence
  synthetic
aggacaccgttaaaaaagac

SEQ ID NO: 27671 - DNA, 20 bp, Artificial sequence
  synthetic
catttttgcccgcccccccg

SEQ ID NO: 27672 - DNA, 20 bp, Artificial sequence
  synthetic
tgctgtagggccactgtctg

SEQ ID NO: 27673 - DNA, 20 bp, Artificial sequence
  synthetic
ctgcaggaggccactgtctg

SEQ ID NO: 27674 - DNA, 20 bp, Artificial sequence
  synthetic
gcgactgtgtccacggatgg

SEQ ID NO: 27675 - DNA, 20 bp, Artificial sequence
  synthetic
gtatttttaaaacttaggaa

SEQ ID NO: 27676 - DNA, 20 bp, Artificial sequence
  synthetic
acagccttcgctccagggga

SEQ ID NO: 27677 - DNA, 20 bp, Artificial sequence
  synthetic
acagccttgataatcactcg

SEQ ID NO: 27678 - DNA, 20 bp, Artificial sequence
  synthetic
ccgggtaggggagcgcagcg

SEQ ID NO: 27679 - DNA, 20 bp, Artificial sequence
  synthetic
gcgtcggatgttcagagcag

SEQ ID NO: 27680 - DNA, 20 bp, Artificial sequence
  synthetic
caactaattgttcagagcag

SEQ ID NO: 27681 - DNA, 20 bp, Artificial sequence
  synthetic
cggccgtccctgcggtcccg

SEQ ID NO: 27682 - DNA, 20 bp, Artificial sequence
  synthetic
ccaccaaggcggcgcagcgc

SEQ ID NO: 27683 - DNA, 20 bp, Artificial sequence
  synthetic
gagtagctaacgacctgatg

SEQ ID NO: 27684 - DNA, 20 bp, Artificial sequence
  synthetic
gagtagctgggattacaggc

SEQ ID NO: 27685 - DNA, 20 bp, Artificial sequence
  synthetic
cccaaagcacatcttaacct

SEQ ID NO: 27686 - DNA, 20 bp, Artificial sequence
  synthetic
gtatcgtgacatcttaacct

SEQ ID NO: 27687 - DNA, 20 bp, Artificial sequence
  synthetic
cccaaagccatagaggtagc

SEQ ID NO: 27688 - DNA, 20 bp, Artificial sequence
  synthetic
cccaaagcttcatggctgta

SEQ ID NO: 27689 - DNA, 20 bp, Artificial sequence
  synthetic
tactgctacatttttaagac

SEQ ID NO: 27690 - DNA, 20 bp, Artificial sequence
  synthetic
aagaagcgctaagagaggcc

SEQ ID NO: 27691 - DNA, 20 bp, Artificial sequence
  synthetic
tgctggggtcatgatggctc

SEQ ID NO: 27692 - DNA, 20 bp, Artificial sequence
  synthetic
ggctgaagtgtactacgctg

SEQ ID NO: 27693 - DNA, 20 bp, Artificial sequence
  synthetic
tatgcggcgccgactgtgat

SEQ ID NO: 27694 - DNA, 20 bp, Artificial sequence
  synthetic
tcctcggcccgcatattgac

SEQ ID NO: 27695 - DNA, 20 bp, Artificial sequence
  synthetic
tctcctccgggtgatgcttt

SEQ ID NO: 27696 - DNA, 20 bp, Artificial sequence
  synthetic
tctcctcctaaacgccggaa

SEQ ID NO: 27697 - DNA, 20 bp, Artificial sequence
  synthetic
cattcgccgagtttctaaac

SEQ ID NO: 27698 - DNA, 20 bp, Artificial sequence
  synthetic
ggctcagcgagagtgttctt

SEQ ID NO: 27699 - DNA, 20 bp, Artificial sequence
  synthetic
gagaactaggctgcagcagc

SEQ ID NO: 27700 - DNA, 20 bp, Artificial sequence
  synthetic
ctgctgctatagctggattt

SEQ ID NO: 27701 - DNA, 20 bp, Artificial sequence
  synthetic
gtggctaattgataggcagg

SEQ ID NO: 27702 - DNA, 20 bp, Artificial sequence
  synthetic
tcctgtaggaggagaaaacc

SEQ ID NO: 27703 - DNA, 20 bp, Artificial sequence
  synthetic
cttccctgtgctgtgagtgt

SEQ ID NO: 27704 - DNA, 20 bp, Artificial sequence
  synthetic
cttccctgccacagataaag

SEQ ID NO: 27705 - DNA, 20 bp, Artificial sequence
  synthetic
aacaggacgcgcgtgagctc

SEQ ID NO: 27706 - DNA, 20 bp, Artificial sequence
  synthetic
tccagcacaccaggcaaagc

SEQ ID NO: 27707 - DNA, 20 bp, Artificial sequence
  synthetic
tccagcacctgcaaatccag

SEQ ID NO: 27708 - DNA, 20 bp, Artificial sequence
  synthetic
gattgtaaaaaatttctaga

SEQ ID NO: 27709 - DNA, 20 bp, Artificial sequence
  synthetic
gattgtaagggccaagcttg

SEQ ID NO: 27710 - DNA, 20 bp, Artificial sequence
  synthetic
cgcctgcggggccaagcttg

SEQ ID NO: 27711 - DNA, 20 bp, Artificial sequence
  synthetic
aacagctggtttactggtca

SEQ ID NO: 27712 - DNA, 20 bp, Artificial sequence
  synthetic
aacagctgtagcgaccacac

SEQ ID NO: 27713 - DNA, 20 bp, Artificial sequence
  synthetic
ctacatgagagtcctccggc

SEQ ID NO: 27714 - DNA, 20 bp, Artificial sequence
  synthetic
ggctccccgagtcctccggc

SEQ ID NO: 27715 - DNA, 20 bp, Artificial sequence
  synthetic
cgtaatattcttgatcgggc

SEQ ID NO: 27716 - DNA, 20 bp, Artificial sequence
  synthetic
atacagcacgtaacaactgt

SEQ ID NO: 27717 - DNA, 20 bp, Artificial sequence
  synthetic
gctagttgcgtaacaactgt

SEQ ID NO: 27718 - DNA, 20 bp, Artificial sequence
  synthetic
agcaacaatctgagacacat

SEQ ID NO: 27719 - DNA, 20 bp, Artificial sequence
  synthetic
ggggtctgggggtgacattg

SEQ ID NO: 27720 - DNA, 20 bp, Artificial sequence
  synthetic
aaagtactactgaacaaagt

SEQ ID NO: 27721 - DNA, 20 bp, Artificial sequence
  synthetic
ctggtagtcctccggcccct

SEQ ID NO: 27722 - DNA, 20 bp, Artificial sequence
  synthetic
tagtgctatcttaataatta

SEQ ID NO: 27723 - DNA, 20 bp, Artificial sequence
  synthetic
taagactggaggaggaggag

SEQ ID NO: 27724 - DNA, 20 bp, Artificial sequence
  synthetic
ttgagaataggtaagtttct

SEQ ID NO: 27725 - DNA, 20 bp, Artificial sequence
  synthetic
gctgaagaaggctctgtgca

SEQ ID NO: 27726 - DNA, 20 bp, Artificial sequence
  synthetic
cagccaggaatataagctat

SEQ ID NO: 27727 - DNA, 20 bp, Artificial sequence
  synthetic
aagaactgtcgcgcaacttc

SEQ ID NO: 27728 - DNA, 20 bp, Artificial sequence
  synthetic
gtttttatattcgaagtagg

SEQ ID NO: 27729 - DNA, 20 bp, Artificial sequence
  synthetic
ctgcgcccaggtcctcccct

SEQ ID NO: 27730 - DNA, 20 bp, Artificial sequence
  synthetic
taataaatttaagagcagac

SEQ ID NO: 27731 - DNA, 20 bp, Artificial sequence
  synthetic
ctttctttcgattatcatca

SEQ ID NO: 27732 - DNA, 20 bp, Artificial sequence
  synthetic
tacaacagcgattatcatca

SEQ ID NO: 27733 - DNA, 20 bp, Artificial sequence
  synthetic
acgcggtctttctctagacg

SEQ ID NO: 27734 - DNA, 20 bp, Artificial sequence
  synthetic
gccagacctttgtaacaccc

SEQ ID NO: 27735 - DNA, 20 bp, Artificial sequence
  synthetic
aaagcgaattcatggggtct

SEQ ID NO: 27736 - DNA, 20 bp, Artificial sequence
  synthetic
gcgccgcggctcagggagga

SEQ ID NO: 27737 - DNA, 20 bp, Artificial sequence
  synthetic
actagtcactatacaataat

SEQ ID NO: 27738 - DNA, 20 bp, Artificial sequence
  synthetic
ctcttggaacaagataagac

SEQ ID NO: 27739 - DNA, 20 bp, Artificial sequence
  synthetic
actggtcccaggaccggcag

SEQ ID NO: 27740 - DNA, 20 bp, Artificial sequence
  synthetic
cttcgagatagccgccagga

SEQ ID NO: 27741 - DNA, 20 bp, Artificial sequence
  synthetic
gccaccttcctaatgtgttc

SEQ ID NO: 27742 - DNA, 20 bp, Artificial sequence
  synthetic
cagcgattccagaacaacat

SEQ ID NO: 27743 - DNA, 20 bp, Artificial sequence
  synthetic
acttggatttgatcttaatc

SEQ ID NO: 27744 - DNA, 20 bp, Artificial sequence
  synthetic
ttcacggtcgaacgagtatc

SEQ ID NO: 27745 - DNA, 20 bp, Artificial sequence
  synthetic
ttagcgcctaactgagcgtc

SEQ ID NO: 27746 - DNA, 20 bp, Artificial sequence
  synthetic
gaataacaactatgaacagg

SEQ ID NO: 27747 - DNA, 20 bp, Artificial sequence
  synthetic
gaataacagtctcttgacta

SEQ ID NO: 27748 - DNA, 20 bp, Artificial sequence
  synthetic
ccccgggtcaattcttggtt

SEQ ID NO: 27749 - DNA, 20 bp, Artificial sequence
  synthetic
tatgaaaacaattcttggtt

SEQ ID NO: 27750 - DNA, 20 bp, Artificial sequence
  synthetic
tctgggatataagaggcagc

SEQ ID NO: 27751 - DNA, 20 bp, Artificial sequence
  synthetic
gatggcggacgaagaggccg

SEQ ID NO: 27752 - DNA, 20 bp, Artificial sequence
  synthetic
gggcctcgctcaccggcggt

SEQ ID NO: 27753 - DNA, 20 bp, Artificial sequence
  synthetic
acgacgccgactaacgcccc

SEQ ID NO: 27754 - DNA, 20 bp, Artificial sequence
  synthetic
ttgttcgtcacttgtcgaca

SEQ ID NO: 27755 - DNA, 20 bp, Artificial sequence
  synthetic
gcgccctctcaccgcccggc

SEQ ID NO: 27756 - DNA, 20 bp, Artificial sequence
  synthetic
tgcgtgtttgtgattaacta

SEQ ID NO: 27757 - DNA, 20 bp, Artificial sequence
  synthetic
ttgctcgcgccccaaaaaca

SEQ ID NO: 27758 - DNA, 20 bp, Artificial sequence
  synthetic
atgttggatggcagccttga

SEQ ID NO: 27759 - DNA, 20 bp, Artificial sequence
  synthetic
gctgctccattgcaatgctc

SEQ ID NO: 27760 - DNA, 20 bp, Artificial sequence
  synthetic
gctgctcctggcagccttga

SEQ ID NO: 27761 - DNA, 20 bp, Artificial sequence
  synthetic
tctgtgacttcgggtccgta

SEQ ID NO: 27762 - DNA, 20 bp, Artificial sequence
  synthetic
ggcgcgctggagcgttttcc

SEQ ID NO: 27763 - DNA, 20 bp, Artificial sequence
  synthetic
cgtaacccaatgtgtatcta

SEQ ID NO: 27764 - DNA, 20 bp, Artificial sequence
  synthetic
gacacatgtctccgcccctg

SEQ ID NO: 27765 - DNA, 20 bp, Artificial sequence
  synthetic
cagcaccgaatgtcaagatt

SEQ ID NO: 27766 - DNA, 20 bp, Artificial sequence
  synthetic
attttgactggaatttcgga

SEQ ID NO: 27767 - DNA, 20 bp, Artificial sequence
  synthetic
ccggggcgaagggtatgtgg

SEQ ID NO: 27768 - DNA, 20 bp, Artificial sequence
  synthetic
ctttgtttcacttgccatat

SEQ ID NO: 27769 - DNA, 20 bp, Artificial sequence
  synthetic
attattaaacatccaatttg

SEQ ID NO: 27770 - DNA, 20 bp, Artificial sequence
  synthetic
ttgctcgctcagcacaggat

SEQ ID NO: 27771 - DNA, 20 bp, Artificial sequence
  synthetic
ccgctgcaggcccgcgcccg

SEQ ID NO: 27772 - DNA, 20 bp, Artificial sequence
  synthetic
tcaacaccgacttaggttca

SEQ ID NO: 27773 - DNA, 20 bp, Artificial sequence
  synthetic
agtgtcctatttaaaatggg

SEQ ID NO: 27774 - DNA, 20 bp, Artificial sequence
  synthetic
catacccaataaaagattat

SEQ ID NO: 27775 - DNA, 20 bp, Artificial sequence
  synthetic
catacccatccgtctcaggg

SEQ ID NO: 27776 - DNA, 20 bp, Artificial sequence
  synthetic
gagcatcttcattataatca

SEQ ID NO: 27777 - DNA, 20 bp, Artificial sequence
  synthetic
ccgcagaaggttgtcctgta

SEQ ID NO: 27778 - DNA, 20 bp, Artificial sequence
  synthetic
agtatccgcagcagatgtgc

SEQ ID NO: 27779 - DNA, 20 bp, Artificial sequence
  synthetic
agtatccgggttgtcctgta

SEQ ID NO: 27780 - DNA, 20 bp, Artificial sequence
  synthetic
cggcgcgaagcctgcgattc

SEQ ID NO: 27781 - DNA, 20 bp, Artificial sequence
  synthetic
gtgctgtgtgtcctagtcta

SEQ ID NO: 27782 - DNA, 20 bp, Artificial sequence
  synthetic
acaacagctgtcctagtcta

SEQ ID NO: 27783 - DNA, 20 bp, Artificial sequence
  synthetic
ctcccggtgcttaatgcatt

SEQ ID NO: 27784 - DNA, 20 bp, Artificial sequence
  synthetic
tccgccactccggtaggatt

SEQ ID NO: 27785 - DNA, 20 bp, Artificial sequence
  synthetic
gagcgttttcccagtcggcc

SEQ ID NO: 27786 - DNA, 20 bp, Artificial sequence
  synthetic
gggccgaggtaccaaaggcg

SEQ ID NO: 27787 - DNA, 20 bp, Artificial sequence
  synthetic
attatttagtaccaaaggcg

SEQ ID NO: 27788 - DNA, 20 bp, Artificial sequence
  synthetic
tctccaagtcccccggtctc

SEQ ID NO: 27789 - DNA, 20 bp, Artificial sequence
  synthetic
gaaagtgctcccccggtctc

SEQ ID NO: 27790 - DNA, 20 bp, Artificial sequence
  synthetic
tcgtggaagatagtctccac

SEQ ID NO: 27791 - DNA, 20 bp, Artificial sequence
  synthetic
tcgtggaaacatacaagaca

SEQ ID NO: 27792 - DNA, 20 bp, Artificial sequence
  synthetic
ctgcctatgggcgaagtcaa

SEQ ID NO: 27793 - DNA, 20 bp, Artificial sequence
  synthetic
aactaagggggcgaagtcaa

SEQ ID NO: 27794 - DNA, 20 bp, Artificial sequence
  synthetic
caaactccgctattctgccc

SEQ ID NO: 27795 - DNA, 20 bp, Artificial sequence
  synthetic
tgacgctcgcgtgatgacaa

SEQ ID NO: 27796 - DNA, 20 bp, Artificial sequence
  synthetic
atggcagagcaaaaatgtaa

SEQ ID NO: 27797 - DNA, 20 bp, Artificial sequence
  synthetic
ctcaacagagccaacatttc

SEQ ID NO: 27798 - DNA, 20 bp, Artificial sequence
  synthetic
gaatctgcagccaacatttc

SEQ ID NO: 27799 - DNA, 20 bp, Artificial sequence
  synthetic
acaggagacgtcgaacttcg

SEQ ID NO: 27800 - DNA, 20 bp, Artificial sequence
  synthetic
acaggagagcgtactgcggt

SEQ ID NO: 27801 - DNA, 20 bp, Artificial sequence
  synthetic
ggcacgccgcgtactgcggt

SEQ ID NO: 27802 - DNA, 20 bp, Artificial sequence
  synthetic
cctttgggggctacctggct

SEQ ID NO: 27803 - DNA, 20 bp, Artificial sequence
  synthetic
cctttgggttgccatcagcg

SEQ ID NO: 27804 - DNA, 20 bp, Artificial sequence
  synthetic
cctgtgagactgcagccctg

SEQ ID NO: 27805 - DNA, 20 bp, Artificial sequence
  synthetic
cagatgacaacaccgtccac

SEQ ID NO: 27806 - DNA, 20 bp, Artificial sequence
  synthetic
atgattccctactgcgagaa

SEQ ID NO: 27807 - DNA, 20 bp, Artificial sequence
  synthetic
tgagtgccacaagaccaaag

SEQ ID NO: 27808 - DNA, 20 bp, Artificial sequence
  synthetic
aacaactaacaagaccaaag

SEQ ID NO: 27809 - DNA, 20 bp, Artificial sequence
  synthetic
taatttaggcattggaggag

SEQ ID NO: 27810 - DNA, 20 bp, Artificial sequence
  synthetic
cctaaactgcattggaggag

SEQ ID NO: 27811 - DNA, 20 bp, Artificial sequence
  synthetic
gcttcccactgcctagttca

SEQ ID NO: 27812 - DNA, 20 bp, Artificial sequence
  synthetic
ccacccccctttggatcttg

SEQ ID NO: 27813 - DNA, 20 bp, Artificial sequence
  synthetic
gtgcgcgagacgccgccgag

SEQ ID NO: 27814 - DNA, 20 bp, Artificial sequence
  synthetic
aaggagagacagtagctgat

SEQ ID NO: 27815 - DNA, 20 bp, Artificial sequence
  synthetic
aaggagagcattagaaaatg

SEQ ID NO: 27816 - DNA, 20 bp, Artificial sequence
  synthetic
acacgaaaccaaccttcaca

SEQ ID NO: 27817 - DNA, 20 bp, Artificial sequence
  synthetic
caatgcaataattaatcctt

SEQ ID NO: 27818 - DNA, 20 bp, Artificial sequence
  synthetic
ggagccaccggagccccggc

SEQ ID NO: 27819 - DNA, 20 bp, Artificial sequence
  synthetic
ctggccaccggagccccggc

SEQ ID NO: 27820 - DNA, 20 bp, Artificial sequence
  synthetic
aacccttgacaagaggacca

SEQ ID NO: 27821 - DNA, 20 bp, Artificial sequence
  synthetic
atactggataccaggagtta

SEQ ID NO: 27822 - DNA, 20 bp, Artificial sequence
  synthetic
ccgcgcgcgcgcgcgggctt

SEQ ID NO: 27823 - DNA, 20 bp, Artificial sequence
  synthetic
accccgaggtaacacgcgac

SEQ ID NO: 27824 - DNA, 20 bp, Artificial sequence
  synthetic
gaggttttgtaacacgcgac

SEQ ID NO: 27825 - DNA, 20 bp, Artificial sequence
  synthetic
agcgaatgtctctcctggga

SEQ ID NO: 27826 - DNA, 20 bp, Artificial sequence
  synthetic
agacaaatcaaactagactc

SEQ ID NO: 27827 - DNA, 20 bp, Artificial sequence
  synthetic
agacaaatttcgggctcgga

SEQ ID NO: 27828 - DNA, 20 bp, Artificial sequence
  synthetic
tgcaaatgtgccgtttccct

SEQ ID NO: 27829 - DNA, 20 bp, Artificial sequence
  synthetic
agatggcgccggtttactgg

SEQ ID NO: 27830 - DNA, 20 bp, Artificial sequence
  synthetic
agatggcggacaacatgacc

SEQ ID NO: 27831 - DNA, 20 bp, Artificial sequence
  synthetic
cgatcacatcattttcccaa

SEQ ID NO: 27832 - DNA, 20 bp, Artificial sequence
  synthetic
tgggaggcaacccagacaca

SEQ ID NO: 27833 - DNA, 20 bp, Artificial sequence
  synthetic
tgggaggccgtgggctggac

SEQ ID NO: 27834 - DNA, 20 bp, Artificial sequence
  synthetic
ggcaggcgcgggagcagcac

SEQ ID NO: 27835 - DNA, 20 bp, Artificial sequence
  synthetic
ccaggactggtctgagaggg

SEQ ID NO: 27836 - DNA, 20 bp, Artificial sequence
  synthetic
cagactgtcagataaatcgg

SEQ ID NO: 27837 - DNA, 20 bp, Artificial sequence
  synthetic
tgccctaccgttgcgtgagg

SEQ ID NO: 27838 - DNA, 20 bp, Artificial sequence
  synthetic
gtagtgggcgttgcgtgagg

SEQ ID NO: 27839 - DNA, 20 bp, Artificial sequence
  synthetic
gtagtggggagacaaactca

SEQ ID NO: 27840 - DNA, 20 bp, Artificial sequence
  synthetic
gtaggggaccaacacgtagg

SEQ ID NO: 27841 - DNA, 20 bp, Artificial sequence
  synthetic
tctaccccccaacacgtagg

SEQ ID NO: 27842 - DNA, 20 bp, Artificial sequence
  synthetic
gcctccacgcccaccacctc

SEQ ID NO: 27843 - DNA, 20 bp, Artificial sequence
  synthetic
taagccctgagtacagggta

SEQ ID NO: 27844 - DNA, 20 bp, Artificial sequence
  synthetic
gctgaagccgctgcccctgc

SEQ ID NO: 27845 - DNA, 20 bp, Artificial sequence
  synthetic
ccggagagcgccagggcctg

SEQ ID NO: 27846 - DNA, 20 bp, Artificial sequence
  synthetic
atgtggagttcgacattagg

SEQ ID NO: 27847 - DNA, 20 bp, Artificial sequence
  synthetic
atgtggagttcgacggtagg

SEQ ID NO: 27848 - DNA, 20 bp, Artificial sequence
  synthetic
atgtggagtttcctcccagg

SEQ ID NO: 27849 - DNA, 20 bp, Artificial sequence
  synthetic
tgtctttctttcctcccagg

SEQ ID NO: 27850 - DNA, 20 bp, Artificial sequence
  synthetic
gcaaggcagtggcggcggcc

SEQ ID NO: 27851 - DNA, 20 bp, Artificial sequence
  synthetic
caggctgggtggcggcggcc

SEQ ID NO: 27852 - DNA, 20 bp, Artificial sequence
  synthetic
gcaaggcatctctccattta

SEQ ID NO: 27853 - DNA, 20 bp, Artificial sequence
  synthetic
gcatgggcacctgaaggtct

SEQ ID NO: 27854 - DNA, 20 bp, Artificial sequence
  synthetic
gcatgggccaggaggccatg

SEQ ID NO: 27855 - DNA, 20 bp, Artificial sequence
  synthetic
tagctattcaggaggccatg

SEQ ID NO: 27856 - DNA, 20 bp, Artificial sequence
  synthetic
ggtaaaataagggtatgtgg

SEQ ID NO: 27857 - DNA, 20 bp, Artificial sequence
  synthetic
ggatgaagaagaaaacccgg

SEQ ID NO: 27858 - DNA, 20 bp, Artificial sequence
  synthetic
aagaactacggaacctgatg

SEQ ID NO: 27859 - DNA, 20 bp, Artificial sequence
  synthetic
aagaactagcccgatctgct

SEQ ID NO: 27860 - DNA, 20 bp, Artificial sequence
  synthetic
cagtctctcgtcatttggtg

SEQ ID NO: 27861 - DNA, 20 bp, Artificial sequence
  synthetic
gggaagcggagccaacatgc

SEQ ID NO: 27862 - DNA, 20 bp, Artificial sequence
  synthetic
attgaatcccgcttcccctt

SEQ ID NO: 27863 - DNA, 20 bp, Artificial sequence
  synthetic
gcagagaagcagaggaccaa

SEQ ID NO: 27864 - DNA, 20 bp, Artificial sequence
  synthetic
gcggaggcttccggcggaaa

SEQ ID NO: 27865 - DNA, 20 bp, Artificial sequence
  synthetic
aattctctttccggcggaaa

SEQ ID NO: 27866 - DNA, 20 bp, Artificial sequence
  synthetic
tgaatcatttcttcacatca

SEQ ID NO: 27867 - DNA, 20 bp, Artificial sequence
  synthetic
taaaaatcacctggaccaat

SEQ ID NO: 27868 - DNA, 20 bp, Artificial sequence
  synthetic
ctgaatttctaaatacaaga

SEQ ID NO: 27869 - DNA, 20 bp, Artificial sequence
  synthetic
gaacgttttcccctcctgga

SEQ ID NO: 27870 - DNA, 20 bp, Artificial sequence
  synthetic
ccccaatcttaaattagggc

SEQ ID NO: 27871 - DNA, 20 bp, Artificial sequence
  synthetic
gggtttctttaaattagggc

SEQ ID NO: 27872 - DNA, 20 bp, Artificial sequence
  synthetic
cactaatacagtgtgtggag

SEQ ID NO: 27873 - DNA, 20 bp, Artificial sequence
  synthetic
cggctgcctctccgcccctg

SEQ ID NO: 27874 - DNA, 20 bp, Artificial sequence
  synthetic
caaggtcatacatgaaatca

SEQ ID NO: 27875 - DNA, 20 bp, Artificial sequence
  synthetic
ttcccgtaggggccgtcggc

SEQ ID NO: 27876 - DNA, 20 bp, Artificial sequence
  synthetic
ttcggctgagacacgtccca

SEQ ID NO: 27877 - DNA, 20 bp, Artificial sequence
  synthetic
gtagcagcggggaggccggg

SEQ ID NO: 27878 - DNA, 20 bp, Artificial sequence
  synthetic
gtagcagctactgataaccc

SEQ ID NO: 27879 - DNA, 20 bp, Artificial sequence
  synthetic
tggcccactcctagtcccta

SEQ ID NO: 27880 - DNA, 20 bp, Artificial sequence
  synthetic
tgttaggattccagaacctt

SEQ ID NO: 27881 - DNA, 20 bp, Artificial sequence
  synthetic
tgttaggaaagggcgtgtgg

SEQ ID NO: 27882 - DNA, 20 bp, Artificial sequence
  synthetic
tcctgaccagagggtcttct

SEQ ID NO: 27883 - DNA, 20 bp, Artificial sequence
  synthetic
agcaggaaactcagttcttc

SEQ ID NO: 27884 - DNA, 20 bp, Artificial sequence
  synthetic
gtggtttcactcagttcttc

SEQ ID NO: 27885 - DNA, 20 bp, Artificial sequence
  synthetic
gtggctcttgccctttagac

SEQ ID NO: 27886 - DNA, 20 bp, Artificial sequence
  synthetic
catatgtctgccctttagac

SEQ ID NO: 27887 - DNA, 20 bp, Artificial sequence
  synthetic
ccagcctctccgcatcttga

SEQ ID NO: 27888 - DNA, 20 bp, Artificial sequence
  synthetic
ggacaaggtgccctatttag

SEQ ID NO: 27889 - DNA, 20 bp, Artificial sequence
  synthetic
ggtcgaggtgccctatttag

SEQ ID NO: 27890 - DNA, 20 bp, Artificial sequence
  synthetic
tcctcccctgccctatttag

SEQ ID NO: 27891 - DNA, 20 bp, Artificial sequence
  synthetic
ggtctaggtgccctatttag

SEQ ID NO: 27892 - DNA, 20 bp, Artificial sequence
  synthetic
ctgtggcacagtagactgta

SEQ ID NO: 27893 - DNA, 20 bp, Artificial sequence
  synthetic
cgcactcgatccacgctggc

SEQ ID NO: 27894 - DNA, 20 bp, Artificial sequence
  synthetic
acggcgacagattgtgaggt

SEQ ID NO: 27895 - DNA, 20 bp, Artificial sequence
  synthetic
acggcgactttactgcgaaa

SEQ ID NO: 27896 - DNA, 20 bp, Artificial sequence
  synthetic
cgatgttgtttactgcgaaa

SEQ ID NO: 27897 - DNA, 20 bp, Artificial sequence
  synthetic
ccgtgaccgacctatcaggt

SEQ ID NO: 27898 - DNA, 20 bp, Artificial sequence
  synthetic
ccgtgacctggggcaaccca

SEQ ID NO: 27899 - DNA, 20 bp, Artificial sequence
  synthetic
caagattcagaccagtgttt

SEQ ID NO: 27900 - DNA, 20 bp, Artificial sequence
  synthetic
atatttgtttaatgaatgtg

SEQ ID NO: 27901 - DNA, 20 bp, Artificial sequence
  synthetic
tctattggttggcgtttgtt

SEQ ID NO: 27902 - DNA, 20 bp, Artificial sequence
  synthetic
ccccctcgcttcgagcctgt

SEQ ID NO: 27903 - DNA, 20 bp, Artificial sequence
  synthetic
agttagactccaagaatgca

SEQ ID NO: 27904 - DNA, 20 bp, Artificial sequence
  synthetic
ttccagcagccgaagacacc

SEQ ID NO: 27905 - DNA, 20 bp, Artificial sequence
  synthetic
ccagcatggccgaagacacc

SEQ ID NO: 27906 - DNA, 20 bp, Artificial sequence
  synthetic
ttctctaagcctggaagtgc

SEQ ID NO: 27907 - DNA, 20 bp, Artificial sequence
  synthetic
cctatggggcctggaagtgc

SEQ ID NO: 27908 - DNA, 20 bp, Artificial sequence
  synthetic
ctcccagagcgcccggggcc

SEQ ID NO: 27909 - DNA, 20 bp, Artificial sequence
  synthetic
gatggcggctcccagactat

SEQ ID NO: 27910 - DNA, 20 bp, Artificial sequence
  synthetic
ggcagatgatttctggcctc

SEQ ID NO: 27911 - DNA, 20 bp, Artificial sequence
  synthetic
ctcttgctttacggcaggtg

SEQ ID NO: 27912 - DNA, 20 bp, Artificial sequence
  synthetic
tttcactgggtcgccatctt

SEQ ID NO: 27913 - DNA, 20 bp, Artificial sequence
  synthetic
gcagcagcccaacaatctcc

SEQ ID NO: 27914 - DNA, 20 bp, Artificial sequence
  synthetic
gcagcagcggtcgccatctt

SEQ ID NO: 27915 - DNA, 20 bp, Artificial sequence
  synthetic
tcctccggaagaccaggggc

SEQ ID NO: 27916 - DNA, 20 bp, Artificial sequence
  synthetic
cataagttaagaccaggggc

SEQ ID NO: 27917 - DNA, 20 bp, Artificial sequence
  synthetic
tcctccgggttcggttcctg

SEQ ID NO: 27918 - DNA, 20 bp, Artificial sequence
  synthetic
ctcgccgtaatagtccgacc

SEQ ID NO: 27919 - DNA, 20 bp, Artificial sequence
  synthetic
acgcaaacccattaaatttc

SEQ ID NO: 27920 - DNA, 20 bp, Artificial sequence
  synthetic
aggcccctgaacgtgtatgt

SEQ ID NO: 27921 - DNA, 20 bp, Artificial sequence
  synthetic
caacaaagggaagaccgacg

SEQ ID NO: 27922 - DNA, 20 bp, Artificial sequence
  synthetic
tgtggcttatgtccttcggt

SEQ ID NO: 27923 - DNA, 20 bp, Artificial sequence
  synthetic
tgtggcttggaagaccgacg

SEQ ID NO: 27924 - DNA, 20 bp, Artificial sequence
  synthetic
tagacgcgcctgggatgggc

SEQ ID NO: 27925 - DNA, 20 bp, Artificial sequence
  synthetic
gcttataaaagccctactag

SEQ ID NO: 27926 - DNA, 20 bp, Artificial sequence
  synthetic
ctctcacatccaggacgacc

SEQ ID NO: 27927 - DNA, 20 bp, Artificial sequence
  synthetic
taaccgagtgtcgccccccg

SEQ ID NO: 27928 - DNA, 20 bp, Artificial sequence
  synthetic
atggggggccccggccttac

SEQ ID NO: 27929 - DNA, 20 bp, Artificial sequence
  synthetic
tataaactccccggccttac

SEQ ID NO: 27930 - DNA, 20 bp, Artificial sequence
  synthetic
ccgcaggtaacaagagacac

SEQ ID NO: 27931 - DNA, 20 bp, Artificial sequence
  synthetic
cacagcatccgagccctcta

SEQ ID NO: 27932 - DNA, 20 bp, Artificial sequence
  synthetic
tctgcatcgaaaactctccg

SEQ ID NO: 27933 - DNA, 20 bp, Artificial sequence
  synthetic
cctaggaggaggggaggcgg

SEQ ID NO: 27934 - DNA, 20 bp, Artificial sequence
  synthetic
cgaccttgacggggtgctgg

SEQ ID NO: 27935 - DNA, 20 bp, Artificial sequence
  synthetic
cgaccttgcaaattaaaata

SEQ ID NO: 27936 - DNA, 20 bp, Artificial sequence
  synthetic
atttgactacggggtgctgg

SEQ ID NO: 27937 - DNA, 20 bp, Artificial sequence
  synthetic
tccgccaccagccctacgag

SEQ ID NO: 27938 - DNA, 20 bp, Artificial sequence
  synthetic
cattgatgtccggtaggatt

SEQ ID NO: 27939 - DNA, 20 bp, Artificial sequence
  synthetic
tctgaacttgaagcctggag

SEQ ID NO: 27940 - DNA, 20 bp, Artificial sequence
  synthetic
ctgggcgcctgggacccgcc

SEQ ID NO: 27941 - DNA, 20 bp, Artificial sequence
  synthetic
ctgggcgcggttcgtatagg

SEQ ID NO: 27942 - DNA, 20 bp, Artificial sequence
  synthetic
agggctagggcttcctgaac

SEQ ID NO: 27943 - DNA, 20 bp, Artificial sequence
  synthetic
aaaacttaggatccaagacc

SEQ ID NO: 27944 - DNA, 20 bp, Artificial sequence
  synthetic
taaacaagttaggcaacgcg

SEQ ID NO: 27945 - DNA, 20 bp, Artificial sequence
  synthetic
atccatcagggcatccaaat

SEQ ID NO: 27946 - DNA, 20 bp, Artificial sequence
  synthetic
ttcacggccagtttccattg

SEQ ID NO: 27947 - DNA, 20 bp, Artificial sequence
  synthetic
aagcgatgcagtttccattg

SEQ ID NO: 27948 - DNA, 20 bp, Artificial sequence
  synthetic
aagcgatgtgccacgggcga

SEQ ID NO: 27949 - DNA, 20 bp, Artificial sequence
  synthetic
cgttgggcgcatctcctgga

SEQ ID NO: 27950 - DNA, 20 bp, Artificial sequence
  synthetic
gaggacacgaccccagggca

SEQ ID NO: 27951 - DNA, 20 bp, Artificial sequence
  synthetic
gtgagtatgttgctattatg

SEQ ID NO: 27952 - DNA, 20 bp, Artificial sequence
  synthetic
gttcagcatgtgggctcaaa

SEQ ID NO: 27953 - DNA, 20 bp, Artificial sequence
  synthetic
ctggcagatgaggctagaaa

SEQ ID NO: 27954 - DNA, 20 bp, Artificial sequence
  synthetic
gataggcggagcatctagtt

SEQ ID NO: 27955 - DNA, 20 bp, Artificial sequence
  synthetic
acttttcagccgcggcccgg

SEQ ID NO: 27956 - DNA, 20 bp, Artificial sequence
  synthetic
tgaaacacgccgcggcccgg

SEQ ID NO: 27957 - DNA, 20 bp, Artificial sequence
  synthetic
gcagacgcccccggagtcgc

SEQ ID NO: 27958 - DNA, 20 bp, Artificial sequence
  synthetic
cgcgaagattccccctctgc

SEQ ID NO: 27959 - DNA, 20 bp, Artificial sequence
  synthetic
gccggtcacgtggggggcga

SEQ ID NO: 27960 - DNA, 20 bp, Artificial sequence
  synthetic
tcggttccagaagggagagg

SEQ ID NO: 27961 - DNA, 20 bp, Artificial sequence
  synthetic
tcggttcctccctcttagtt

SEQ ID NO: 27962 - DNA, 20 bp, Artificial sequence
  synthetic
gtaaagttagaagggagagg

SEQ ID NO: 27963 - DNA, 20 bp, Artificial sequence
  synthetic
tgtttttggcgcgtgagctc

SEQ ID NO: 27964 - DNA, 20 bp, Artificial sequence
  synthetic
cgcggctgtaaagtatagag

SEQ ID NO: 27965 - DNA, 20 bp, Artificial sequence
  synthetic
agcaagagtgggaggcgcgc

SEQ ID NO: 27966 - DNA, 20 bp, Artificial sequence
  synthetic
ccctgcagccctcgcctggg

SEQ ID NO: 27967 - DNA, 20 bp, Artificial sequence
  synthetic
tagatcaagtcgggccagct

SEQ ID NO: 27968 - DNA, 20 bp, Artificial sequence
  synthetic
ggcggggcgtcgggccagct

SEQ ID NO: 27969 - DNA, 20 bp, Artificial sequence
  synthetic
cctggtggggacagcagcca

SEQ ID NO: 27970 - DNA, 20 bp, Artificial sequence
  synthetic
atgcgctgactgagaagaaa

SEQ ID NO: 27971 - DNA, 20 bp, Artificial sequence
  synthetic
atgcgctgactgagtcctcc

SEQ ID NO: 27972 - DNA, 20 bp, Artificial sequence
  synthetic
gggaagggagatccggagcg

SEQ ID NO: 27973 - DNA, 20 bp, Artificial sequence
  synthetic
ggcgcctcgtcaaaggggct

SEQ ID NO: 27974 - DNA, 20 bp, Artificial sequence
  synthetic
tcaaagaagtcaaaggggct

SEQ ID NO: 27975 - DNA, 20 bp, Artificial sequence
  synthetic
tcaaagaatgtgtctcaaga

SEQ ID NO: 27976 - DNA, 20 bp, Artificial sequence
  synthetic
cggaagcttgcttaacacag

SEQ ID NO: 27977 - DNA, 20 bp, Artificial sequence
  synthetic
ctgcagcggaaccgactact

SEQ ID NO: 27978 - DNA, 20 bp, Artificial sequence
  synthetic
ggagccgggcggaattgaga

SEQ ID NO: 27979 - DNA, 20 bp, Artificial sequence
  synthetic
gaggagctgttatcgggact

SEQ ID NO: 27980 - DNA, 20 bp, Artificial sequence
  synthetic
cctcggtgggagagcagggg

SEQ ID NO: 27981 - DNA, 20 bp, Artificial sequence
  synthetic
aaggccgtggagagcagggg

SEQ ID NO: 27982 - DNA, 20 bp, Artificial sequence
  synthetic
cctcggtgcccataacatta

SEQ ID NO: 27983 - DNA, 20 bp, Artificial sequence
  synthetic
aatggacaaggtgtgaagag

SEQ ID NO: 27984 - DNA, 20 bp, Artificial sequence
  synthetic
cataaagagcagctggggta

SEQ ID NO: 27985 - DNA, 20 bp, Artificial sequence
  synthetic
ggccccagctgcgccatcgt

SEQ ID NO: 27986 - DNA, 20 bp, Artificial sequence
  synthetic
ggccccaggcagctggggta

SEQ ID NO: 27987 - DNA, 20 bp, Artificial sequence
  synthetic
ttttttggaggcctaggctt

SEQ ID NO: 27988 - DNA, 20 bp, Artificial sequence
  synthetic
taccccttcctctcggaagg

SEQ ID NO: 27989 - DNA, 20 bp, Artificial sequence
  synthetic
taccccttgtatatcatgaa

SEQ ID NO: 27990 - DNA, 20 bp, Artificial sequence
  synthetic
cctcagctcgtcctccccgc

SEQ ID NO: 27991 - DNA, 20 bp, Artificial sequence
  synthetic
cctcagcttagatcttgtag

SEQ ID NO: 27992 - DNA, 20 bp, Artificial sequence
  synthetic
gcaatgcagatccagtggtt

SEQ ID NO: 27993 - DNA, 20 bp, Artificial sequence
  synthetic
acggtcggattagtttgcct

SEQ ID NO: 27994 - DNA, 20 bp, Artificial sequence
  synthetic
gtttgaatgccctggaagga

SEQ ID NO: 27995 - DNA, 20 bp, Artificial sequence
  synthetic
tacgacgatctcggcaaaca

SEQ ID NO: 27996 - DNA, 20 bp, Artificial sequence
  synthetic
cctccgtcgagatcggcgtg

SEQ ID NO: 27997 - DNA, 20 bp, Artificial sequence
  synthetic
cctccgtctctcggcaaaca

SEQ ID NO: 27998 - DNA, 20 bp, Artificial sequence
  synthetic
cctccgttgggactaccgca

SEQ ID NO: 27999 - DNA, 20 bp, Artificial sequence
  synthetic
acaaacagataggttggagc

SEQ ID NO: 28000 - DNA, 20 bp, Artificial sequence
  synthetic
acaaacagcagatggacgct

SEQ ID NO: 28001 - DNA, 20 bp, Artificial sequence
  synthetic
ctagccgagtagtgttgggt

SEQ ID NO: 28002 - DNA, 20 bp, Artificial sequence
  synthetic
gtgtggtccgacacgatggg

SEQ ID NO: 28003 - DNA, 20 bp, Artificial sequence
  synthetic
gtgtggtcgacacattcacc

SEQ ID NO: 28004 - DNA, 20 bp, Artificial sequence
  synthetic
cgtctagccatggcgttagt

SEQ ID NO: 28005 - DNA, 20 bp, Artificial sequence
  synthetic
gtcgggtgcatggcgttagt

SEQ ID NO: 28006 - DNA, 20 bp, Artificial sequence
  synthetic
tctggctcgcctgcctgcag

SEQ ID NO: 28007 - DNA, 20 bp, Artificial sequence
  synthetic
ggatcctgttctaaatatcc

SEQ ID NO: 28008 - DNA, 20 bp, Artificial sequence
  synthetic
gaagtgctctcggcggaagt

SEQ ID NO: 28009 - DNA, 20 bp, Artificial sequence
  synthetic
tgcatgtggcaggagcggtg

SEQ ID NO: 28010 - DNA, 20 bp, Artificial sequence
  synthetic
tgcatgtgaggaataattct

SEQ ID NO: 28011 - DNA, 20 bp, Artificial sequence
  synthetic
aaatacacgcaggagcggtg

SEQ ID NO: 28012 - DNA, 20 bp, Artificial sequence
  synthetic
gccacagcattcctagactg

SEQ ID NO: 28013 - DNA, 20 bp, Artificial sequence
  synthetic
gcccatgtcaagattccctg

SEQ ID NO: 28014 - DNA, 20 bp, Artificial sequence
  synthetic
tttttaaacaagattccctg

SEQ ID NO: 28015 - DNA, 20 bp, Artificial sequence
  synthetic
accccgctcgcgcgccctcc

SEQ ID NO: 28016 - DNA, 20 bp, Artificial sequence
  synthetic
cagatcccgcccgcgtcaga

SEQ ID NO: 28017 - DNA, 20 bp, Artificial sequence
  synthetic
cccttctcgcccgcgtcaga

SEQ ID NO: 28018 - DNA, 20 bp, Artificial sequence
  synthetic
agagcggtaagatttctgcc

SEQ ID NO: 28019 - DNA, 20 bp, Artificial sequence
  synthetic
agagcggtaatgaatatccg

SEQ ID NO: 28020 - DNA, 20 bp, Artificial sequence
  synthetic
cggccggcgttgccggggta

SEQ ID NO: 28021 - DNA, 20 bp, Artificial sequence
  synthetic
accaaatggttgccggggta

SEQ ID NO: 28022 - DNA, 20 bp, Artificial sequence
  synthetic
gtatccaaagaagggggtga

SEQ ID NO: 28023 - DNA, 20 bp, Artificial sequence
  synthetic
tactccgaaccccagaatcc

SEQ ID NO: 28024 - DNA, 20 bp, Artificial sequence
  synthetic
aggggtagaccccagaatcc

SEQ ID NO: 28025 - DNA, 20 bp, Artificial sequence
  synthetic
gcctccctctgggcgtccac

SEQ ID NO: 28026 - DNA, 20 bp, Artificial sequence
  synthetic
ctgccccgccaggcgaagcg

SEQ ID NO: 28027 - DNA, 20 bp, Artificial sequence
  synthetic
taaatttcccaggcgaagcg

SEQ ID NO: 28028 - DNA, 20 bp, Artificial sequence
  synthetic
cctcgggactcggcgggtcc

SEQ ID NO: 28029 - DNA, 20 bp, Artificial sequence
  synthetic
gtgttcatctcggcgggtcc

SEQ ID NO: 28030 - DNA, 20 bp, Artificial sequence
  synthetic
tgctgctgaggaccttccag

SEQ ID NO: 28031 - DNA, 20 bp, Artificial sequence
  synthetic
ccgggtgcctaagcaggccc

SEQ ID NO: 28032 - DNA, 20 bp, Artificial sequence
  synthetic
ggcaccgcctaagcaggccc

SEQ ID NO: 28033 - DNA, 20 bp, Artificial sequence
  synthetic
accgccagcaggcagcggcc

SEQ ID NO: 28034 - DNA, 20 bp, Artificial sequence
  synthetic
ctcttggcaaaaatggcaaa

SEQ ID NO: 28035 - DNA, 20 bp, Artificial sequence
  synthetic
ttgacgaaacaaattttcgt

SEQ ID NO: 28036 - DNA, 20 bp, Artificial sequence
  synthetic
cgagacggcggcgcgtgcag

SEQ ID NO: 28037 - DNA, 20 bp, Artificial sequence
  synthetic
gttttgatcggcgcgtgcag

SEQ ID NO: 28038 - DNA, 20 bp, Artificial sequence
  synthetic
agtccaggggtggccgtgat

SEQ ID NO: 28039 - DNA, 20 bp, Artificial sequence
  synthetic
tccctcaagcgcagtgccca

SEQ ID NO: 28040 - DNA, 20 bp, Artificial sequence
  synthetic
ccgtcccagcgctaccgggc

SEQ ID NO: 28041 - DNA, 20 bp, Artificial sequence
  synthetic
gctggctcccggaatatgga

SEQ ID NO: 28042 - DNA, 20 bp, Artificial sequence
  synthetic
ttgtcaagccggaatatgga

SEQ ID NO: 28043 - DNA, 20 bp, Artificial sequence
  synthetic
ccgcacccttacgtatctct

SEQ ID NO: 28044 - DNA, 20 bp, Artificial sequence
  synthetic
tgatgtttggttcagctcgc

SEQ ID NO: 28045 - DNA, 20 bp, Artificial sequence
  synthetic
gtggtatctgattgttgttg

SEQ ID NO: 28046 - DNA, 20 bp, Artificial sequence
  synthetic
gtggtatcaaggaagctgct

SEQ ID NO: 28047 - DNA, 20 bp, Artificial sequence
  synthetic
tcttacaagctgcaggctct

SEQ ID NO: 28048 - DNA, 20 bp, Artificial sequence
  synthetic
caggctggtgactttatgaa

SEQ ID NO: 28049 - DNA, 20 bp, Artificial sequence
  synthetic
tggccaaccttttggctccg

SEQ ID NO: 28050 - DNA, 20 bp, Artificial sequence
  synthetic
gaggaggagggaaaaggcga

SEQ ID NO: 28051 - DNA, 20 bp, Artificial sequence
  synthetic
gaggaggacaacggctttcg

SEQ ID NO: 28052 - DNA, 20 bp, Artificial sequence
  synthetic
ccccgtatgggaaaaggcga

SEQ ID NO: 28053 - DNA, 20 bp, Artificial sequence
  synthetic
aagagtcgcgcccccgggga

SEQ ID NO: 28054 - DNA, 20 bp, Artificial sequence
  synthetic
tagattccagccagcccccg

SEQ ID NO: 28055 - DNA, 20 bp, Artificial sequence
  synthetic
gcccgcagagccagcccccg

SEQ ID NO: 28056 - DNA, 20 bp, Artificial sequence
  synthetic
gcccgcagcatgtcaattaa

SEQ ID NO: 28057 - DNA, 20 bp, Artificial sequence
  synthetic
cctggaggcgcagccccacc

SEQ ID NO: 28058 - DNA, 20 bp, Artificial sequence
  synthetic
gcggcaccggggcggctgcg

SEQ ID NO: 28059 - DNA, 20 bp, Artificial sequence
  synthetic
gccagggctgcggaggaccg

SEQ ID NO: 28060 - DNA, 20 bp, Artificial sequence
  synthetic
cccggggaggcgggaaatgc

SEQ ID NO: 28061 - DNA, 20 bp, Artificial sequence
  synthetic
cacccaacggctgccacggc

SEQ ID NO: 28062 - DNA, 20 bp, Artificial sequence
  synthetic
attgggcgcaactagtgtaa

SEQ ID NO: 28063 - DNA, 20 bp, Artificial sequence
  synthetic
ctaatcattttctctagacg

SEQ ID NO: 28064 - DNA, 20 bp, Artificial sequence
  synthetic
ggaggcggcgcaggcgctga

SEQ ID NO: 28065 - DNA, 20 bp, Artificial sequence
  synthetic
agcggccgcatgctgacatt

SEQ ID NO: 28066 - DNA, 20 bp, Artificial sequence
  synthetic
agcggccggggcagccttgc

SEQ ID NO: 28067 - DNA, 20 bp, Artificial sequence
  synthetic
tgattctaggctggtcacta

SEQ ID NO: 28068 - DNA, 20 bp, Artificial sequence
  synthetic
catgcttcctgctgtggctg

SEQ ID NO: 28069 - DNA, 20 bp, Artificial sequence
  synthetic
aggtaccccattgtatggga

SEQ ID NO: 28070 - DNA, 20 bp, Artificial sequence
  synthetic
cctagcgagcgagttccgcg

SEQ ID NO: 28071 - DNA, 20 bp, Artificial sequence
  synthetic
aagtctgaacccagcatagt

SEQ ID NO: 28072 - DNA, 20 bp, Artificial sequence
  synthetic
gcaaaaagcacttgtcgaca

SEQ ID NO: 28073 - DNA, 20 bp, Artificial sequence
  synthetic
aacaactgtgggacaacatg

SEQ ID NO: 28074 - DNA, 20 bp, Artificial sequence
  synthetic
gcggcccaggctgaagctca

SEQ ID NO: 28075 - DNA, 20 bp, Artificial sequence
  synthetic
gcggcccatctgtcgcggag

SEQ ID NO: 28076 - DNA, 20 bp, Artificial sequence
  synthetic
agtaagtgggctgaagctca

SEQ ID NO: 28077 - DNA, 20 bp, Artificial sequence
  synthetic
ctctgtgttaaaccaatcag

SEQ ID NO: 28078 - DNA, 20 bp, Artificial sequence
  synthetic
ttcggtaatggcctcagccc

SEQ ID NO: 28079 - DNA, 20 bp, Artificial sequence
  synthetic
aaccttcagagagtgcggat

SEQ ID NO: 28080 - DNA, 20 bp, Artificial sequence
  synthetic
ctggagcccgagagaacgaa

SEQ ID NO: 28081 - DNA, 20 bp, Artificial sequence
  synthetic
tccccaaatccagagggctg

SEQ ID NO: 28082 - DNA, 20 bp, Artificial sequence
  synthetic
atagcccaaaggacaagaaa

SEQ ID NO: 28083 - DNA, 20 bp, Artificial sequence
  synthetic
tgtaactgttttctgtttgg

SEQ ID NO: 28084 - DNA, 20 bp, Artificial sequence
  synthetic
actgcctctaagtgagcacg

SEQ ID NO: 28085 - DNA, 20 bp, Artificial sequence
  synthetic
gcatgtacacctgattagtt

SEQ ID NO: 28086 - DNA, 20 bp, Artificial sequence
  synthetic
acgtacggtccacgtcgccc

SEQ ID NO: 28087 - DNA, 20 bp, Artificial sequence
  synthetic
gactgttgttgtgcaattaa

SEQ ID NO: 28088 - DNA, 20 bp, Artificial sequence
  synthetic
atatatcgggaggaatttaa

SEQ ID NO: 28089 - DNA, 20 bp, Artificial sequence
  synthetic
cagggataggaggaatttaa

SEQ ID NO: 28090 - DNA, 20 bp, Artificial sequence
  synthetic
agtattgctgcttagttaac

SEQ ID NO: 28091 - DNA, 20 bp, Artificial sequence
  synthetic
atgaatcctgccgccccagc

SEQ ID NO: 28092 - DNA, 20 bp, Artificial sequence
  synthetic
ggggacagctttatagggga

SEQ ID NO: 28093 - DNA, 20 bp, Artificial sequence
  synthetic
cgtgtagcgccgcatttaaa

SEQ ID NO: 28094 - DNA, 20 bp, Artificial sequence
  synthetic
gagaacaagccgcatttaaa

SEQ ID NO: 28095 - DNA, 20 bp, Artificial sequence
  synthetic
aggtgaccacccctcgacgc

SEQ ID NO: 28096 - DNA, 20 bp, Artificial sequence
  synthetic
tgctcggccccgccgtcagg

SEQ ID NO: 28097 - DNA, 20 bp, Artificial sequence
  synthetic
tgctcggcgtgattaggttc

SEQ ID NO: 28098 - DNA, 20 bp, Artificial sequence
  synthetic
gccgccgctatccaggtaga

SEQ ID NO: 28099 - DNA, 20 bp, Artificial sequence
  synthetic
tttgctcggtcatctgctgc

SEQ ID NO: 28100 - DNA, 20 bp, Artificial sequence
  synthetic
ccctgactggagaaggagga

SEQ ID NO: 28101 - DNA, 20 bp, Artificial sequence
  synthetic
gaggaggaaagagcacctcc

SEQ ID NO: 28102 - DNA, 20 bp, Artificial sequence
  synthetic
gaggaggaggagaaggagga

SEQ ID NO: 28103 - DNA, 20 bp, Artificial sequence
  synthetic
gaattggcctgccacagaca

SEQ ID NO: 28104 - DNA, 20 bp, Artificial sequence
  synthetic
gaattggcgaaatgggctat

SEQ ID NO: 28105 - DNA, 20 bp, Artificial sequence
  synthetic
acgacaagctgccacagaca

SEQ ID NO: 28106 - DNA, 20 bp, Artificial sequence
  synthetic
acggtactcctgcccggcgg

SEQ ID NO: 28107 - DNA, 20 bp, Artificial sequence
  synthetic
gtagcccgcgcgcccctggc

SEQ ID NO: 28108 - DNA, 20 bp, Artificial sequence
  synthetic
tgagggacgattggcatgct

SEQ ID NO: 28109 - DNA, 20 bp, Artificial sequence
  synthetic
cataacctcgggtcgtaagc

SEQ ID NO: 28110 - DNA, 20 bp, Artificial sequence
  synthetic
cataacctgattggcatgct

SEQ ID NO: 28111 - DNA, 20 bp, Artificial sequence
  synthetic
tggccggagaccagggccca

SEQ ID NO: 28112 - DNA, 20 bp, Artificial sequence
  synthetic
ttcaaatcagttgcatatca

SEQ ID NO: 28113 - DNA, 20 bp, Artificial sequence
  synthetic
ttcccacaagtctcctcttc

SEQ ID NO: 28114 - DNA, 20 bp, Artificial sequence
  synthetic
acctttgtgtgcggtgcaac

SEQ ID NO: 28115 - DNA, 20 bp, Artificial sequence
  synthetic
cttgtttatttgtagtttcc

SEQ ID NO: 28116 - DNA, 20 bp, Artificial sequence
  synthetic
tttgaaagagcacttcccaa

SEQ ID NO: 28117 - DNA, 20 bp, Artificial sequence
  synthetic
agcacgtaacccaatgtgta

SEQ ID NO: 28118 - DNA, 20 bp, Artificial sequence
  synthetic
tgggctttagcaccagctcc

SEQ ID NO: 28119 - DNA, 20 bp, Artificial sequence
  synthetic
gcacacagctgtggtttatt

SEQ ID NO: 28120 - DNA, 20 bp, Artificial sequence
  synthetic
aaagcaggatggagctggag

SEQ ID NO: 28121 - DNA, 20 bp, Artificial sequence
  synthetic
gtgtatgatccgctaccagt

SEQ ID NO: 28122 - DNA, 20 bp, Artificial sequence
  synthetic
gcagctcggcgccacctccg

SEQ ID NO: 28123 - DNA, 20 bp, Artificial sequence
  synthetic
atggagaaactcctagatga

SEQ ID NO: 28124 - DNA, 20 bp, Artificial sequence
  synthetic
gagaaaggaaaagattagac

SEQ ID NO: 28125 - DNA, 20 bp, Artificial sequence
  synthetic
gagaaaggcccgcggatatg

SEQ ID NO: 28126 - DNA, 20 bp, Artificial sequence
  synthetic
cgcttccgaagatccgaggt

SEQ ID NO: 28127 - DNA, 20 bp, Artificial sequence
  synthetic
gcgcagttcccgctgtcctg

SEQ ID NO: 28128 - DNA, 20 bp, Artificial sequence
  synthetic
atatagctcaactgccatag

SEQ ID NO: 28129 - DNA, 20 bp, Artificial sequence
  synthetic
atatagctattggattggcc

SEQ ID NO: 28130 - DNA, 20 bp, Artificial sequence
  synthetic
ctccaggtatggtgcgcgct

SEQ ID NO: 28131 - DNA, 20 bp, Artificial sequence
  synthetic
attaacagtgccgccgcgcc

SEQ ID NO: 28132 - DNA, 20 bp, Artificial sequence
  synthetic
ggccttgtgcgctgtacttc

SEQ ID NO: 28133 - DNA, 20 bp, Artificial sequence
  synthetic
ttgagtatcacgcctccgga

SEQ ID NO: 28134 - DNA, 20 bp, Artificial sequence
  synthetic
ttgaatcaactgccagaccg

SEQ ID NO: 28135 - DNA, 20 bp, Artificial sequence
  synthetic
aactacatgttgtaaggctt

SEQ ID NO: 28136 - DNA, 20 bp, Artificial sequence
  synthetic
gtcataagtgacaagctagc

SEQ ID NO: 28137 - DNA, 20 bp, Artificial sequence
  synthetic
ccaggcctcactgctgagcg

SEQ ID NO: 28138 - DNA, 20 bp, Artificial sequence
  synthetic
ccaggccttgacaagctagc

SEQ ID NO: 28139 - DNA, 20 bp, Artificial sequence
  synthetic
ctggggcagggactacgaga

SEQ ID NO: 28140 - DNA, 20 bp, Artificial sequence
  synthetic
gaccacgtgggactacgaga

SEQ ID NO: 28141 - DNA, 20 bp, Artificial sequence
  synthetic
acaggctctagcttggtaga

SEQ ID NO: 28142 - DNA, 20 bp, Artificial sequence
  synthetic
ttctttatgtaaagacaccg

SEQ ID NO: 28143 - DNA, 20 bp, Artificial sequence
  synthetic
ttctttattagcttggtaga

SEQ ID NO: 28144 - DNA, 20 bp, Artificial sequence
  synthetic
cgcggagtcgcctcccggcc

SEQ ID NO: 28145 - DNA, 20 bp, Artificial sequence
  synthetic
cgcggagtgaatggagtcgg

SEQ ID NO: 28146 - DNA, 20 bp, Artificial sequence
  synthetic
cctcccagatttcttttaca

SEQ ID NO: 28147 - DNA, 20 bp, Artificial sequence
  synthetic
gagcagccgtgtggtatgat

SEQ ID NO: 28148 - DNA, 20 bp, Artificial sequence
  synthetic
catgtctctttgtgttcatc

SEQ ID NO: 28149 - DNA, 20 bp, Artificial sequence
  synthetic
tgaaagcgcgcactacacga

SEQ ID NO: 28150 - DNA, 20 bp, Artificial sequence
  synthetic
gtgacctcctcctcctcttt

SEQ ID NO: 28151 - DNA, 20 bp, Artificial sequence
  synthetic
gatccgaaaggaattggaat

SEQ ID NO: 28152 - DNA, 20 bp, Artificial sequence
  synthetic
ctcgtaccaggaattggaat

SEQ ID NO: 28153 - DNA, 20 bp, Artificial sequence
  synthetic
tatattcacaaaactgctgg

SEQ ID NO: 28154 - DNA, 20 bp, Artificial sequence
  synthetic
gtagtgtcgatgatctcatt

SEQ ID NO: 28155 - DNA, 20 bp, Artificial sequence
  synthetic
atttgtcgacaacatcttac

SEQ ID NO: 28156 - DNA, 20 bp, Artificial sequence
  synthetic
gggcgcccagaaggagcagg

SEQ ID NO: 28157 - DNA, 20 bp, Artificial sequence
  synthetic
acagctatagaaggagcagg

SEQ ID NO: 28158 - DNA, 20 bp, Artificial sequence
  synthetic
ctactggacagaccggaatg

SEQ ID NO: 28159 - DNA, 20 bp, Artificial sequence
  synthetic
ggggtgtagaggaaggaagg

SEQ ID NO: 28160 - DNA, 20 bp, Artificial sequence
  synthetic
tcaggtagattgttatctat

SEQ ID NO: 28161 - DNA, 20 bp, Artificial sequence
  synthetic
gaagcctggacccacacgcg

SEQ ID NO: 28162 - DNA, 20 bp, Artificial sequence
  synthetic
ctcattgccgttaaacatca

SEQ ID NO: 28163 - DNA, 20 bp, Artificial sequence
  synthetic
tgttaatgaaacaagccaga

SEQ ID NO: 28164 - DNA, 20 bp, Artificial sequence
  synthetic
cgaagcacccagataagagc

SEQ ID NO: 28165 - DNA, 20 bp, Artificial sequence
  synthetic
cgaagcacgactgctcccag

SEQ ID NO: 28166 - DNA, 20 bp, Artificial sequence
  synthetic
gcgggctgctcgcgccggct

SEQ ID NO: 28167 - DNA, 20 bp, Artificial sequence
  synthetic
ctttgtggtttttgtaattt

SEQ ID NO: 28168 - DNA, 20 bp, Artificial sequence
  synthetic
tttccgcacgcctcgaggcg

SEQ ID NO: 28169 - DNA, 20 bp, Artificial sequence
  synthetic
agtgtaagaaacagtaagcc

SEQ ID NO: 28170 - DNA, 20 bp, Artificial sequence
  synthetic
ccctcgagattacataggtc

SEQ ID NO: 28171 - DNA, 20 bp, Artificial sequence
  synthetic
agtagcaggccagagtctga

SEQ ID NO: 28172 - DNA, 20 bp, Artificial sequence
  synthetic
ccaggtgacagcggcatgga

SEQ ID NO: 28173 - DNA, 20 bp, Artificial sequence
  synthetic
ccaggtgatcagcagcgcac

SEQ ID NO: 28174 - DNA, 20 bp, Artificial sequence
  synthetic
ggccagaccagcggcatgga

SEQ ID NO: 28175 - DNA, 20 bp, Artificial sequence
  synthetic
caatataacaaaaaaacatg

SEQ ID NO: 28176 - DNA, 20 bp, Artificial sequence
  synthetic
aggcagcggaaccccccacc

SEQ ID NO: 28177 - DNA, 20 bp, Artificial sequence
  synthetic
ccaaccacgaaccccccacc

SEQ ID NO: 28178 - DNA, 20 bp, Artificial sequence
  synthetic
ttttcaacattaatactatt

SEQ ID NO: 28179 - DNA, 20 bp, Artificial sequence
  synthetic
acacggctattaatactatt

SEQ ID NO: 28180 - DNA, 20 bp, Artificial sequence
  synthetic
tgctgccgaggtaactctct

SEQ ID NO: 28181 - DNA, 20 bp, Artificial sequence
  synthetic
cacaggagttgtaaggcagc

SEQ ID NO: 28182 - DNA, 20 bp, Artificial sequence
  synthetic
cagtggatcaaatcctcatg

SEQ ID NO: 28183 - DNA, 20 bp, Artificial sequence
  synthetic
gttgtttcacctcagcatcc

SEQ ID NO: 28184 - DNA, 20 bp, Artificial sequence
  synthetic
cttacagagactggaaaaga

SEQ ID NO: 28185 - DNA, 20 bp, Artificial sequence
  synthetic
gtagtcctccggcccctgaa

SEQ ID NO: 28186 - DNA, 20 bp, Artificial sequence
  synthetic
gtagtcctggattgaagatc

SEQ ID NO: 28187 - DNA, 20 bp, Artificial sequence
  synthetic
cccagcctgaggaaggaagg

SEQ ID NO: 28188 - DNA, 20 bp, Artificial sequence
  synthetic
ttgagtatggatatcatatt

SEQ ID NO: 28189 - DNA, 20 bp, Artificial sequence
  synthetic
gcctactgcacgcctccgga

SEQ ID NO: 28190 - DNA, 20 bp, Artificial sequence
  synthetic
tcaagctcaaatgcactgga

SEQ ID NO: 28191 - DNA, 20 bp, Artificial sequence
  synthetic
tgagcgatttgtgcaattaa

SEQ ID NO: 28192 - DNA, 20 bp, Artificial sequence
  synthetic
ctgtaggaaagttaaaacca

SEQ ID NO: 28193 - DNA, 20 bp, Artificial sequence
  synthetic
aatagtgtctggagccggtc

SEQ ID NO: 28194 - DNA, 20 bp, Artificial sequence
  synthetic
agtcgaaagtattgctatag

SEQ ID NO: 28195 - DNA, 20 bp, Artificial sequence
  synthetic
ctctcgccgccgcccgagcg

SEQ ID NO: 28196 - DNA, 20 bp, Artificial sequence
  synthetic
aaaggcagaagccttcaggt

SEQ ID NO: 28197 - DNA, 20 bp, Artificial sequence
  synthetic
gcgactgtcaaacgttggac

SEQ ID NO: 28198 - DNA, 20 bp, Artificial sequence
  synthetic
atgaattagaaagaatcagg

SEQ ID NO: 28199 - DNA, 20 bp, Artificial sequence
  synthetic
tcacgcacgaaagaatcagg

SEQ ID NO: 28200 - DNA, 20 bp, Artificial sequence
  synthetic
gcaaaaagattacgtaggtc

SEQ ID NO: 28201 - DNA, 20 bp, Artificial sequence
  synthetic
ttgccgctattacgtaggtc

SEQ ID NO: 28202 - DNA, 20 bp, Artificial sequence
  synthetic
ggccccgcggagccaggttg

SEQ ID NO: 28203 - DNA, 20 bp, Artificial sequence
  synthetic
ccagaaggcagtgaaattcc

SEQ ID NO: 28204 - DNA, 20 bp, Artificial sequence
  synthetic
aaaaagacgagtatttactt

SEQ ID NO: 28205 - DNA, 20 bp, Artificial sequence
  synthetic
gttatgcatccacgtcgccc

SEQ ID NO: 28206 - DNA, 20 bp, Artificial sequence
  synthetic
tcctgttgatccgcatggtg

SEQ ID NO: 28207 - DNA, 20 bp, Artificial sequence
  synthetic
tcctgttgccgtttccctcc

SEQ ID NO: 28208 - DNA, 20 bp, Artificial sequence
  synthetic
cgagcagcttccagtcgtgt

SEQ ID NO: 28209 - DNA, 20 bp, Artificial sequence
  synthetic
tggccggattaacttcaaag

SEQ ID NO: 28210 - DNA, 20 bp, Artificial sequence
  synthetic
aaaacgcgatccaacgccga

SEQ ID NO: 28211 - DNA, 20 bp, Artificial sequence
  synthetic
ccacggaggcccaaggcgaa

SEQ ID NO: 28212 - DNA, 20 bp, Artificial sequence
  synthetic
gctgccgcccgagcccgggt

SEQ ID NO: 28213 - DNA, 20 bp, Artificial sequence
  synthetic
agactgttccgagcccgggt

SEQ ID NO: 28214 - DNA, 20 bp, Artificial sequence
  synthetic
ggctgggagagaccacccgc

SEQ ID NO: 28215 - DNA, 20 bp, Artificial sequence
  synthetic
ggctgggattttattgtgct

SEQ ID NO: 28216 - DNA, 20 bp, Artificial sequence
  synthetic
aatacatagggcgggagctg

SEQ ID NO: 28217 - DNA, 20 bp, Artificial sequence
  synthetic
cctagtccctgcactaggtt

SEQ ID NO: 28218 - DNA, 20 bp, Artificial sequence
  synthetic
ccggtgagttgcactaggtt

SEQ ID NO: 28219 - DNA, 20 bp, Artificial sequence
  synthetic
cctagtcctgcgtacgatac

SEQ ID NO: 28220 - DNA, 20 bp, Artificial sequence
  synthetic
aagctgtgctgcactaggtt

SEQ ID NO: 28221 - DNA, 20 bp, Artificial sequence
  synthetic
atggcttaagccctgagtac

SEQ ID NO: 28222 - DNA, 20 bp, Artificial sequence
  synthetic
agaacctgggttcgcgacgc

SEQ ID NO: 28223 - DNA, 20 bp, Artificial sequence
  synthetic
cctcggctggttcgcgacgc

SEQ ID NO: 28224 - DNA, 20 bp, Artificial sequence
  synthetic
aggcgcacaacgtttttcga

SEQ ID NO: 28225 - DNA, 20 bp, Artificial sequence
  synthetic
aaatccagtaaagaaagtgt

SEQ ID NO: 28226 - DNA, 20 bp, Artificial sequence
  synthetic
tgccaggtgtgaagtggagt

SEQ ID NO: 28227 - DNA, 20 bp, Artificial sequence
  synthetic
aatgtacagtgaagtggagt

SEQ ID NO: 28228 - DNA, 20 bp, Artificial sequence
  synthetic
cggcgccgagtaaataagat

SEQ ID NO: 28229 - DNA, 20 bp, Artificial sequence
  synthetic
cggcgccggcccccgccttc

SEQ ID NO: 28230 - DNA, 20 bp, Artificial sequence
  synthetic
acgacgccactatggttgat

SEQ ID NO: 28231 - DNA, 20 bp, Artificial sequence
  synthetic
caagtttctggtctttaaaa

SEQ ID NO: 28232 - DNA, 20 bp, Artificial sequence
  synthetic
tcgccgaatggtctttaaaa

SEQ ID NO: 28233 - DNA, 20 bp, Artificial sequence
  synthetic
cactgcccggcggactgaat

SEQ ID NO: 28234 - DNA, 20 bp, Artificial sequence
  synthetic
aattgattagttagatggaa

SEQ ID NO: 28235 - DNA, 20 bp, Artificial sequence
  synthetic
aggagacccatcgtggtata

SEQ ID NO: 28236 - DNA, 20 bp, Artificial sequence
  synthetic
tctgatgaagcagaaaagaa

SEQ ID NO: 28237 - DNA, 20 bp, Artificial sequence
  synthetic
ccgtccccgactccttcctc

SEQ ID NO: 28238 - DNA, 20 bp, Artificial sequence
  synthetic
aaacggtggactccttcctc

SEQ ID NO: 28239 - DNA, 20 bp, Artificial sequence
  synthetic
tttctttcgcagtcgtggct

SEQ ID NO: 28240 - DNA, 20 bp, Artificial sequence
  synthetic
ccatcagattcatcatcaac

SEQ ID NO: 28241 - DNA, 20 bp, Artificial sequence
  synthetic
ccatcagacgacgacgatga

SEQ ID NO: 28242 - DNA, 20 bp, Artificial sequence
  synthetic
tgtggcagaactcaaatgga

SEQ ID NO: 28243 - DNA, 20 bp, Artificial sequence
  synthetic
ataaagacctcaccggcggt

SEQ ID NO: 28244 - DNA, 20 bp, Artificial sequence
  synthetic
gggcctcgctcaattctaac

SEQ ID NO: 28245 - DNA, 20 bp, Artificial sequence
  synthetic
aatcatacaacatccacacg

SEQ ID NO: 28246 - DNA, 20 bp, Artificial sequence
  synthetic
gtgtaccataataaaataca

SEQ ID NO: 28247 - DNA, 20 bp, Artificial sequence
  synthetic
cccgtttttaataaaataca

SEQ ID NO: 28248 - DNA, 20 bp, Artificial sequence
  synthetic
tggagacaacatgtgggaac

SEQ ID NO: 28249 - DNA, 20 bp, Artificial sequence
  synthetic
actctcgtacatgtggttct

SEQ ID NO: 28250 - DNA, 20 bp, Artificial sequence
  synthetic
tggagacaacatgtggcaaa

SEQ ID NO: 28251 - DNA, 20 bp, Artificial sequence
  synthetic
tggagacacggctccccggg

SEQ ID NO: 28252 - DNA, 20 bp, Artificial sequence
  synthetic
tggagacatgtccacaaggc

SEQ ID NO: 28253 - DNA, 20 bp, Artificial sequence
  synthetic
aactatggacatgtggttct

SEQ ID NO: 28254 - DNA, 20 bp, Artificial sequence
  synthetic
tctaaggacgtggtttttca

SEQ ID NO: 28255 - DNA, 20 bp, Artificial sequence
  synthetic
tctaaggagccctccaaagt

SEQ ID NO: 28256 - DNA, 20 bp, Artificial sequence
  synthetic
acgaggcgagccttcttcgc

SEQ ID NO: 28257 - DNA, 20 bp, Artificial sequence
  synthetic
acgaggcggctgacggggcg

SEQ ID NO: 28258 - DNA, 20 bp, Artificial sequence
  synthetic
tacctaatgctgacggggcg

SEQ ID NO: 28259 - DNA, 20 bp, Artificial sequence
  synthetic
gtcaggcgtgcctggagatt

SEQ ID NO: 28260 - DNA, 20 bp, Artificial sequence
  synthetic
ctctcttgaccaataggcgt

SEQ ID NO: 28261 - DNA, 20 bp, Artificial sequence
  synthetic
aacgcccatgctcccagggg

SEQ ID NO: 28262 - DNA, 20 bp, Artificial sequence
  synthetic
ctgttgacgagagggttttc

SEQ ID NO: 28263 - DNA, 20 bp, Artificial sequence
  synthetic
ctgttgactgctcccagggg

SEQ ID NO: 28264 - DNA, 20 bp, Artificial sequence
  synthetic
ccagccccgaggctcagaag

SEQ ID NO: 28265 - DNA, 20 bp, Artificial sequence
  synthetic
cagcatgtcggtgcatggtg

SEQ ID NO: 28266 - DNA, 20 bp, Artificial sequence
  synthetic
tttacccgcggtgcatggtg

SEQ ID NO: 28267 - DNA, 20 bp, Artificial sequence
  synthetic
tcgacgcaactttctcgtcg

SEQ ID NO: 28268 - DNA, 20 bp, Artificial sequence
  synthetic
ggctgcggactttctcgtcg

SEQ ID NO: 28269 - DNA, 20 bp, Artificial sequence
  synthetic
ggctgcggcgaccgctaggc

SEQ ID NO: 28270 - DNA, 20 bp, Artificial sequence
  synthetic
ggcggcggggctcgcgcggg

SEQ ID NO: 28271 - DNA, 20 bp, Artificial sequence
  synthetic
aaacctttggctcgcgcggg

SEQ ID NO: 28272 - DNA, 20 bp, Artificial sequence
  synthetic
cgcccgcctgccctgccgct

SEQ ID NO: 28273 - DNA, 20 bp, Artificial sequence
  synthetic
tcgtgtggtgccctgccgct

SEQ ID NO: 28274 - DNA, 20 bp, Artificial sequence
  synthetic
tgagtcagtctgaggaaatg

SEQ ID NO: 28275 - DNA, 20 bp, Artificial sequence
  synthetic
gccaccgcggggcccgggtg

SEQ ID NO: 28276 - DNA, 20 bp, Artificial sequence
  synthetic
cgctcccgacatgccccgcc

SEQ ID NO: 28277 - DNA, 20 bp, Artificial sequence
  synthetic
cgctcccgacatgccccgcg

SEQ ID NO: 28278 - DNA, 20 bp, Artificial sequence
  synthetic
aagatttcacatgccccgcc

SEQ ID NO: 28279 - DNA, 20 bp, Artificial sequence
  synthetic
gtagatgccgcgcgccctcc

SEQ ID NO: 28280 - DNA, 20 bp, Artificial sequence
  synthetic
accccgctaatctattactg

SEQ ID NO: 28281 - DNA, 20 bp, Artificial sequence
  synthetic
aaagcaggtacttatgcact

SEQ ID NO: 28282 - DNA, 20 bp, Artificial sequence
  synthetic
tttattatatggagctggag

SEQ ID NO: 28283 - DNA, 20 bp, Artificial sequence
  synthetic
ccctcgccgcggtcccatgg

SEQ ID NO: 28284 - DNA, 20 bp, Artificial sequence
  synthetic
ttggggtgagcgaatgacaa

SEQ ID NO: 28285 - DNA, 20 bp, Artificial sequence
  synthetic
cgggcgcgaatgtagactta

SEQ ID NO: 28286 - DNA, 20 bp, Artificial sequence
  synthetic
cgggcgcgggccggcgggcg

SEQ ID NO: 28287 - DNA, 20 bp, Artificial sequence
  synthetic
taggcaattgcccggccatt

SEQ ID NO: 28288 - DNA, 20 bp, Artificial sequence
  synthetic
ccgctcaatgcccggaaatt

SEQ ID NO: 28289 - DNA, 20 bp, Artificial sequence
  synthetic
ccgctcaaactgaatgcccc

SEQ ID NO: 28290 - DNA, 20 bp, Artificial sequence
  synthetic
ccgctcaatgcccggagatt

SEQ ID NO: 28291 - DNA, 20 bp, Artificial sequence
  synthetic
ataggggttgcccggaaatt

SEQ ID NO: 28292 - DNA, 20 bp, Artificial sequence
  synthetic
cgaggcttcgtcctgcgccg

SEQ ID NO: 28293 - DNA, 20 bp, Artificial sequence
  synthetic
ctcactcgcacaagtggacc

SEQ ID NO: 28294 - DNA, 20 bp, Artificial sequence
  synthetic
aattagatcacaagtggacc

SEQ ID NO: 28295 - DNA, 20 bp, Artificial sequence
  synthetic
agggacacgcagtgacgagc

SEQ ID NO: 28296 - DNA, 20 bp, Artificial sequence
  synthetic
tgacaggacgtctggacccg

SEQ ID NO: 28297 - DNA, 20 bp, Artificial sequence
  synthetic
cgaataattgccgccccagc

SEQ ID NO: 28298 - DNA, 20 bp, Artificial sequence
  synthetic
ctctcgcagctgccacccga

SEQ ID NO: 28299 - DNA, 20 bp, Artificial sequence
  synthetic
ctctcgcacgacaattgtcc

SEQ ID NO: 28300 - DNA, 20 bp, Artificial sequence
  synthetic
gagtcatcgacccaaaaggt

SEQ ID NO: 28301 - DNA, 20 bp, Artificial sequence
  synthetic
cgacgttggtcgaagttcgt

SEQ ID NO: 28302 - DNA, 20 bp, Artificial sequence
  synthetic
gcagaggcctgagcgcctga

SEQ ID NO: 28303 - DNA, 20 bp, Artificial sequence
  synthetic
tcgcgaggcaaatcatcctg

SEQ ID NO: 28304 - DNA, 20 bp, Artificial sequence
  synthetic
tcgcgagggtttgggaggat

SEQ ID NO: 28305 - DNA, 20 bp, Artificial sequence
  synthetic
actgcgcggaggcacagagg

SEQ ID NO: 28306 - DNA, 20 bp, Artificial sequence
  synthetic
gcgccgcgcgaagtcccaat

SEQ ID NO: 28307 - DNA, 20 bp, Artificial sequence
  synthetic
attggtttgctcagggagga

SEQ ID NO: 28308 - DNA, 20 bp, Artificial sequence
  synthetic
agtcccagtggcggaggcta

SEQ ID NO: 28309 - DNA, 20 bp, Artificial sequence
  synthetic
gaaatctcctggagggccgg

SEQ ID NO: 28310 - DNA, 20 bp, Artificial sequence
  synthetic
tgtcagagacctgtaatgct

SEQ ID NO: 28311 - DNA, 20 bp, Artificial sequence
  synthetic
tgtcagagctggagggccgg

SEQ ID NO: 28312 - DNA, 20 bp, Artificial sequence
  synthetic
agcagcagcaaccactagcc

SEQ ID NO: 28313 - DNA, 20 bp, Artificial sequence
  synthetic
gaagggggcggagaggaagg

SEQ ID NO: 28314 - DNA, 20 bp, Artificial sequence
  synthetic
cagtaatagacgccgaggcg

SEQ ID NO: 28315 - DNA, 20 bp, Artificial sequence
  synthetic
agcatgatcggcgcccgagg

SEQ ID NO: 28316 - DNA, 20 bp, Artificial sequence
  synthetic
ggcagagagcacggagccgg

SEQ ID NO: 28317 - DNA, 20 bp, Artificial sequence
  synthetic
agacgccgcgctcagcttcc

SEQ ID NO: 28318 - DNA, 20 bp, Artificial sequence
  synthetic
gcgctctgtgtggccgaggc

SEQ ID NO: 28319 - DNA, 20 bp, Artificial sequence
  synthetic
ggcggcggcgggtgagctca

SEQ ID NO: 28320 - DNA, 20 bp, Artificial sequence
  synthetic
aaggtaccaggaaccgaatt

SEQ ID NO: 28321 - DNA, 20 bp, Artificial sequence
  synthetic
tctcagcaaagagcctggaa

SEQ ID NO: 28322 - DNA, 20 bp, Artificial sequence
  synthetic
tggtgggattctcagattgg

SEQ ID NO: 28323 - DNA, 20 bp, Artificial sequence
  synthetic
atggagaaggcgtggacgac

SEQ ID NO: 28324 - DNA, 20 bp, Artificial sequence
  synthetic
gcctccttactcctagatga

SEQ ID NO: 28325 - DNA, 20 bp, Artificial sequence
  synthetic
caaggagggacgtgttggct

SEQ ID NO: 28326 - DNA, 20 bp, Artificial sequence
  synthetic
agtcatcatgtacagccctg

SEQ ID NO: 28327 - DNA, 20 bp, Artificial sequence
  synthetic
cgaccgggagcggctgggtt

SEQ ID NO: 28328 - DNA, 20 bp, Artificial sequence
  synthetic
gtagccggtccttggcaaga

SEQ ID NO: 28329 - DNA, 20 bp, Artificial sequence
  synthetic
tccaagtcggacaccaggaa

SEQ ID NO: 28330 - DNA, 20 bp, Artificial sequence
  synthetic
gccctctcgctttccctctc

SEQ ID NO: 28331 - DNA, 20 bp, Artificial sequence
  synthetic
ggctgcagggccgctaggcc

SEQ ID NO: 28332 - DNA, 20 bp, Artificial sequence
  synthetic
gaaaagagtaagagtactga

SEQ ID NO: 28333 - DNA, 20 bp, Artificial sequence
  synthetic
ccgcttacccggcagggcgt

SEQ ID NO: 28334 - DNA, 20 bp, Artificial sequence
  synthetic
gcagtgggccgcctcgatcc

SEQ ID NO: 28335 - DNA, 20 bp, Artificial sequence
  synthetic
gcagtggggactaaacggtt

SEQ ID NO: 28336 - DNA, 20 bp, Artificial sequence
  synthetic
ccgctcaatacccagaaatt

SEQ ID NO: 28337 - DNA, 20 bp, Artificial sequence
  synthetic
gtcagtgttacccagaaatt

SEQ ID NO: 28338 - DNA, 20 bp, Artificial sequence
  synthetic
cagacgcggcgtggctgtga

SEQ ID NO: 28339 - DNA, 20 bp, Artificial sequence
  synthetic
tccatgctggaggctgggtg

SEQ ID NO: 28340 - DNA, 20 bp, Artificial sequence
  synthetic
accaaggaaggcagcggcag

SEQ ID NO: 28341 - DNA, 20 bp, Artificial sequence
  synthetic
gctggacacaccgcctccga

SEQ ID NO: 28342 - DNA, 20 bp, Artificial sequence
  synthetic
tggccgtgcaccgcctccga

SEQ ID NO: 28343 - DNA, 20 bp, Artificial sequence
  synthetic
tccttggcctgacccagaat

SEQ ID NO: 28344 - DNA, 20 bp, Artificial sequence
  synthetic
agtcaaaacgctccgtaacc

SEQ ID NO: 28345 - DNA, 20 bp, Artificial sequence
  synthetic
agtcaaaagagggttgtcaa

SEQ ID NO: 28346 - DNA, 20 bp, Artificial sequence
  synthetic
tgcgttggcggcctacctat

SEQ ID NO: 28347 - DNA, 20 bp, Artificial sequence
  synthetic
cagccctcgcctccctgccc

SEQ ID NO: 28348 - DNA, 20 bp, Artificial sequence
  synthetic
gcaccatgctaacttcgaac

SEQ ID NO: 28349 - DNA, 20 bp, Artificial sequence
  synthetic
agtttcaatcttacagttgt

SEQ ID NO: 28350 - DNA, 20 bp, Artificial sequence
  synthetic
aaagcggcttttggttcggc

SEQ ID NO: 28351 - DNA, 20 bp, Artificial sequence
  synthetic
gtgcacatttttggttcggc

SEQ ID NO: 28352 - DNA, 20 bp, Artificial sequence
  synthetic
cgtatgttcagatcaaaagt

SEQ ID NO: 28353 - DNA, 20 bp, Artificial sequence
  synthetic
atagaagccagatcaaaagt

SEQ ID NO: 28354 - DNA, 20 bp, Artificial sequence
  synthetic
gtgagccctgtttttgccac

SEQ ID NO: 28355 - DNA, 20 bp, Artificial sequence
  synthetic
gtgagcccgcaaaggattgg

SEQ ID NO: 28356 - DNA, 20 bp, Artificial sequence
  synthetic
cagcaagtcttttccacaat

SEQ ID NO: 28357 - DNA, 20 bp, Artificial sequence
  synthetic
tttacgaccttttccacaat

SEQ ID NO: 28358 - DNA, 20 bp, Artificial sequence
  synthetic
ctaaaatcgcgctgtacttc

SEQ ID NO: 28359 - DNA, 20 bp, Artificial sequence
  synthetic
attatgggctattctagatc

SEQ ID NO: 28360 - DNA, 20 bp, Artificial sequence
  synthetic
tgtctttataacgtcgcatc

SEQ ID NO: 28361 - DNA, 20 bp, Artificial sequence
  synthetic
tgtggtgaaggcgtgtaaaa

SEQ ID NO: 28362 - DNA, 20 bp, Artificial sequence
  synthetic
aagtctttgttttgaaagat

SEQ ID NO: 28363 - DNA, 20 bp, Artificial sequence
  synthetic
tgtcatttcctacctgttcg

SEQ ID NO: 28364 - DNA, 20 bp, Artificial sequence
  synthetic
tatgaaacttatggggatac

SEQ ID NO: 28365 - DNA, 20 bp, Artificial sequence
  synthetic
tagccataagagagtgggga

SEQ ID NO: 28366 - DNA, 20 bp, Artificial sequence
  synthetic
tggtttaaggacctcacgga

SEQ ID NO: 28367 - DNA, 20 bp, Artificial sequence
  synthetic
agataaataatccagtccct

SEQ ID NO: 28368 - DNA, 20 bp, Artificial sequence
  synthetic
tctggggaaatccagtccct

SEQ ID NO: 28369 - DNA, 20 bp, Artificial sequence
  synthetic
gggggcgccgcaggcgcgag

SEQ ID NO: 28370 - DNA, 20 bp, Artificial sequence
  synthetic
gtcacgtgccgaaaatccct

SEQ ID NO: 28371 - DNA, 20 bp, Artificial sequence
  synthetic
tgttgggaatcttcagccag

SEQ ID NO: 28372 - DNA, 20 bp, Artificial sequence
  synthetic
ctcgaagcaatgtatggccc

SEQ ID NO: 28373 - DNA, 20 bp, Artificial sequence
  synthetic
agactcaagggtctgtcgga

SEQ ID NO: 28374 - DNA, 20 bp, Artificial sequence
  synthetic
ggcaggcgtcatctacttct

SEQ ID NO: 28375 - DNA, 20 bp, Artificial sequence
  synthetic
attgcatacgggagcagcac

SEQ ID NO: 28376 - DNA, 20 bp, Artificial sequence
  synthetic
ctactgcttccctcgttcga

SEQ ID NO: 28377 - DNA, 20 bp, Artificial sequence
  synthetic
tcttcctcggggtagggatg

SEQ ID NO: 28378 - DNA, 20 bp, Artificial sequence
  synthetic
gatcgtcactaaattcagcc

SEQ ID NO: 28379 - DNA, 20 bp, Artificial sequence
  synthetic
gatcgtcttagtatgagaat

SEQ ID NO: 28380 - DNA, 20 bp, Artificial sequence
  synthetic
ttcgcggagctccctcagcc

SEQ ID NO: 28381 - DNA, 20 bp, Artificial sequence
  synthetic
gcgtctcgcctgcgcgggct

SEQ ID NO: 28382 - DNA, 20 bp, Artificial sequence
  synthetic
ctattgagctaggagggcca

SEQ ID NO: 28383 - DNA, 20 bp, Artificial sequence
  synthetic
gctgctccctaggagggcca

SEQ ID NO: 28384 - DNA, 20 bp, Artificial sequence
  synthetic
cgcggggagccaggcctcgg

SEQ ID NO: 28385 - DNA, 20 bp, Artificial sequence
  synthetic
aattataggccaggcctcgg

SEQ ID NO: 28386 - DNA, 20 bp, Artificial sequence
  synthetic
cgcggggacgggtcgtagat

SEQ ID NO: 28387 - DNA, 20 bp, Artificial sequence
  synthetic
ttgttaccatatagctattg

SEQ ID NO: 28388 - DNA, 20 bp, Artificial sequence
  synthetic
gcgccgtcggtgagtcagtc

SEQ ID NO: 28389 - DNA, 20 bp, Artificial sequence
  synthetic
aatccttacgcggcgcattt

SEQ ID NO: 28390 - DNA, 20 bp, Artificial sequence
  synthetic
cgccagcttgggaaaaggcc

SEQ ID NO: 28391 - DNA, 20 bp, Artificial sequence
  synthetic
tgccagcttgggaaaaggcc

SEQ ID NO: 28392 - DNA, 20 bp, Artificial sequence
  synthetic
tgcccactaacttaacttat

SEQ ID NO: 28393 - DNA, 20 bp, Artificial sequence
  synthetic
tgcccactgctcagtggagc

SEQ ID NO: 28394 - DNA, 20 bp, Artificial sequence
  synthetic
gggactgcaattattaacat

SEQ ID NO: 28395 - DNA, 20 bp, Artificial sequence
  synthetic
gggactgctcggccgcctcc

SEQ ID NO: 28396 - DNA, 20 bp, Artificial sequence
  synthetic
ggcactcgaggtgtgagcgg

SEQ ID NO: 28397 - DNA, 20 bp, Artificial sequence
  synthetic
cagctagcccaaacagcgac

SEQ ID NO: 28398 - DNA, 20 bp, Artificial sequence
  synthetic
caggacgctcaacccaccgt

SEQ ID NO: 28399 - DNA, 20 bp, Artificial sequence
  synthetic
ggttcccggggagggggcgt

SEQ ID NO: 28400 - DNA, 20 bp, Artificial sequence
  synthetic
ggttcccgttcgttcaatag

SEQ ID NO: 28401 - DNA, 20 bp, Artificial sequence
  synthetic
ccgaggacgggagggggcgt

SEQ ID NO: 28402 - DNA, 20 bp, Artificial sequence
  synthetic
catcctgaaagaaaacagat

SEQ ID NO: 28403 - DNA, 20 bp, Artificial sequence
  synthetic
catcctgacgcctcctcccc

SEQ ID NO: 28404 - DNA, 20 bp, Artificial sequence
  synthetic
tgcgtcagcgcctcctcccc

SEQ ID NO: 28405 - DNA, 20 bp, Artificial sequence
  synthetic
tgttttttctttaacctttc

SEQ ID NO: 28406 - DNA, 20 bp, Artificial sequence
  synthetic
gtacaccggaattgccagga

SEQ ID NO: 28407 - DNA, 20 bp, Artificial sequence
  synthetic
gtacaccgcgtcgagtttag

SEQ ID NO: 28408 - DNA, 20 bp, Artificial sequence
  synthetic
agtgtcctcaccttccaatt

SEQ ID NO: 28409 - DNA, 20 bp, Artificial sequence
  synthetic
tctttgattgcgtcaatcat

SEQ ID NO: 28410 - DNA, 20 bp, Artificial sequence
  synthetic
tcaggccccctccgcctcca

SEQ ID NO: 28411 - DNA, 20 bp, Artificial sequence
  synthetic
ccggtgtatcggttaggttt

SEQ ID NO: 28412 - DNA, 20 bp, Artificial sequence
  synthetic
taacacctcttcagtttccg

SEQ ID NO: 28413 - DNA, 20 bp, Artificial sequence
  synthetic
gctccggtagcagcaagttc

SEQ ID NO: 28414 - DNA, 20 bp, Artificial sequence
  synthetic
taaggcaaagcagcaagttc

SEQ ID NO: 28415 - DNA, 20 bp, Artificial sequence
  synthetic
tgttggggacctgacgctat

SEQ ID NO: 28416 - DNA, 20 bp, Artificial sequence
  synthetic
tgaaaattgagagtgcggat

SEQ ID NO: 28417 - DNA, 20 bp, Artificial sequence
  synthetic
aaccttcaattgtgagctcg

SEQ ID NO: 28418 - DNA, 20 bp, Artificial sequence
  synthetic
agaaagcgagacaggcaggt

SEQ ID NO: 28419 - DNA, 20 bp, Artificial sequence
  synthetic
tacgttaaagacaggcaggt

SEQ ID NO: 28420 - DNA, 20 bp, Artificial sequence
  synthetic
actcgaacctgccgctgtcg

SEQ ID NO: 28421 - DNA, 20 bp, Artificial sequence
  synthetic
tgcaagagggcaggctggat

SEQ ID NO: 28422 - DNA, 20 bp, Artificial sequence
  synthetic
ggtgtgagagcggaagtggc

SEQ ID NO: 28423 - DNA, 20 bp, Artificial sequence
  synthetic
cgccgccgcccggacccgcg

SEQ ID NO: 28424 - DNA, 20 bp, Artificial sequence
  synthetic
ctcttccgcttgcgctgccg

SEQ ID NO: 28425 - DNA, 20 bp, Artificial sequence
  synthetic
tggcctatcttgcgctgccg

SEQ ID NO: 28426 - DNA, 20 bp, Artificial sequence
  synthetic
tctagtgattccccgggata

SEQ ID NO: 28427 - DNA, 20 bp, Artificial sequence
  synthetic
aagtcgaggctgaaaactgt

SEQ ID NO: 28428 - DNA, 20 bp, Artificial sequence
  synthetic
aagtcgagttccccgggata

SEQ ID NO: 28429 - DNA, 20 bp, Artificial sequence
  synthetic
catgcgcagcggggccgtgg

SEQ ID NO: 28430 - DNA, 20 bp, Artificial sequence
  synthetic
ctcttacatcttttcctata

SEQ ID NO: 28431 - DNA, 20 bp, Artificial sequence
  synthetic
tggcatttcggacaaggggt

SEQ ID NO: 28432 - DNA, 20 bp, Artificial sequence
  synthetic
tggcattttcttttcctata

SEQ ID NO: 28433 - DNA, 20 bp, Artificial sequence
  synthetic
gtccccgccgccccgacgct

SEQ ID NO: 28434 - DNA, 20 bp, Artificial sequence
  synthetic
aggagtcacgccccgacgct

SEQ ID NO: 28435 - DNA, 20 bp, Artificial sequence
  synthetic
gccccgccggcggggcggtc

SEQ ID NO: 28436 - DNA, 20 bp, Artificial sequence
  synthetic
gggtccggcgagcatcacgc

SEQ ID NO: 28437 - DNA, 20 bp, Artificial sequence
  synthetic
tctgtgtcgagggcaatatt

SEQ ID NO: 28438 - DNA, 20 bp, Artificial sequence
  synthetic
ctgctttctgctggacgtaa

SEQ ID NO: 28439 - DNA, 20 bp, Artificial sequence
  synthetic
taaatccaaacattatgata

SEQ ID NO: 28440 - DNA, 20 bp, Artificial sequence
  synthetic
taaatccatcggccggagac

SEQ ID NO: 28441 - DNA, 20 bp, Artificial sequence
  synthetic
taagccctccagcggttagg

SEQ ID NO: 28442 - DNA, 20 bp, Artificial sequence
  synthetic
gtttaagagagtacagggta

SEQ ID NO: 28443 - DNA, 20 bp, Artificial sequence
  synthetic
caggtccttccccgggccct

SEQ ID NO: 28444 - DNA, 20 bp, Artificial sequence
  synthetic
ttttagataagttagatgtt

SEQ ID NO: 28445 - DNA, 20 bp, Artificial sequence
  synthetic
gtaaccgagtgattgcacat

SEQ ID NO: 28446 - DNA, 20 bp, Artificial sequence
  synthetic
ttcggagatctttactctac

SEQ ID NO: 28447 - DNA, 20 bp, Artificial sequence
  synthetic
gattctgtctgacgggcagt

SEQ ID NO: 28448 - DNA, 20 bp, Artificial sequence
  synthetic
ttgaaaagctgacgggcagt

SEQ ID NO: 28449 - DNA, 20 bp, Artificial sequence
  synthetic
atacaggccaatatcttgtt

SEQ ID NO: 28450 - DNA, 20 bp, Artificial sequence
  synthetic
atacaggctccctggggaag

SEQ ID NO: 28451 - DNA, 20 bp, Artificial sequence
  synthetic
tctggcccccaccttcttgg

SEQ ID NO: 28452 - DNA, 20 bp, Artificial sequence
  synthetic
acagtaccgtgcacatcagc

SEQ ID NO: 28453 - DNA, 20 bp, Artificial sequence
  synthetic
actcagtattaaggcttgtt

SEQ ID NO: 28454 - DNA, 20 bp, Artificial sequence
  synthetic
actctggtcctgatacatct

SEQ ID NO: 28455 - DNA, 20 bp, Artificial sequence
  synthetic
caaagcaagtaaggcttaga

SEQ ID NO: 28456 - DNA, 20 bp, Artificial sequence
  synthetic
taaaagaagctttgtccgat

SEQ ID NO: 28457 - DNA, 20 bp, Artificial sequence
  synthetic
cagcggcggcttttgctgca

SEQ ID NO: 28458 - DNA, 20 bp, Artificial sequence
  synthetic
gttttagagcttttgctgca

SEQ ID NO: 28459 - DNA, 20 bp, Artificial sequence
  synthetic
acggccgtgggaactcctcc

SEQ ID NO: 28460 - DNA, 20 bp, Artificial sequence
  synthetic
acggccgtatctcaaggcgt

SEQ ID NO: 28461 - DNA, 20 bp, Artificial sequence
  synthetic
cgccaaaagggaactcctcc

SEQ ID NO: 28462 - DNA, 20 bp, Artificial sequence
  synthetic
acacgcccagaggaaccttg

SEQ ID NO: 28463 - DNA, 20 bp, Artificial sequence
  synthetic
cataccccaaacaatccaaa

SEQ ID NO: 28464 - DNA, 20 bp, Artificial sequence
  synthetic
gtagagaagaaaattagtgg

SEQ ID NO: 28465 - DNA, 20 bp, Artificial sequence
  synthetic
gcagtaaagtatgtatatgt

SEQ ID NO: 28466 - DNA, 20 bp, Artificial sequence
  synthetic
ctctcgtagagggataggtg

SEQ ID NO: 28467 - DNA, 20 bp, Artificial sequence
  synthetic
ctctcgtatgtttcgcctcc

SEQ ID NO: 28468 - DNA, 20 bp, Artificial sequence
  synthetic
gaccgcgagccttgtgtgag

SEQ ID NO: 28469 - DNA, 20 bp, Artificial sequence
  synthetic
ttgtaaacgccttgtgtgag

SEQ ID NO: 28470 - DNA, 20 bp, Artificial sequence
  synthetic
cggagagcggtgcccgcgtc

SEQ ID NO: 28471 - DNA, 20 bp, Artificial sequence
  synthetic
gcaccttcccaggtctagca

SEQ ID NO: 28472 - DNA, 20 bp, Artificial sequence
  synthetic
ccctgtccagctgactgcaa

SEQ ID NO: 28473 - DNA, 20 bp, Artificial sequence
  synthetic
gggcagttagctgactgcaa

SEQ ID NO: 28474 - DNA, 20 bp, Artificial sequence
  synthetic
gtctccacctccgcctttgc

SEQ ID NO: 28475 - DNA, 20 bp, Artificial sequence
  synthetic
cgccgccgccgccgccgccg

SEQ ID NO: 28476 - DNA, 20 bp, Artificial sequence
  synthetic
tattcgtcccgccgccgccg

SEQ ID NO: 28477 - DNA, 20 bp, Artificial sequence
  synthetic
agggagctcccgatccgtgc

SEQ ID NO: 28478 - DNA, 20 bp, Artificial sequence
  synthetic
tacttaaatgcttaacgtag

SEQ ID NO: 28479 - DNA, 20 bp, Artificial sequence
  synthetic
aatttaaatgcttaacgtag

SEQ ID NO: 28480 - DNA, 20 bp, Artificial sequence
  synthetic
ttgagattttcacaacttga

SEQ ID NO: 28481 - DNA, 20 bp, Artificial sequence
  synthetic
gggtcaaacccgcagtaata

SEQ ID NO: 28482 - DNA, 20 bp, Artificial sequence
  synthetic
aagaagcgaggttcttttta

SEQ ID NO: 28483 - DNA, 20 bp, Artificial sequence
  synthetic
tacctcaatgcttaacacag

SEQ ID NO: 28484 - DNA, 20 bp, Artificial sequence
  synthetic
aagaatgcgggctgtatggc

SEQ ID NO: 28485 - DNA, 20 bp, Artificial sequence
  synthetic
cccctgttcctggaggcaag

SEQ ID NO: 28486 - DNA, 20 bp, Artificial sequence
  synthetic
ctcagaccgaccccacggag

SEQ ID NO: 28487 - DNA, 20 bp, Artificial sequence
  synthetic
cagtgagcgttcccaaaggg

SEQ ID NO: 28488 - DNA, 20 bp, Artificial sequence
  synthetic
tataatatcgacgcgttata

SEQ ID NO: 28489 - DNA, 20 bp, Artificial sequence
  synthetic
tataatatttttaatactgc

SEQ ID NO: 28490 - DNA, 20 bp, Artificial sequence
  synthetic
gcattaggttttaatactgc

SEQ ID NO: 28491 - DNA, 20 bp, Artificial sequence
  synthetic
ccgtacctaaggaagtagtg

SEQ ID NO: 28492 - DNA, 20 bp, Artificial sequence
  synthetic
ttaataagaaggaagtagtg

SEQ ID NO: 28493 - DNA, 20 bp, Artificial sequence
  synthetic
gtataaaatctgcaagtagt

SEQ ID NO: 28494 - DNA, 20 bp, Artificial sequence
  synthetic
gagcctccttctttcctgcc

SEQ ID NO: 28495 - DNA, 20 bp, Artificial sequence
  synthetic
acttattgtgttggagtgtc

SEQ ID NO: 28496 - DNA, 20 bp, Artificial sequence
  synthetic
caccacagttctggaggctg

SEQ ID NO: 28497 - DNA, 20 bp, Artificial sequence
  synthetic
tgtggagtttctggaggctg

SEQ ID NO: 28498 - DNA, 20 bp, Artificial sequence
  synthetic
gggaggagaaggcggcagcg

SEQ ID NO: 28499 - DNA, 20 bp, Artificial sequence
  synthetic
gggaggaggccatacgccat

SEQ ID NO: 28500 - DNA, 20 bp, Artificial sequence
  synthetic
gagggaggccacccatcaag

SEQ ID NO: 28501 - DNA, 20 bp, Artificial sequence
  synthetic
ggaagatggaaccaatcgca

SEQ ID NO: 28502 - DNA, 20 bp, Artificial sequence
  synthetic
gggccagccttgaactcgct

SEQ ID NO: 28503 - DNA, 20 bp, Artificial sequence
  synthetic
tggagagcctcttaaccgga

SEQ ID NO: 28504 - DNA, 20 bp, Artificial sequence
  synthetic
cccctctgctcttaaccgga

SEQ ID NO: 28505 - DNA, 20 bp, Artificial sequence
  synthetic
cgaggggtcccttcgcctgg

SEQ ID NO: 28506 - DNA, 20 bp, Artificial sequence
  synthetic
aacgttgcgtattgctacaa

SEQ ID NO: 28507 - DNA, 20 bp, Artificial sequence
  synthetic
aaattcttaattccattctt

SEQ ID NO: 28508 - DNA, 20 bp, Artificial sequence
  synthetic
tctccggtcatctactttgg

SEQ ID NO: 28509 - DNA, 20 bp, Artificial sequence
  synthetic
cggtgaacagctcctacccc

SEQ ID NO: 28510 - DNA, 20 bp, Artificial sequence
  synthetic
gaagaagagctgaggtttgc

SEQ ID NO: 28511 - DNA, 20 bp, Artificial sequence
  synthetic
cgccattcgagcatctagtt

SEQ ID NO: 28512 - DNA, 20 bp, Artificial sequence
  synthetic
gataggcgtctttatatagg

SEQ ID NO: 28513 - DNA, 20 bp, Artificial sequence
  synthetic
aattcctgagtgaacgaaca

SEQ ID NO: 28514 - DNA, 20 bp, Artificial sequence
  synthetic
catgctacaggctgttgctg

SEQ ID NO: 28515 - DNA, 20 bp, Artificial sequence
  synthetic
agcaattcgccagttgttgc

SEQ ID NO: 28516 - DNA, 20 bp, Artificial sequence
  synthetic
agttacatccatgccctaca

SEQ ID NO: 28517 - DNA, 20 bp, Artificial sequence
  synthetic
cgcttcactgtccctggact

SEQ ID NO: 28518 - DNA, 20 bp, Artificial sequence
  synthetic
ggcaggctggctgggtaccg

SEQ ID NO: 28519 - DNA, 20 bp, Artificial sequence
  synthetic
ggcaggctggctgggtgggt

SEQ ID NO: 28520 - DNA, 20 bp, Artificial sequence
  synthetic
ccagctaaggctgggtaccg

SEQ ID NO: 28521 - DNA, 20 bp, Artificial sequence
  synthetic
tttatatttgtatgtcttat

SEQ ID NO: 28522 - DNA, 20 bp, Artificial sequence
  synthetic
aaatgctagattttacttta

SEQ ID NO: 28523 - DNA, 20 bp, Artificial sequence
  synthetic
gctatccactgcatcatctc

SEQ ID NO: 28524 - DNA, 20 bp, Artificial sequence
  synthetic
ttaccattctgcatcatctc

SEQ ID NO: 28525 - DNA, 20 bp, Artificial sequence
  synthetic
gagtgattacctggggcgct

SEQ ID NO: 28526 - DNA, 20 bp, Artificial sequence
  synthetic
gagtgatttttaaaacttac

SEQ ID NO: 28527 - DNA, 20 bp, Artificial sequence
  synthetic
agaatccatttaaaacttac

SEQ ID NO: 28528 - DNA, 20 bp, Artificial sequence
  synthetic
tcgcaaccgtttgtttcata

SEQ ID NO: 28529 - DNA, 20 bp, Artificial sequence
  synthetic
attgccaagtttgtttcata

SEQ ID NO: 28530 - DNA, 20 bp, Artificial sequence
  synthetic
ggccttgttctgaatgcaca

SEQ ID NO: 28531 - DNA, 20 bp, Artificial sequence
  synthetic
gtgcttcaatccaatgattg

SEQ ID NO: 28532 - DNA, 20 bp, Artificial sequence
  synthetic
taatacggaactccatttcc

SEQ ID NO: 28533 - DNA, 20 bp, Artificial sequence
  synthetic
taatacggggggtgcaacga

SEQ ID NO: 28534 - DNA, 20 bp, Artificial sequence
  synthetic
agcactaaaactccatttcc

SEQ ID NO: 28535 - DNA, 20 bp, Artificial sequence
  synthetic
gagctatcaaggacaagaaa

SEQ ID NO: 28536 - DNA, 20 bp, Artificial sequence
  synthetic
gacctaagctaactcattaa

SEQ ID NO: 28537 - DNA, 20 bp, Artificial sequence
  synthetic
gagctggtcgctgtcggcta

SEQ ID NO: 28538 - DNA, 20 bp, Artificial sequence
  synthetic
cttgcaaccgctgtcggcta

SEQ ID NO: 28539 - DNA, 20 bp, Artificial sequence
  synthetic
gaagcctgcgataggtgagt

SEQ ID NO: 28540 - DNA, 20 bp, Artificial sequence
  synthetic
tggattccgacccacacgcg

SEQ ID NO: 28541 - DNA, 20 bp, Artificial sequence
  synthetic
attttattatattttattca

SEQ ID NO: 28542 - DNA, 20 bp, Artificial sequence
  synthetic
ttctatgaagagatgccttg

SEQ ID NO: 28543 - DNA, 20 bp, Artificial sequence
  synthetic
ttaatgcatttagtaattta

SEQ ID NO: 28544 - DNA, 20 bp, Artificial sequence
  synthetic
cagtgccacgttgtgagttg

SEQ ID NO: 28545 - DNA, 20 bp, Artificial sequence
  synthetic
cagtgccagacatcacaggt

SEQ ID NO: 28546 - DNA, 20 bp, Artificial sequence
  synthetic
ttgttacccctcgaactcct

SEQ ID NO: 28547 - DNA, 20 bp, Artificial sequence
  synthetic
cgacatcgaggatggcgcgt

SEQ ID NO: 28548 - DNA, 20 bp, Artificial sequence
  synthetic
tacttctcaggatggcgcgt

SEQ ID NO: 28549 - DNA, 20 bp, Artificial sequence
  synthetic
gtgatgtcaattggtcttta

SEQ ID NO: 28550 - DNA, 20 bp, Artificial sequence
  synthetic
caaggactttacatataagt

SEQ ID NO: 28551 - DNA, 20 bp, Artificial sequence
  synthetic
ggaaactccccaagggaatc

SEQ ID NO: 28552 - DNA, 20 bp, Artificial sequence
  synthetic
attgttatcccaagggaatc

SEQ ID NO: 28553 - DNA, 20 bp, Artificial sequence
  synthetic
atatacacatattggttttt

SEQ ID NO: 28554 - DNA, 20 bp, Artificial sequence
  synthetic
tagccacgatattggttttt

SEQ ID NO: 28555 - DNA, 20 bp, Artificial sequence
  synthetic
tcttccaccagaagggcctc

SEQ ID NO: 28556 - DNA, 20 bp, Artificial sequence
  synthetic
aaggtaggcagaagggcctc

SEQ ID NO: 28557 - DNA, 20 bp, Artificial sequence
  synthetic
tcttccacgcttctaaagat

SEQ ID NO: 28558 - DNA, 20 bp, Artificial sequence
  synthetic
ccttctaacagccaggtcat

SEQ ID NO: 28559 - DNA, 20 bp, Artificial sequence
  synthetic
aaggagcccagccaggtcat

SEQ ID NO: 28560 - DNA, 20 bp, Artificial sequence
  synthetic
attctttggttttatagcca

SEQ ID NO: 28561 - DNA, 20 bp, Artificial sequence
  synthetic
gttaccatcctagagacatg

SEQ ID NO: 28562 - DNA, 20 bp, Artificial sequence
  synthetic
cggcaacaatagctattgga

SEQ ID NO: 28563 - DNA, 20 bp, Artificial sequence
  synthetic
tagaggactagcaaccgtta

SEQ ID NO: 28564 - DNA, 20 bp, Artificial sequence
  synthetic
ctgaaggtaccccgcgcgcg

SEQ ID NO: 28565 - DNA, 20 bp, Artificial sequence
  synthetic
gccaacacggtacacattgt

SEQ ID NO: 28566 - DNA, 20 bp, Artificial sequence
  synthetic
ccggggtcggctgggacaga

SEQ ID NO: 28567 - DNA, 20 bp, Artificial sequence
  synthetic
cctacgacggctggtcacta

SEQ ID NO: 28568 - DNA, 20 bp, Artificial sequence
  synthetic
agataagactgctgtggctg

SEQ ID NO: 28569 - DNA, 20 bp, Artificial sequence
  synthetic
catgcttctcatgcaacacc

SEQ ID NO: 28570 - DNA, 20 bp, Artificial sequence
  synthetic
cactctatgattgctcctac

SEQ ID NO: 28571 - DNA, 20 bp, Artificial sequence
  synthetic
cactctattgcattctactt

SEQ ID NO: 28572 - DNA, 20 bp, Artificial sequence
  synthetic
gccccgcctctaacctaaca

SEQ ID NO: 28573 - DNA, 20 bp, Artificial sequence
  synthetic
tcaggcccgagtttgaatac

SEQ ID NO: 28574 - DNA, 20 bp, Artificial sequence
  synthetic
gtgactatcctccgcctcca

SEQ ID NO: 28575 - DNA, 20 bp, Artificial sequence
  synthetic
ggcgggctaataatcgaggg

SEQ ID NO: 28576 - DNA, 20 bp, Artificial sequence
  synthetic
cgaaggcggcccaccacctc

SEQ ID NO: 28577 - DNA, 20 bp, Artificial sequence
  synthetic
ctgctgctccctaatccgac

SEQ ID NO: 28578 - DNA, 20 bp, Artificial sequence
  synthetic
caggtcctggagtcccgtaa

SEQ ID NO: 28579 - DNA, 20 bp, Artificial sequence
  synthetic
ctctgtgtagccgtcccatc

SEQ ID NO: 28580 - DNA, 20 bp, Artificial sequence
  synthetic
cgcaccacgattggagaata

SEQ ID NO: 28581 - DNA, 20 bp, Artificial sequence
  synthetic
ttagtagtagatacatctaa

SEQ ID NO: 28582 - DNA, 20 bp, Artificial sequence
  synthetic
tgtttgctgtcttccattgg

SEQ ID NO: 28583 - DNA, 20 bp, Artificial sequence
  synthetic
tacaacatccgagtacctat

SEQ ID NO: 28584 - DNA, 20 bp, Artificial sequence
  synthetic
ccggtattcgcctcgaggcg

SEQ ID NO: 28585 - DNA, 20 bp, Artificial sequence
  synthetic
tttccgcatcaaggtctcga

SEQ ID NO: 28586 - DNA, 20 bp, Artificial sequence
  synthetic
ctctgagcttctggcaagta

SEQ ID NO: 28587 - DNA, 20 bp, Artificial sequence
  synthetic
ctcctggcatgccgtggttc

SEQ ID NO: 28588 - DNA, 20 bp, Artificial sequence
  synthetic
actgcatggccagcgctagg

SEQ ID NO: 28589 - DNA, 20 bp, Artificial sequence
  synthetic
cagcggccgcggtggctgag

SEQ ID NO: 28590 - DNA, 20 bp, Artificial sequence
  synthetic
aaggtcctactgctcacgca

SEQ ID NO: 28591 - DNA, 20 bp, Artificial sequence
  synthetic
aagtccagataacagccaag

SEQ ID NO: 28592 - DNA, 20 bp, Artificial sequence
  synthetic
tcttcgtcctgctcgcgctg

SEQ ID NO: 28593 - DNA, 20 bp, Artificial sequence
  synthetic
tcttcgtcgccgctctctct

SEQ ID NO: 28594 - DNA, 20 bp, Artificial sequence
  synthetic
ccccggccgtcgcggagcct

SEQ ID NO: 28595 - DNA, 20 bp, Artificial sequence
  synthetic
tctcttccggctgttcaaga

SEQ ID NO: 28596 - DNA, 20 bp, Artificial sequence
  synthetic
ctcgcctatttctgggctcg

SEQ ID NO: 28597 - DNA, 20 bp, Artificial sequence
  synthetic
gcacctgctatagctcttcc

SEQ ID NO: 28598 - DNA, 20 bp, Artificial sequence
  synthetic
ccgcttctgctaatcaaaac

SEQ ID NO: 28599 - DNA, 20 bp, Artificial sequence
  synthetic
acaacagagttttcttgaag

SEQ ID NO: 28600 - DNA, 20 bp, Artificial sequence
  synthetic
acaacagatcacaggattca

SEQ ID NO: 28601 - DNA, 20 bp, Artificial sequence
  synthetic
gaggttatgttttcttgaag

SEQ ID NO: 28602 - DNA, 20 bp, Artificial sequence
  synthetic
aacaatacgagcgggtcccc

SEQ ID NO: 28603 - DNA, 20 bp, Artificial sequence
  synthetic
aggaactccagaccttccta

SEQ ID NO: 28604 - DNA, 20 bp, Artificial sequence
  synthetic
aggaactcgcttttagagcc

SEQ ID NO: 28605 - DNA, 20 bp, Artificial sequence
  synthetic
cacggactcagaccttccta

SEQ ID NO: 28606 - DNA, 20 bp, Artificial sequence
  synthetic
gagggaggaagggatagcca

SEQ ID NO: 28607 - DNA, 20 bp, Artificial sequence
  synthetic
cagcgcgggaataagcctta

SEQ ID NO: 28608 - DNA, 20 bp, Artificial sequence
  synthetic
aagctctggaaagcaacgcc

SEQ ID NO: 28609 - DNA, 20 bp, Artificial sequence
  synthetic
tcatccgcagtgcaatttga

SEQ ID NO: 28610 - DNA, 20 bp, Artificial sequence
  synthetic
ctccttggggtcggcgtctg

SEQ ID NO: 28611 - DNA, 20 bp, Artificial sequence
  synthetic
gtacgtgtcgaaactttgcc

SEQ ID NO: 28612 - DNA, 20 bp, Artificial sequence
  synthetic
cgcatccacgaaactttgcc

SEQ ID NO: 28613 - DNA, 20 bp, Artificial sequence
  synthetic
tgattctaggctggtcacac

SEQ ID NO: 28614 - DNA, 20 bp, Artificial sequence
  synthetic
gcgggctgacgcataaacac

SEQ ID NO: 28615 - DNA, 20 bp, Artificial sequence
  synthetic
atctagtgctcgcgccggct

SEQ ID NO: 28616 - DNA, 20 bp, Artificial sequence
  synthetic
ctgttgaaggcctaacaacc

SEQ ID NO: 28617 - DNA, 20 bp, Artificial sequence
  synthetic
gctcgcttggcctaacaacc

SEQ ID NO: 28618 - DNA, 20 bp, Artificial sequence
  synthetic
ctgttgaacagaatcaggga

SEQ ID NO: 28619 - DNA, 20 bp, Artificial sequence
  synthetic
ctcggcgctacccaacctac

SEQ ID NO: 28620 - DNA, 20 bp, Artificial sequence
  synthetic
gcaatgtgagaggcctgcgg

SEQ ID NO: 28621 - DNA, 20 bp, Artificial sequence
  synthetic
ctcggcgcagaggcctgcgg

SEQ ID NO: 28622 - DNA, 20 bp, Artificial sequence
  synthetic
gcattgccaacaaggagaag

SEQ ID NO: 28623 - DNA, 20 bp, Artificial sequence
  synthetic
attggctaaacaaggagaag

SEQ ID NO: 28624 - DNA, 20 bp, Artificial sequence
  synthetic
atacttacaccttgtcctac

SEQ ID NO: 28625 - DNA, 20 bp, Artificial sequence
  synthetic
ttcgagagcctctgtcggat

SEQ ID NO: 28626 - DNA, 20 bp, Artificial sequence
  synthetic
tattgcatacccgtttttaa

SEQ ID NO: 28627 - DNA, 20 bp, Artificial sequence
  synthetic
tctggctcccaaaaagatgg

SEQ ID NO: 28628 - DNA, 20 bp, Artificial sequence
  synthetic
ctctcctgaacaaaagatgg

SEQ ID NO: 28629 - DNA, 20 bp, Artificial sequence
  synthetic
cgattgtgcacgccatgaac

SEQ ID NO: 28630 - DNA, 20 bp, Artificial sequence
  synthetic
actcactggtaaaggctccg

SEQ ID NO: 28631 - DNA, 20 bp, Artificial sequence
  synthetic
tggtggcacacgccatgaac

SEQ ID NO: 28632 - DNA, 20 bp, Artificial sequence
  synthetic
aatggacacaccaaatgtct

SEQ ID NO: 28633 - DNA, 20 bp, Artificial sequence
  synthetic
gaagcctgactagattctct

SEQ ID NO: 28634 - DNA, 20 bp, Artificial sequence
  synthetic
gggaaagcctttaacttggc

SEQ ID NO: 28635 - DNA, 20 bp, Artificial sequence
  synthetic
acagcctgctttaacttggc

SEQ ID NO: 28636 - DNA, 20 bp, Artificial sequence
  synthetic
agagagtgctctgagcactg

SEQ ID NO: 28637 - DNA, 20 bp, Artificial sequence
  synthetic
tgggtctgggtgtgagctgt

SEQ ID NO: 28638 - DNA, 20 bp, Artificial sequence
  synthetic
tttgttttccagtatgtacg

SEQ ID NO: 28639 - DNA, 20 bp, Artificial sequence
  synthetic
gagcttgtctgagtggaggc

SEQ ID NO: 28640 - DNA, 20 bp, Artificial sequence
  synthetic
tgaacaagggacaatctaag

SEQ ID NO: 28641 - DNA, 20 bp, Artificial sequence
  synthetic
ctcgaccacagatgctctga

SEQ ID NO: 28642 - DNA, 20 bp, Artificial sequence
  synthetic
tggtttagcagatgctctga

SEQ ID NO: 28643 - DNA, 20 bp, Artificial sequence
  synthetic
attgtggtataaatggaata

SEQ ID NO: 28644 - DNA, 20 bp, Artificial sequence
  synthetic
gccacataataaatggaata

SEQ ID NO: 28645 - DNA, 20 bp, Artificial sequence
  synthetic
agcggggcaaacagtgagtg

SEQ ID NO: 28646 - DNA, 20 bp, Artificial sequence
  synthetic
ttaccctaaaacagtgagtg

SEQ ID NO: 28647 - DNA, 20 bp, Artificial sequence
  synthetic
gaagaagaaggtgtcaacca

SEQ ID NO: 28648 - DNA, 20 bp, Artificial sequence
  synthetic
cttgctcaatgccacagcca

SEQ ID NO: 28649 - DNA, 20 bp, Artificial sequence
  synthetic
gaatattaaatgaaaggaga

SEQ ID NO: 28650 - DNA, 20 bp, Artificial sequence
  synthetic
ccgtgggcttttctgtttgg

SEQ ID NO: 28651 - DNA, 20 bp, Artificial sequence
  synthetic
gtgacttctagagctcagtg

SEQ ID NO: 28652 - DNA, 20 bp, Artificial sequence
  synthetic
acgggtgctgggacaatcgg

SEQ ID NO: 28653 - DNA, 20 bp, Artificial sequence
  synthetic
aggtgtgaagagcctattga

SEQ ID NO: 28654 - DNA, 20 bp, Artificial sequence
  synthetic
aggtgtgaccccaggtcgac

SEQ ID NO: 28655 - DNA, 20 bp, Artificial sequence
  synthetic
tcataaagcgaattggattg

SEQ ID NO: 28656 - DNA, 20 bp, Artificial sequence
  synthetic
accatatagctattggattg

SEQ ID NO: 28657 - DNA, 20 bp, Artificial sequence
  synthetic
tccctcggtcgagtcatcat

SEQ ID NO: 28658 - DNA, 20 bp, Artificial sequence
  synthetic
atcggatataagagtactga

SEQ ID NO: 28659 - DNA, 20 bp, Artificial sequence
  synthetic
gaaaagagggcctcagacag

SEQ ID NO: 28660 - DNA, 20 bp, Artificial sequence
  synthetic
agtacaccccaatctcccag

SEQ ID NO: 28661 - DNA, 20 bp, Artificial sequence
  synthetic
agtacaccgagcggcatgga

SEQ ID NO: 28662 - DNA, 20 bp, Artificial sequence
  synthetic
ccacgtacggggtgacattg

SEQ ID NO: 28663 - DNA, 20 bp, Artificial sequence
  synthetic
ggggtctgattcgacgtcat

SEQ ID NO: 28664 - DNA, 20 bp, Artificial sequence
  synthetic
gtttgcatggatccaagacc

SEQ ID NO: 28665 - DNA, 20 bp, Artificial sequence
  synthetic
atcatcaactgtttactccc

SEQ ID NO: 28666 - DNA, 20 bp, Artificial sequence
  synthetic
gagacccaggtcgaggtccg

SEQ ID NO: 28667 - DNA, 20 bp, Artificial sequence
  synthetic
ccgcaggttgtgtagagtcg

SEQ ID NO: 28668 - DNA, 20 bp, Artificial sequence
  synthetic
ggttaaaaatagttttaata

SEQ ID NO: 28669 - DNA, 20 bp, Artificial sequence
  synthetic
cgaatatcgttggagaattc

SEQ ID NO: 28670 - DNA, 20 bp, Artificial sequence
  synthetic
aggtcccgagaccagtgttt

SEQ ID NO: 28671 - DNA, 20 bp, Artificial sequence
  synthetic
caagattcgagttgtgaacg

SEQ ID NO: 28672 - DNA, 20 bp, Artificial sequence
  synthetic
atatctcagggagctggcga

SEQ ID NO: 28673 - DNA, 20 bp, Artificial sequence
  synthetic
atatctcattttctaacttc

SEQ ID NO: 28674 - DNA, 20 bp, Artificial sequence
  synthetic
cgtgcatgattgagatagtc

SEQ ID NO: 28675 - DNA, 20 bp, Artificial sequence
  synthetic
tcagttcagtcgagtggtgg

SEQ ID NO: 28676 - DNA, 20 bp, Artificial sequence
  synthetic
tcagttcaaatatcgacctc

SEQ ID NO: 28677 - DNA, 20 bp, Artificial sequence
  synthetic
tttaagctcaaactgcttaa

SEQ ID NO: 28678 - DNA, 20 bp, Artificial sequence
  synthetic
gcataccctcttttaataaa

SEQ ID NO: 28679 - DNA, 20 bp, Artificial sequence
  synthetic
gccttctcctataaattcta

SEQ ID NO: 28680 - DNA, 20 bp, Artificial sequence
  synthetic
taaagaggagccccgccagc

SEQ ID NO: 28681 - DNA, 20 bp, Artificial sequence
  synthetic
gttctttgggaacgctctcg

SEQ ID NO: 28682 - DNA, 20 bp, Artificial sequence
  synthetic
ccctggaaggaacgctctcg

SEQ ID NO: 28683 - DNA, 20 bp, Artificial sequence
  synthetic
actcaacaatttctccaaca

SEQ ID NO: 28684 - DNA, 20 bp, Artificial sequence
  synthetic
gccctacgtcgggggctccc

SEQ ID NO: 28685 - DNA, 20 bp, Artificial sequence
  synthetic
tggcacaactggggagtgac

SEQ ID NO: 28686 - DNA, 20 bp, Artificial sequence
  synthetic
gtctgcagggtactcagcgg

SEQ ID NO: 28687 - DNA, 20 bp, Artificial sequence
  synthetic
acacgctttagctcgcgttt

SEQ ID NO: 28688 - DNA, 20 bp, Artificial sequence
  synthetic
ctctatgcccctggattggc

SEQ ID NO: 28689 - DNA, 20 bp, Artificial sequence
  synthetic
aacggaaaatcccgttgtaa

SEQ ID NO: 28690 - DNA, 20 bp, Artificial sequence
  synthetic
ggacctggatcatcggccgt

SEQ ID NO: 28691 - DNA, 20 bp, Artificial sequence
  synthetic
ttccccttagttggcccaga

SEQ ID NO: 28692 - DNA, 20 bp, Artificial sequence
  synthetic
gggtggggtccctcaagttg

SEQ ID NO: 28693 - DNA, 20 bp, Artificial sequence
  synthetic
caagggtacattttttttca

SEQ ID NO: 28694 - DNA, 20 bp, Artificial sequence
  synthetic
aagaccagatcaattaaatg

SEQ ID NO: 28695 - DNA, 20 bp, Artificial sequence
  synthetic
agaaatgaggacctcagttg

SEQ ID NO: 28696 - DNA, 20 bp, Artificial sequence
  synthetic
ttgcggcgatgaaatgaaat

SEQ ID NO: 28697 - DNA, 20 bp, Artificial sequence
  synthetic
tcccagccaatagaaagtga

SEQ ID NO: 28698 - DNA, 20 bp, Artificial sequence
  synthetic
gcctccctccagcgacggcc

SEQ ID NO: 28699 - DNA, 20 bp, Artificial sequence
  synthetic
tggacaaagcctacgccggt

SEQ ID NO: 28700 - DNA, 20 bp, Artificial sequence
  synthetic
ggcggcccgcagcgggataa

SEQ ID NO: 28701 - DNA, 20 bp, Artificial sequence
  synthetic
taagtgaggcactagaacga

SEQ ID NO: 28702 - DNA, 20 bp, Artificial sequence
  synthetic
aagccccagcgctctagagc

SEQ ID NO: 28703 - DNA, 20 bp, Artificial sequence
  synthetic
ggttgtggttctgcatgttt

SEQ ID NO: 28704 - DNA, 20 bp, Artificial sequence
  synthetic
caattgtgttttacttgtca

SEQ ID NO: 28705 - DNA, 20 bp, Artificial sequence
  synthetic
caattgtggggccaaaccac

SEQ ID NO: 28706 - DNA, 20 bp, Artificial sequence
  synthetic
aaaacatccactccctgtaa

SEQ ID NO: 28707 - DNA, 20 bp, Artificial sequence
  synthetic
tccggtcacactccctgtaa

SEQ ID NO: 28708 - DNA, 20 bp, Artificial sequence
  synthetic
aatatccccacaagctgttt

SEQ ID NO: 28709 - DNA, 20 bp, Artificial sequence
  synthetic
cctcggcttgggtaaggcga

SEQ ID NO: 28710 - DNA, 20 bp, Artificial sequence
  synthetic
ggcacaaatgggtaaggcga

SEQ ID NO: 28711 - DNA, 20 bp, Artificial sequence
  synthetic
cctcggctgcccgttccacg

SEQ ID NO: 28712 - DNA, 20 bp, Artificial sequence
  synthetic
tgaaacacacaagaggacca

SEQ ID NO: 28713 - DNA, 20 bp, Artificial sequence
  synthetic
ccactcaattatgtcataag

SEQ ID NO: 28714 - DNA, 20 bp, Artificial sequence
  synthetic
aaagaaagcaataaaattaa

SEQ ID NO: 28715 - DNA, 20 bp, Artificial sequence
  synthetic
ggctgacctgctttgccttg

SEQ ID NO: 28716 - DNA, 20 bp, Artificial sequence
  synthetic
agacacaagcatacttctgc

SEQ ID NO: 28717 - DNA, 20 bp, Artificial sequence
  synthetic
catgctttgcatacttctgc

SEQ ID NO: 28718 - DNA, 20 bp, Artificial sequence
  synthetic
cacaacaccaacagaagacc

SEQ ID NO: 28719 - DNA, 20 bp, Artificial sequence
  synthetic
gtcacgtggattcttcaggg

SEQ ID NO: 28720 - DNA, 20 bp, Artificial sequence
  synthetic
ggagcatgatagtaataatt

SEQ ID NO: 28721 - DNA, 20 bp, Artificial sequence
  synthetic
ttacggagtattttgtccgc

SEQ ID NO: 28722 - DNA, 20 bp, Artificial sequence
  synthetic
ttaacaaggtcgacagcgcc

SEQ ID NO: 28723 - DNA, 20 bp, Artificial sequence
  synthetic
cgtcacttcgtttgtaacaa

SEQ ID NO: 28724 - DNA, 20 bp, Artificial sequence
  synthetic
gtcccatgcgtcctctgccc

SEQ ID NO: 28725 - DNA, 20 bp, Artificial sequence
  synthetic
gtcccatgatagagagtgaa

SEQ ID NO: 28726 - DNA, 20 bp, Artificial sequence
  synthetic
aagttcgccgtcctctgccc

SEQ ID NO: 28727 - DNA, 20 bp, Artificial sequence
  synthetic
gtagtaggcttcagacttga

SEQ ID NO: 28728 - DNA, 20 bp, Artificial sequence
  synthetic
aaagccactgttgttgttac

SEQ ID NO: 28729 - DNA, 20 bp, Artificial sequence
  synthetic
ggaaaaggacaagatatttg

SEQ ID NO: 28730 - DNA, 20 bp, Artificial sequence
  synthetic
ggaaaaggcgccaggcccct

SEQ ID NO: 28731 - DNA, 20 bp, Artificial sequence
  synthetic
cgggtattctatagccggcg

SEQ ID NO: 28732 - DNA, 20 bp, Artificial sequence
  synthetic
gccgtttcgtagtgaccggc

SEQ ID NO: 28733 - DNA, 20 bp, Artificial sequence
  synthetic
tttctttcgtagtgttcttt

SEQ ID NO: 28734 - DNA, 20 bp, Artificial sequence
  synthetic
agacacctagggatcgtcaa

SEQ ID NO: 28735 - DNA, 20 bp, Artificial sequence
  synthetic
ccccacctagggattactcc

SEQ ID NO: 28736 - DNA, 20 bp, Artificial sequence
  synthetic
tggcaaatagggatttcttg

SEQ ID NO: 28737 - DNA, 20 bp, Artificial sequence
  synthetic
cgggtcctagggatccggcg

SEQ ID NO: 28738 - DNA, 20 bp, Artificial sequence
  synthetic
aattcctttaggatcgtcaa

SEQ ID NO: 28739 - DNA, 20 bp, Artificial sequence
  synthetic
gaatcgagaaaagccacgga

SEQ ID NO: 28740 - DNA, 20 bp, Artificial sequence
  synthetic
aattcctttaaagccgtcaa

SEQ ID NO: 28741 - DNA, 20 bp, Artificial sequence
  synthetic
ttccggggagaagccacgga

SEQ ID NO: 28742 - DNA, 20 bp, Artificial sequence
  synthetic
ttccggggagaagccgtcaa

SEQ ID NO: 28743 - DNA, 20 bp, Artificial sequence
  synthetic
tggcaaagagaagcttcttg

SEQ ID NO: 28744 - DNA, 20 bp, Artificial sequence
  synthetic
ccccggggagaagctactcc

SEQ ID NO: 28745 - DNA, 20 bp, Artificial sequence
  synthetic
gaatcgagaaaggacacgga

SEQ ID NO: 28746 - DNA, 20 bp, Artificial sequence
  synthetic
aattcctttaaggacgtcaa

SEQ ID NO: 28747 - DNA, 20 bp, Artificial sequence
  synthetic
gccgtctccaaggaaccggc

SEQ ID NO: 28748 - DNA, 20 bp, Artificial sequence
  synthetic
gaagcctccaaggaagccat

SEQ ID NO: 28749 - DNA, 20 bp, Artificial sequence
  synthetic
gaagcctccaaggacacgga

SEQ ID NO: 28750 - DNA, 20 bp, Artificial sequence
  synthetic
cccgcctccaaggatactcc

SEQ ID NO: 28751 - DNA, 20 bp, Artificial sequence
  synthetic
cccgtggatctagagctgaa

SEQ ID NO: 28752 - DNA, 20 bp, Artificial sequence
  synthetic
cccgtggatctagatactcc

SEQ ID NO: 28753 - DNA, 20 bp, Artificial sequence
  synthetic
aattcctttatagacgtcaa

SEQ ID NO: 28754 - DNA, 20 bp, Artificial sequence
  synthetic
tggcaaaatctagattcttg

SEQ ID NO: 28755 - DNA, 20 bp, Artificial sequence
  synthetic
cgggtggatctagaccggcg

SEQ ID NO: 28756 - DNA, 20 bp, Artificial sequence
  synthetic
gccgtgtccctctcaccggc

SEQ ID NO: 28757 - DNA, 20 bp, Artificial sequence
  synthetic
gaatcgagaatctccacgga

SEQ ID NO: 28758 - DNA, 20 bp, Artificial sequence
  synthetic
cgggtgtccctctcccggcg

SEQ ID NO: 28759 - DNA, 20 bp, Artificial sequence
  synthetic
aattcctttatctccgtcaa

SEQ ID NO: 28760 - DNA, 20 bp, Artificial sequence
  synthetic
cgtaagtccctctccacgga

SEQ ID NO: 28761 - DNA, 20 bp, Artificial sequence
  synthetic
cgtaagtccctctcttcttg

SEQ ID NO: 28762 - DNA, 20 bp, Artificial sequence
  synthetic
cccaagtccctctctactcc

SEQ ID NO: 28763 - DNA, 20 bp, Artificial sequence
  synthetic
tggcaaaccctctcttcttg

SEQ ID NO: 28764 - DNA, 20 bp, Artificial sequence
  synthetic
gccgtgagacaggaaccggc

SEQ ID NO: 28765 - DNA, 20 bp, Artificial sequence
  synthetic
tggcaaagacaggattcttg

SEQ ID NO: 28766 - DNA, 20 bp, Artificial sequence
  synthetic
catgagagacaggattaata

SEQ ID NO: 28767 - DNA, 20 bp, Artificial sequence
  synthetic
gccgttcaacagaaaccggc

SEQ ID NO: 28768 - DNA, 20 bp, Artificial sequence
  synthetic
aattcctttaagaacgtcaa

SEQ ID NO: 28769 - DNA, 20 bp, Artificial sequence
  synthetic
gtagttcaacagaaagcttt

SEQ ID NO: 28770 - DNA, 20 bp, Artificial sequence
  synthetic
gtagttcaacagaaccggcg

SEQ ID NO: 28771 - DNA, 20 bp, Artificial sequence
  synthetic
cccgttcaacagaatactcc

SEQ ID NO: 28772 - DNA, 20 bp, Artificial sequence
  synthetic
gaatcgagaaagaacacgga

SEQ ID NO: 28773 - DNA, 20 bp, Artificial sequence
  synthetic
cgggttcaacagaaccggcg

SEQ ID NO: 28774 - DNA, 20 bp, Artificial sequence
  synthetic
tggcaaatccaagtttcttg

SEQ ID NO: 28775 - DNA, 20 bp, Artificial sequence
  synthetic
ttaacattccaagtttatct

SEQ ID NO: 28776 - DNA, 20 bp, Artificial sequence
  synthetic
taaatcaggtacagaatttc

SEQ ID NO: 28777 - DNA, 20 bp, Artificial sequence
  synthetic
cgggtcaggtacagccggcg

SEQ ID NO: 28778 - DNA, 20 bp, Artificial sequence
  synthetic
aattcctttaacagcgtcaa

SEQ ID NO: 28779 - DNA, 20 bp, Artificial sequence
  synthetic
aacagacaccatggtgcatc

SEQ ID NO: 28780 - DNA, 20 bp, Artificial sequence
  synthetic
aattcctttaatagcgtcaa

SEQ ID NO: 28781 - DNA, 20 bp, Artificial sequence
  synthetic
ttgttaccatatagcgtcaa

SEQ ID NO: 28782 - DNA, 20 bp, Artificial sequence
  synthetic
gccgtccacatgaaaccggc

SEQ ID NO: 28783 - DNA, 20 bp, Artificial sequence
  synthetic
cgccgccacatgaaaaagaa

SEQ ID NO: 28784 - DNA, 20 bp, Artificial sequence
  synthetic
cgccgccacatgaacgtcaa

SEQ ID NO: 28785 - DNA, 20 bp, Artificial sequence
  synthetic
aattcctttatgaacgtcaa

SEQ ID NO: 28786 - DNA, 20 bp, Artificial sequence
  synthetic
gaatcgagaacgaacacgga

SEQ ID NO: 28787 - DNA, 20 bp, Artificial sequence
  synthetic
cgggtatggccgaaccggcg

SEQ ID NO: 28788 - DNA, 20 bp, Artificial sequence
  synthetic
tagggatggccgaacgtcaa

SEQ ID NO: 28789 - DNA, 20 bp, Artificial sequence
  synthetic
aattcctttacgaacgtcaa

SEQ ID NO: 28790 - DNA, 20 bp, Artificial sequence
  synthetic
tggcaaaggccgaattcttg

SEQ ID NO: 28791 - DNA, 20 bp, Artificial sequence
  synthetic
gaatcgagaacccccacgga

SEQ ID NO: 28792 - DNA, 20 bp, Artificial sequence
  synthetic
gccgtcccttccccaccggc

SEQ ID NO: 28793 - DNA, 20 bp, Artificial sequence
  synthetic
aattcctttacccccgtcaa

SEQ ID NO: 28794 - DNA, 20 bp, Artificial sequence
  synthetic
tcccgcccttccccccggcg

SEQ ID NO: 28795 - DNA, 20 bp, Artificial sequence
  synthetic
tcccgcccttccccttcccg

SEQ ID NO: 28796 - DNA, 20 bp, Artificial sequence
  synthetic
ccccgcccttcccctactcc

SEQ ID NO: 28797 - DNA, 20 bp, Artificial sequence
  synthetic
tggcaaacttccccttcttg

SEQ ID NO: 28798 - DNA, 20 bp, Artificial sequence
  synthetic
cgggtcccttccccccggcg

SEQ ID NO: 28799 - DNA, 20 bp, Artificial sequence
  synthetic
gaatcgagaataaccacgga

SEQ ID NO: 28800 - DNA, 20 bp, Artificial sequence
  synthetic
cggtgtatcttaaccgtcaa

SEQ ID NO: 28801 - DNA, 20 bp, Artificial sequence
  synthetic
cggtgtatcttaacttcttg

SEQ ID NO: 28802 - DNA, 20 bp, Artificial sequence
  synthetic
tggcaaatcttaacttcttg

SEQ ID NO: 28803 - DNA, 20 bp, Artificial sequence
  synthetic
gccgtgcgttgcgtaccggc

SEQ ID NO: 28804 - DNA, 20 bp, Artificial sequence
  synthetic
gaatcgagaagcgtcacgga

SEQ ID NO: 28805 - DNA, 20 bp, Artificial sequence
  synthetic
cgggtgcgttgcgtccggcg

SEQ ID NO: 28806 - DNA, 20 bp, Artificial sequence
  synthetic
aattcctttagcgtcgtcaa

SEQ ID NO: 28807 - DNA, 20 bp, Artificial sequence
  synthetic
gccgtgcgttgcgtcgtcaa

SEQ ID NO: 28808 - DNA, 20 bp, Artificial sequence
  synthetic
gccgtgcgttgcgttactcc

SEQ ID NO: 28809 - DNA, 20 bp, Artificial sequence
  synthetic
gccgtgcgttgcgttccaag

SEQ ID NO: 28810 - DNA, 20 bp, Artificial sequence
  synthetic
gccgtgaatttttaaccggc

SEQ ID NO: 28811 - DNA, 20 bp, Artificial sequence
  synthetic
aattcctttatttacgtcaa

SEQ ID NO: 28812 - DNA, 20 bp, Artificial sequence
  synthetic
gtggagaatttttaaagaag

SEQ ID NO: 28813 - DNA, 20 bp, Artificial sequence
  synthetic
gtggagaatttttaccggcg

SEQ ID NO: 28814 - DNA, 20 bp, Artificial sequence
  synthetic
tggcaaaatttttattcttg

SEQ ID NO: 28815 - DNA, 20 bp, Artificial sequence
  synthetic
gaatcgagaaccaacacgga

SEQ ID NO: 28816 - DNA, 20 bp, Artificial sequence
  synthetic
cgggtgctgaccaaccggcg

SEQ ID NO: 28817 - DNA, 20 bp, Artificial sequence
  synthetic
ccaaagctgaccaacgtcaa

SEQ ID NO: 28818 - DNA, 20 bp, Artificial sequence
  synthetic
cccaagctgaccaatactcc

SEQ ID NO: 28819 - DNA, 20 bp, Artificial sequence
  synthetic
tggcaaatgaccaattcttg

SEQ ID NO: 28820 - DNA, 20 bp, Artificial sequence
  synthetic
gctccactcctggtggtgcc

SEQ ID NO: 28821 - DNA, 20 bp, Artificial sequence
  synthetic
gacggtatctgatcgtcttc

SEQ ID NO: 28822 - DNA, 20 bp, Artificial sequence
  synthetic
tacagacaccatggtgcatc

SEQ ID NO: 28823 - DNA, 20 bp, Artificial sequence
  synthetic
gccgtacaccatggaccggc

SEQ ID NO: 28824 - DNA, 20 bp, Artificial sequence
  synthetic
gccgtacaccatggtgcatc

SEQ ID NO: 28825 - DNA, 20 bp, Artificial sequence
  synthetic
gaatcgagaaatggcacgga

SEQ ID NO: 28826 - DNA, 20 bp, Artificial sequence
  synthetic
gaatcgagaaatggtgcatc

SEQ ID NO: 28827 - DNA, 20 bp, Artificial sequence
  synthetic
agcgagcgaccaaaggaacc

SEQ ID NO: 28828 - DNA, 20 bp, Artificial sequence
  synthetic
gcgggtcaccatggtgcatc

SEQ ID NO: 28829 - DNA, 20 bp, Artificial sequence
  synthetic
cgggtacaccatggccggcg

SEQ ID NO: 28830 - DNA, 20 bp, Artificial sequence
  synthetic
cgggtacaccatggtgcatc

SEQ ID NO: 28831 - DNA, 20 bp, Artificial sequence
  synthetic
caattcctttatggtgcatc

SEQ ID NO: 28832 - DNA, 20 bp, Artificial sequence
  synthetic
aattcctttaatggcgtcaa

SEQ ID NO: 28833 - DNA, 20 bp, Artificial sequence
  synthetic
aattcctttaatggtgcatc

SEQ ID NO: 28834 - DNA, 20 bp, Artificial sequence
  synthetic
aacaaccggccgtgtgcatc

SEQ ID NO: 28835 - DNA, 20 bp, Artificial sequence
  synthetic
aacaagcgaccaaaggaacc

SEQ ID NO: 28836 - DNA, 20 bp, Artificial sequence
  synthetic
aacacacggaatcgagaatc

SEQ ID NO: 28837 - DNA, 20 bp, Artificial sequence
  synthetic
aacacactcctggtggtgcc

SEQ ID NO: 28838 - DNA, 20 bp, Artificial sequence
  synthetic
aacacgtgttgagtcaaatt

SEQ ID NO: 28839 - DNA, 20 bp, Artificial sequence
  synthetic
aacagaaccggccgtgcatc

SEQ ID NO: 28840 - DNA, 20 bp, Artificial sequence
  synthetic
aacagacaaccaaaggaacc

SEQ ID NO: 28841 - DNA, 20 bp, Artificial sequence
  synthetic
aacagacacaccatactccc

SEQ ID NO: 28842 - DNA, 20 bp, Artificial sequence
  synthetic
aacagacacacggaatcgag

SEQ ID NO: 28843 - DNA, 20 bp, Artificial sequence
  synthetic
aacagacaccaatcgtcttc

SEQ ID NO: 28844 - DNA, 20 bp, Artificial sequence
  synthetic
aacagacaccacacggaatc

SEQ ID NO: 28845 - DNA, 20 bp, Artificial sequence
  synthetic
aacagacaccacatactccc

SEQ ID NO: 28846 - DNA, 20 bp, Artificial sequence
  synthetic
aacagacaccaccggcgggt

SEQ ID NO: 28847 - DNA, 20 bp, Artificial sequence
  synthetic
aacagacaccaggtggtgcc

SEQ ID NO: 28848 - DNA, 20 bp, Artificial sequence
  synthetic
aacagacaccatgaccggcc

SEQ ID NO: 28849 - DNA, 20 bp, Artificial sequence
  synthetic
aacagacaccatgaggaacc

SEQ ID NO: 28850 - DNA, 20 bp, Artificial sequence
  synthetic
aacagacaccatgcgtcaat

SEQ ID NO: 28851 - DNA, 20 bp, Artificial sequence
  synthetic
aacagacaccatggaccggc

SEQ ID NO: 28852 - DNA, 20 bp, Artificial sequence
  synthetic
aacagacaccatggcacgga

SEQ ID NO: 28853 - DNA, 20 bp, Artificial sequence
  synthetic
aacagacaccatggccggcg

SEQ ID NO: 28854 - DNA, 20 bp, Artificial sequence
  synthetic
aacagacaccatggcgtcaa

SEQ ID NO: 28855 - DNA, 20 bp, Artificial sequence
  synthetic
aacagacaccatggggaacc

SEQ ID NO: 28856 - DNA, 20 bp, Artificial sequence
  synthetic
aacagacaccatggggtgcc

SEQ ID NO: 28857 - DNA, 20 bp, Artificial sequence
  synthetic
aacagacaccatggtaaatt

SEQ ID NO: 28858 - DNA, 20 bp, Artificial sequence
  synthetic
aacagacaccatggtactcc

SEQ ID NO: 28859 - DNA, 20 bp, Artificial sequence
  synthetic
aacagacaccatggtatcgc

SEQ ID NO: 28860 - DNA, 20 bp, Artificial sequence
  synthetic
aacagacaccatggtcacgg

SEQ ID NO: 28861 - DNA, 20 bp, Artificial sequence
  synthetic
aacagacaccatggtcgtca

SEQ ID NO: 28862 - DNA, 20 bp, Artificial sequence
  synthetic
aacagacaccatggtgcaca

SEQ ID NO: 28863 - DNA, 20 bp, Artificial sequence
  synthetic
aacagacaccatggtgcacg

SEQ ID NO: 28864 - DNA, 20 bp, Artificial sequence
  synthetic
aacagacaccatggtgcatt

SEQ ID NO: 28865 - DNA, 20 bp, Artificial sequence
  synthetic
aacagacaccatggtgcgcc

SEQ ID NO: 28866 - DNA, 20 bp, Artificial sequence
  synthetic
aacagacaccatggtgtgcc

SEQ ID NO: 28867 - DNA, 20 bp, Artificial sequence
  synthetic
aacagacaccatggtgttct

SEQ ID NO: 28868 - DNA, 20 bp, Artificial sequence
  synthetic
aacagacaccatggttcttg

SEQ ID NO: 28869 - DNA, 20 bp, Artificial sequence
  synthetic
aacagacaccatgtactccc

SEQ ID NO: 28870 - DNA, 20 bp, Artificial sequence
  synthetic
aacagacaccatgtcaaatt

SEQ ID NO: 28871 - DNA, 20 bp, Artificial sequence
  synthetic
aacagacaccatgtggtgcc

SEQ ID NO: 28872 - DNA, 20 bp, Artificial sequence
  synthetic
aacagacacgtcaattcctt

SEQ ID NO: 28873 - DNA, 20 bp, Artificial sequence
  synthetic
aacagacacttcttggcaaa

SEQ ID NO: 28874 - DNA, 20 bp, Artificial sequence
  synthetic
aacagacatactcccgcatc

SEQ ID NO: 28875 - DNA, 20 bp, Artificial sequence
  synthetic
aacagaccaaccatactccc

SEQ ID NO: 28876 - DNA, 20 bp, Artificial sequence
  synthetic
aacagaccggcgggtgcatc

SEQ ID NO: 28877 - DNA, 20 bp, Artificial sequence
  synthetic
aacagacgtcaattccttta

SEQ ID NO: 28878 - DNA, 20 bp, Artificial sequence
  synthetic
aacagacgttgagtcaaatt

SEQ ID NO: 28879 - DNA, 20 bp, Artificial sequence
  synthetic
aacagagcaaccatactccc

SEQ ID NO: 28880 - DNA, 20 bp, Artificial sequence
  synthetic
aacaggcgaccaaaggaacc

SEQ ID NO: 28881 - DNA, 20 bp, Artificial sequence
  synthetic
aacattcttggcaaagcatc

SEQ ID NO: 28882 - DNA, 20 bp, Artificial sequence
  synthetic
aacccgtgttgagtcaaatt

SEQ ID NO: 28883 - DNA, 20 bp, Artificial sequence
  synthetic
aacgagcgaccaaaggaacc

SEQ ID NO: 28884 - DNA, 20 bp, Artificial sequence
  synthetic
aacggtatctgatcgtcttc

SEQ ID NO: 28885 - DNA, 20 bp, Artificial sequence
  synthetic
acacggaatcgagaagcatc

SEQ ID NO: 28886 - DNA, 20 bp, Artificial sequence
  synthetic
acgtcaattcctttagcatc

SEQ ID NO: 28887 - DNA, 20 bp, Artificial sequence
  synthetic
agctttgcaaccatactccc

SEQ ID NO: 28888 - DNA, 20 bp, Artificial sequence
  synthetic
atactcccccatggtgcatc

SEQ ID NO: 28889 - DNA, 20 bp, Artificial sequence
  synthetic
atcccgtgttgagtcaaatt

SEQ ID NO: 28890 - DNA, 20 bp, Artificial sequence
  synthetic
ccggccgtccatggtgcatc

SEQ ID NO: 28891 - DNA, 20 bp, Artificial sequence
  synthetic
ttcttggcaaatggtgcatc

SEQ ID NO: 28892 - DNA, 20 bp, Artificial sequence
  synthetic
cggcgggtccatggtgcatc

SEQ ID NO: 28893 - DNA, 20 bp, Artificial sequence
  synthetic
gaattaaccagacaaatcgc

SEQ ID NO: 28894 - DNA, 20 bp, Artificial sequence
  synthetic
ttggcaaaccatggtgcatc

SEQ ID NO: 28895 - DNA, 20 bp, Artificial sequence
  synthetic
cccagacaccatggtactcc

SEQ ID NO: 28896 - DNA, 20 bp, Artificial sequence
  synthetic
cccagacaccatggtgcatc

SEQ ID NO: 28897 - DNA, 20 bp, Artificial sequence
  synthetic
tggcaaaaccatggtgcatc

SEQ ID NO: 28898 - DNA, 20 bp, Artificial sequence
  synthetic
tggcaaaaccatggttcttg

SEQ ID NO: 28899 - DNA, 20 bp, Artificial sequence
  synthetic
ggcaaacaccatggtgcatc

SEQ ID NO: 28900 - DNA, 20 bp, Artificial sequence
  synthetic
atcgagaaccatggtgcatc

SEQ ID NO: 28901 - DNA, 20 bp, Artificial sequence
  synthetic
ttcctttaccatggtgcatc

SEQ ID NO: 28902 - DNA, 20 bp, Artificial sequence
  synthetic
cacagacaccatggtgcatc

SEQ ID NO: 28903 - DNA, 20 bp, Artificial sequence
  synthetic
gccgtagtctggggaccggc

SEQ ID NO: 28904 - DNA, 20 bp, Artificial sequence
  synthetic
tcctcagtctgcggcacgga

SEQ ID NO: 28905 - DNA, 20 bp, Artificial sequence
  synthetic
tcctcagtctgcggcgtcaa

SEQ ID NO: 28906 - DNA, 20 bp, Artificial sequence
  synthetic
tcctcagtctgcggtactcc

SEQ ID NO: 28907 - DNA, 20 bp, Artificial sequence
  synthetic
tcctcagtctgcggtgggct

SEQ ID NO: 28908 - DNA, 20 bp, Artificial sequence
  synthetic
tcctcagtctgcggttcttg

SEQ ID NO: 28909 - DNA, 20 bp, Artificial sequence
  synthetic
ccctcagtctgcggtactcc

SEQ ID NO: 28910 - DNA, 20 bp, Artificial sequence
  synthetic
tggcaaatctgcggttcttg

SEQ ID NO: 28911 - DNA, 20 bp, Artificial sequence
  synthetic
cgggtggaagaaaaccggcg

SEQ ID NO: 28912 - DNA, 20 bp, Artificial sequence
  synthetic
aaaagggaagaaaatactcc

SEQ ID NO: 28913 - DNA, 20 bp, Artificial sequence
  synthetic
aaaagggaagaaaattcttg

SEQ ID NO: 28914 - DNA, 20 bp, Artificial sequence
  synthetic
gaatcgagaaaaaacacgga

SEQ ID NO: 28915 - DNA, 20 bp, Artificial sequence
  synthetic
tggcaaaaagaaaattcttg

SEQ ID NO: 28916 - DNA, 20 bp, Artificial sequence
  synthetic
gaatcgagaaaactcacgga

SEQ ID NO: 28917 - DNA, 20 bp, Artificial sequence
  synthetic
cgggtaatcaaactccggcg

SEQ ID NO: 28918 - DNA, 20 bp, Artificial sequence
  synthetic
aattcctttaaactcgtcaa

SEQ ID NO: 28919 - DNA, 20 bp, Artificial sequence
  synthetic
gccgtaatcaaactaccggc

SEQ ID NO: 28920 - DNA, 20 bp, Artificial sequence
  synthetic
agacaaatcaaactccggcg

SEQ ID NO: 28921 - DNA, 20 bp, Artificial sequence
  synthetic
agacaaatcaaactcgtcaa

SEQ ID NO: 28922 - DNA, 20 bp, Artificial sequence
  synthetic
agacaaatcaaacttactcc

SEQ ID NO: 28923 - DNA, 20 bp, Artificial sequence
  synthetic
tggcaaatcaaactttcttg

SEQ ID NO: 28924 - DNA, 20 bp, Artificial sequence
  synthetic
gaatcgagaaccctcacgga

SEQ ID NO: 28925 - DNA, 20 bp, Artificial sequence
  synthetic
cgggtcggttccctccggcg

SEQ ID NO: 28926 - DNA, 20 bp, Artificial sequence
  synthetic
gtaaccggttccctcacgga

SEQ ID NO: 28927 - DNA, 20 bp, Artificial sequence
  synthetic
cccaccggttcccttactcc

SEQ ID NO: 28928 - DNA, 20 bp, Artificial sequence
  synthetic
gccgtcggttccctaccggc

SEQ ID NO: 28929 - DNA, 20 bp, Artificial sequence
  synthetic
gaatcgagaattcccacgga

SEQ ID NO: 28930 - DNA, 20 bp, Artificial sequence
  synthetic
gccgtgctgcttccaccggc

SEQ ID NO: 28931 - DNA, 20 bp, Artificial sequence
  synthetic
gagcggctgcttcccgtcaa

SEQ ID NO: 28932 - DNA, 20 bp, Artificial sequence
  synthetic
gagcggctgcttcctactcc

SEQ ID NO: 28933 - DNA, 20 bp, Artificial sequence
  synthetic
ccccggctgcttcctactcc

SEQ ID NO: 28934 - DNA, 20 bp, Artificial sequence
  synthetic
tggcaaatgcttccttcttg

SEQ ID NO: 28935 - DNA, 20 bp, Artificial sequence
  synthetic
gccgtcggtccacgaccggc

SEQ ID NO: 28936 - DNA, 20 bp, Artificial sequence
  synthetic
acgtacggtccacgtactcc

SEQ ID NO: 28937 - DNA, 20 bp, Artificial sequence
  synthetic
ccctacggtccacgtactcc

SEQ ID NO: 28938 - DNA, 20 bp, Artificial sequence
  synthetic
tggcaaagtccacgttcttg

SEQ ID NO: 28939 - DNA, 20 bp, Artificial sequence
  synthetic
catcggcatgccgcaccggc

SEQ ID NO: 28940 - DNA, 20 bp, Artificial sequence
  synthetic
catcggcatgccgctactcc

SEQ ID NO: 28941 - DNA, 20 bp, Artificial sequence
  synthetic
cgggtgcatgccgcccggcg

SEQ ID NO: 28942 - DNA, 20 bp, Artificial sequence
  synthetic
aattcctttaccgccgtcaa

SEQ ID NO: 28943 - DNA, 20 bp, Artificial sequence
  synthetic
ccccggcatgccgctactcc

SEQ ID NO: 28944 - DNA, 20 bp, Artificial sequence
  synthetic
gccgtggcgggggaaccggc

SEQ ID NO: 28945 - DNA, 20 bp, Artificial sequence
  synthetic
gaatcgagaagggacacgga

SEQ ID NO: 28946 - DNA, 20 bp, Artificial sequence
  synthetic
cccacggcgggggatactcc

SEQ ID NO: 28947 - DNA, 20 bp, Artificial sequence
  synthetic
aaattaaccagacaaatcgc

SEQ ID NO: 28948 - DNA, 20 bp, Artificial sequence
  synthetic
actccactcctggtggtgcc

SEQ ID NO: 28949 - DNA, 20 bp, Artificial sequence
  synthetic
ataacggcaaccatactccc

SEQ ID NO: 28950 - DNA, 20 bp, Artificial sequence
  synthetic
ataacggcaccaaaggaacc

SEQ ID NO: 28951 - DNA, 20 bp, Artificial sequence
  synthetic
ataacggcgaccatactccc

SEQ ID NO: 28952 - DNA, 20 bp, Artificial sequence
  synthetic
ataacggcgggaaaggaacc

SEQ ID NO: 28953 - DNA, 20 bp, Artificial sequence
  synthetic
ataacggcgggacaaatcgc

SEQ ID NO: 28954 - DNA, 20 bp, Artificial sequence
  synthetic
ataacggcgggcatactccc

SEQ ID NO: 28955 - DNA, 20 bp, Artificial sequence
  synthetic
ataacggcggggaaggaacc

SEQ ID NO: 28956 - DNA, 20 bp, Artificial sequence
  synthetic
ataacggcggggcaaatcgc

SEQ ID NO: 28957 - DNA, 20 bp, Artificial sequence
  synthetic
ataacggcgggggaactccc

SEQ ID NO: 28958 - DNA, 20 bp, Artificial sequence
  synthetic
ataacggcgggggacaaatt

SEQ ID NO: 28959 - DNA, 20 bp, Artificial sequence
  synthetic
ataacggcgggggaccggcg

SEQ ID NO: 28960 - DNA, 20 bp, Artificial sequence
  synthetic
ataacggcgggggagatcgc

SEQ ID NO: 28961 - DNA, 20 bp, Artificial sequence
  synthetic
ataacggcgggggaggccgc

SEQ ID NO: 28962 - DNA, 20 bp, Artificial sequence
  synthetic
ataacggcgggggaggccgt

SEQ ID NO: 28963 - DNA, 20 bp, Artificial sequence
  synthetic
ataacggcgggggaggcgcc

SEQ ID NO: 28964 - DNA, 20 bp, Artificial sequence
  synthetic
ataacggcgggggaggcttc

SEQ ID NO: 28965 - DNA, 20 bp, Artificial sequence
  synthetic
ataacggcgggggtggtgcc

SEQ ID NO: 28966 - DNA, 20 bp, Artificial sequence
  synthetic
ataacggcgtgagtcaaatt

SEQ ID NO: 28967 - DNA, 20 bp, Artificial sequence
  synthetic
ataacgggaccaaaggaacc

SEQ ID NO: 28968 - DNA, 20 bp, Artificial sequence
  synthetic
ataacgtgttgagtcaaatt

SEQ ID NO: 28969 - DNA, 20 bp, Artificial sequence
  synthetic
ataactgcaaccatactccc

SEQ ID NO: 28970 - DNA, 20 bp, Artificial sequence
  synthetic
ataccactcctggtggtgcc

SEQ ID NO: 28971 - DNA, 20 bp, Artificial sequence
  synthetic
ataccgtgttgagtcaaatt

SEQ ID NO: 28972 - DNA, 20 bp, Artificial sequence
  synthetic
atagagcgaccaaaggaacc

SEQ ID NO: 28973 - DNA, 20 bp, Artificial sequence
  synthetic
atcgagcgaccaaaggaacc

SEQ ID NO: 28974 - DNA, 20 bp, Artificial sequence
  synthetic
aattcctttagggacgtcaa

SEQ ID NO: 28975 - DNA, 20 bp, Artificial sequence
  synthetic
ggctttgcaaccatactccc

SEQ ID NO: 28976 - DNA, 20 bp, Artificial sequence
  synthetic
gtcgagcgaccaaaggaacc

SEQ ID NO: 28977 - DNA, 20 bp, Artificial sequence
  synthetic
gtctttgcaaccatactccc

SEQ ID NO: 28978 - DNA, 20 bp, Artificial sequence
  synthetic
gtgccactcctggtggtgcc

SEQ ID NO: 28979 - DNA, 20 bp, Artificial sequence
  synthetic
gtgccgtgttgagtcaaatt

SEQ ID NO: 28980 - DNA, 20 bp, Artificial sequence
  synthetic
gtgttaaccagacaaatcgc

SEQ ID NO: 28981 - DNA, 20 bp, Artificial sequence
  synthetic
gtgttaatctgatcgtcttc

SEQ ID NO: 28982 - DNA, 20 bp, Artificial sequence
  synthetic
gtgttacgaccaaaggaacc

SEQ ID NO: 28983 - DNA, 20 bp, Artificial sequence
  synthetic
gtgttagcaaccatactccc

SEQ ID NO: 28984 - DNA, 20 bp, Artificial sequence
  synthetic
gtgttagtcagacaaatcgc

SEQ ID NO: 28985 - DNA, 20 bp, Artificial sequence
  synthetic
gtgttagtcctggtggtgcc

SEQ ID NO: 28986 - DNA, 20 bp, Artificial sequence
  synthetic
gtgttagttagacaaatcgc

SEQ ID NO: 28987 - DNA, 20 bp, Artificial sequence
  synthetic
gtgttagttgcaaaggaacc

SEQ ID NO: 28988 - DNA, 20 bp, Artificial sequence
  synthetic
gtgttagttggacaaatcgc

SEQ ID NO: 28989 - DNA, 20 bp, Artificial sequence
  synthetic
gtgttagttgtgatactccc

SEQ ID NO: 28990 - DNA, 20 bp, Artificial sequence
  synthetic
gtgttagttgtggtggtgcc

SEQ ID NO: 28991 - DNA, 20 bp, Artificial sequence
  synthetic
gtgttagttgtgtaggaacc

SEQ ID NO: 28992 - DNA, 20 bp, Artificial sequence
  synthetic
gtgttagttgtgtcgtcttc

SEQ ID NO: 28993 - DNA, 20 bp, Artificial sequence
  synthetic
gtgttagttgtgttaatcgc

SEQ ID NO: 28994 - DNA, 20 bp, Artificial sequence
  synthetic
gtgttagttgtgttaccggc

SEQ ID NO: 28995 - DNA, 20 bp, Artificial sequence
  synthetic
gtgttagttgtgttagaacc

SEQ ID NO: 28996 - DNA, 20 bp, Artificial sequence
  synthetic
gtgttagttgtgttagtatt

SEQ ID NO: 28997 - DNA, 20 bp, Artificial sequence
  synthetic
gtgttagttgtgttagtccc

SEQ ID NO: 28998 - DNA, 20 bp, Artificial sequence
  synthetic
gtgttagttgtgttagtgcc

SEQ ID NO: 28999 - DNA, 20 bp, Artificial sequence
  synthetic
gtgttagttgtgttagttcc

SEQ ID NO: 29000 - DNA, 20 bp, Artificial sequence
  synthetic
gtgttagttgtgttagttgc

SEQ ID NO: 29001 - DNA, 20 bp, Artificial sequence
  synthetic
gtgttagttgtgttagttgt

SEQ ID NO: 29002 - DNA, 20 bp, Artificial sequence
  synthetic
gtgttagttgtgttatcttc

SEQ ID NO: 29003 - DNA, 20 bp, Artificial sequence
  synthetic
gtgttagttgtgttcaaatt

SEQ ID NO: 29004 - DNA, 20 bp, Artificial sequence
  synthetic
gtgttagttgtgttccggcg

SEQ ID NO: 29005 - DNA, 20 bp, Artificial sequence
  synthetic
gtgttagttgtgttggtgcc

SEQ ID NO: 29006 - DNA, 20 bp, Artificial sequence
  synthetic
gtgttagtttgatcgtcttc

SEQ ID NO: 29007 - DNA, 20 bp, Artificial sequence
  synthetic
gtgtttatctgatcgtcttc

SEQ ID NO: 29008 - DNA, 20 bp, Artificial sequence
  synthetic
gaatcgagaatgttcacgga

SEQ ID NO: 29009 - DNA, 20 bp, Artificial sequence
  synthetic
cccttagttgtgtttactcc

SEQ ID NO: 29010 - DNA, 20 bp, Artificial sequence
  synthetic
aattcctttatgttcgtcaa

SEQ ID NO: 29011 - DNA, 20 bp, Artificial sequence
  synthetic
gacatttctgacatttctga

SEQ ID NO: 29012 - DNA, 20 bp, Artificial sequence
  synthetic
cactatctgctagaccggcg

SEQ ID NO: 29013 - DNA, 20 bp, Artificial sequence
  synthetic
gaatcgagaatagacacgga

SEQ ID NO: 29014 - DNA, 20 bp, Artificial sequence
  synthetic
gccgttgctgtggaaccggc

SEQ ID NO: 29015 - DNA, 20 bp, Artificial sequence
  synthetic
gaatcgagaatggacacgga

SEQ ID NO: 29016 - DNA, 20 bp, Artificial sequence
  synthetic
cgggttgctgtggaccggcg

SEQ ID NO: 29017 - DNA, 20 bp, Artificial sequence
  synthetic
ccaagtgctgtggacgtcaa

SEQ ID NO: 29018 - DNA, 20 bp, Artificial sequence
  synthetic
ccaagtgctgtggactggcc

SEQ ID NO: 29019 - DNA, 20 bp, Artificial sequence
  synthetic
ccaagtgctgtggattcttg

SEQ ID NO: 29020 - DNA, 20 bp, Artificial sequence
  synthetic
gccgtttctgacataccggc

SEQ ID NO: 29021 - DNA, 20 bp, Artificial sequence
  synthetic
gaatcgagaaacatcacgga

SEQ ID NO: 29022 - DNA, 20 bp, Artificial sequence
  synthetic
gaatcgagaaacatttctga

SEQ ID NO: 29023 - DNA, 20 bp, Artificial sequence
  synthetic
gacatttctgacatcacgga

SEQ ID NO: 29024 - DNA, 20 bp, Artificial sequence
  synthetic
cgggtttctgacatccggcg

SEQ ID NO: 29025 - DNA, 20 bp, Artificial sequence
  synthetic
aattcctttaacatcgtcaa

SEQ ID NO: 29026 - DNA, 20 bp, Artificial sequence
  synthetic
aattcctttaacatttctga

SEQ ID NO: 29027 - DNA, 20 bp, Artificial sequence
  synthetic
gacatttctgacatcgtcaa

SEQ ID NO: 29028 - DNA, 20 bp, Artificial sequence
  synthetic
cccatttctgacattactcc

SEQ ID NO: 29029 - DNA, 20 bp, Artificial sequence
  synthetic
aacatttctgacatttctga

SEQ ID NO: 29030 - DNA, 20 bp, Artificial sequence
  synthetic
agaatttctgacatttctga

SEQ ID NO: 29031 - DNA, 20 bp, Artificial sequence
  synthetic
tttatttctgacatttctga

SEQ ID NO: 29032 - DNA, 20 bp, Artificial sequence
  synthetic
ccgttttctgacatttctga

SEQ ID NO: 29033 - DNA, 20 bp, Artificial sequence
  synthetic
gggttttctgacatttctga

SEQ ID NO: 29034 - DNA, 20 bp, Artificial sequence
  synthetic
gccgtttctgacatttctga

SEQ ID NO: 29035 - DNA, 20 bp, Artificial sequence
  synthetic
cgggtttctgacatttctga

SEQ ID NO: 29036 - DNA, 20 bp, Artificial sequence
  synthetic
ggccgttctgacatttctga

SEQ ID NO: 29037 - DNA, 20 bp, Artificial sequence
  synthetic
cccatttctgacatttctga

SEQ ID NO: 29038 - DNA, 20 bp, Artificial sequence
  synthetic
gcgggttctgacatttctga

SEQ ID NO: 29039 - DNA, 20 bp, Artificial sequence
  synthetic
caattcctttacatttctga

SEQ ID NO: 29040 - DNA, 20 bp, Artificial sequence
  synthetic
ggcaaatctgacatttctga

SEQ ID NO: 29041 - DNA, 20 bp, Artificial sequence
  synthetic
ccggccgttgacatttctga

SEQ ID NO: 29042 - DNA, 20 bp, Artificial sequence
  synthetic
cggcgggttgacatttctga

SEQ ID NO: 29043 - DNA, 20 bp, Artificial sequence
  synthetic
gacaaccggccgttttctga

SEQ ID NO: 29044 - DNA, 20 bp, Artificial sequence
  synthetic
gacacgtcaattcctttaga

SEQ ID NO: 29045 - DNA, 20 bp, Artificial sequence
  synthetic
gacatactcctggtggtgcc

SEQ ID NO: 29046 - DNA, 20 bp, Artificial sequence
  synthetic
gacatgcgaccaaaggaacc

SEQ ID NO: 29047 - DNA, 20 bp, Artificial sequence
  synthetic
gacattaccagacaaatcgc

SEQ ID NO: 29048 - DNA, 20 bp, Artificial sequence
  synthetic
gacattaccggccgttctga

SEQ ID NO: 29049 - DNA, 20 bp, Artificial sequence
  synthetic
gacattcacggaatcgagaa

SEQ ID NO: 29050 - DNA, 20 bp, Artificial sequence
  synthetic
gacattccggcgggttctga

SEQ ID NO: 29051 - DNA, 20 bp, Artificial sequence
  synthetic
gacattcgtcaattccttta

SEQ ID NO: 29052 - DNA, 20 bp, Artificial sequence
  synthetic
gacattcttggcaaatctga

SEQ ID NO: 29053 - DNA, 20 bp, Artificial sequence
  synthetic
gacatttactccctttctga

SEQ ID NO: 29054 - DNA, 20 bp, Artificial sequence
  synthetic
gacatttccgtcaattcctt

SEQ ID NO: 29055 - DNA, 20 bp, Artificial sequence
  synthetic
gacatttctagacaaatcgc

SEQ ID NO: 29056 - DNA, 20 bp, Artificial sequence
  synthetic
gacatttctccaaaggaacc

SEQ ID NO: 29057 - DNA, 20 bp, Artificial sequence
  synthetic
gacatttctccggcgggtga

SEQ ID NO: 29058 - DNA, 20 bp, Artificial sequence
  synthetic
gacatttctgaaccggccgt

SEQ ID NO: 29059 - DNA, 20 bp, Artificial sequence
  synthetic
gacatttctgaagtcaaatt

SEQ ID NO: 29060 - DNA, 20 bp, Artificial sequence
  synthetic
gacatttctgacaaccggcc

SEQ ID NO: 29061 - DNA, 20 bp, Artificial sequence
  synthetic
gacatttctgacacacggaa

SEQ ID NO: 29062 - DNA, 20 bp, Artificial sequence
  synthetic
gacatttctgacaccggcgg

SEQ ID NO: 29063 - DNA, 20 bp, Artificial sequence
  synthetic
gacatttctgacacggaatc

SEQ ID NO: 29064 - DNA, 20 bp, Artificial sequence
  synthetic
gacatttctgacacgtcaat

SEQ ID NO: 29065 - DNA, 20 bp, Artificial sequence
  synthetic
gacatttctgacataccggc

SEQ ID NO: 29066 - DNA, 20 bp, Artificial sequence
  synthetic
gacatttctgacatactccc

SEQ ID NO: 29067 - DNA, 20 bp, Artificial sequence
  synthetic
gacatttctgacatccggcg

SEQ ID NO: 29068 - DNA, 20 bp, Artificial sequence
  synthetic
gacatttctgacattactcc

SEQ ID NO: 29069 - DNA, 20 bp, Artificial sequence
  synthetic
gacatttctgacattcacgg

SEQ ID NO: 29070 - DNA, 20 bp, Artificial sequence
  synthetic
gacatttctgacattctccc

SEQ ID NO: 29071 - DNA, 20 bp, Artificial sequence
  synthetic
gacatttctgacattgaacc

SEQ ID NO: 29072 - DNA, 20 bp, Artificial sequence
  synthetic
gacatttctgacatttaccg

SEQ ID NO: 29073 - DNA, 20 bp, Artificial sequence
  synthetic
gacatttctgacatttactc

SEQ ID NO: 29074 - DNA, 20 bp, Artificial sequence
  synthetic
gacatttctgacatttcacc

SEQ ID NO: 29075 - DNA, 20 bp, Artificial sequence
  synthetic
gacatttctgacatttcatt

SEQ ID NO: 29076 - DNA, 20 bp, Artificial sequence
  synthetic
gacatttctgacatttcgcc

SEQ ID NO: 29077 - DNA, 20 bp, Artificial sequence
  synthetic
gacatttctgacatttctcc

SEQ ID NO: 29078 - DNA, 20 bp, Artificial sequence
  synthetic
gacatttctgacatttctcg

SEQ ID NO: 29079 - DNA, 20 bp, Artificial sequence
  synthetic
gacatttctgacatttctgc

SEQ ID NO: 29080 - DNA, 20 bp, Artificial sequence
  synthetic
gacatttctgacatttcttc

SEQ ID NO: 29081 - DNA, 20 bp, Artificial sequence
  synthetic
gacatttctgacatttcttg

SEQ ID NO: 29082 - DNA, 20 bp, Artificial sequence
  synthetic
gacatttctgacatttcttt

SEQ ID NO: 29083 - DNA, 20 bp, Artificial sequence
  synthetic
gacatttctgacgtggtgcc

SEQ ID NO: 29084 - DNA, 20 bp, Artificial sequence
  synthetic
gacatttctgatactcccga

SEQ ID NO: 29085 - DNA, 20 bp, Artificial sequence
  synthetic
gacatttctgattcttggca

SEQ ID NO: 29086 - DNA, 20 bp, Artificial sequence
  synthetic
gacatttctgcaaaggaacc

SEQ ID NO: 29087 - DNA, 20 bp, Artificial sequence
  synthetic
gacatttctttcttggcaaa

SEQ ID NO: 29088 - DNA, 20 bp, Artificial sequence
  synthetic
gacatttgaccaaaggaacc

SEQ ID NO: 29089 - DNA, 20 bp, Artificial sequence
  synthetic
gacattttcctggtggtgcc

SEQ ID NO: 29090 - DNA, 20 bp, Artificial sequence
  synthetic
gacgagcgaccaaaggaacc

SEQ ID NO: 29091 - DNA, 20 bp, Artificial sequence
  synthetic
gatccactcctggtggtgcc

SEQ ID NO: 29092 - DNA, 20 bp, Artificial sequence
  synthetic
gcgtcaattcctttatctga

SEQ ID NO: 29093 - DNA, 20 bp, Artificial sequence
  synthetic
gtactccctgacatttctga

SEQ ID NO: 29094 - DNA, 20 bp, Artificial sequence
  synthetic
tggcaaactgacatttctga

SEQ ID NO: 29095 - DNA, 20 bp, Artificial sequence
  synthetic
tggcaaactgacatttcttg

SEQ ID NO: 29096 - DNA, 20 bp, Artificial sequence
  synthetic
ttggcaaatgacatttctga

SEQ ID NO: 29097 - DNA, 20 bp, Artificial sequence
  synthetic
atcgagaatgacatttctga

SEQ ID NO: 29098 - DNA, 20 bp, Artificial sequence
  synthetic
tacatttctgacatttctga

SEQ ID NO: 29099 - DNA, 20 bp, Artificial sequence
  synthetic
cacatttctgacatttctga

SEQ ID NO: 29100 - DNA, 20 bp, Artificial sequence
  synthetic
caaatttctgacatttctga

SEQ ID NO: 29101 - DNA, 20 bp, Artificial sequence
  synthetic
cgagaatctgacatttctga

SEQ ID NO: 29102 - DNA, 20 bp, Artificial sequence
  synthetic
cctttatctgacatttctga

SEQ ID NO: 29103 - DNA, 20 bp, Artificial sequence
  synthetic
gaatcgagaaggaacacgga

SEQ ID NO: 29104 - DNA, 20 bp, Artificial sequence
  synthetic
ccaaatccctggaacacgga

SEQ ID NO: 29105 - DNA, 20 bp, Artificial sequence
  synthetic
ccaaatccctggaaccggcg

SEQ ID NO: 29106 - DNA, 20 bp, Artificial sequence
  synthetic
ccaaatccctggaaggagtg

SEQ ID NO: 29107 - DNA, 20 bp, Artificial sequence
  synthetic
cccaatccctggaatactcc

SEQ ID NO: 29108 - DNA, 20 bp, Artificial sequence
  synthetic
tggcaaacctggaattcttg

SEQ ID NO: 29109 - DNA, 20 bp, Artificial sequence
  synthetic
gccgtggcgcacctaccggc

SEQ ID NO: 29110 - DNA, 20 bp, Artificial sequence
  synthetic
aattcctttaacctcgtcaa

SEQ ID NO: 29111 - DNA, 20 bp, Artificial sequence
  synthetic
aatcaggcgcacctcgtcaa

SEQ ID NO: 29112 - DNA, 20 bp, Artificial sequence
  synthetic
aatcaggcgcaccttactcc

SEQ ID NO: 29113 - DNA, 20 bp, Artificial sequence
  synthetic
ccccaggcgcaccttactcc

SEQ ID NO: 29114 - DNA, 203 bp, Artificial sequence; identical to SEQ ID NO: 368
  synthetic

SEQ ID NO: 29115 - DNA, 203 bp, Artificial sequence; identical to SEQ ID NO: 369
  synthetic

SEQ ID NO: 29116 - DNA, 203 bp, Artificial sequence; identical to SEQ ID NO: 378
  synthetic

SEQ ID NO: 29117 - DNA, 203 bp, Artificial sequence; identical to SEQ ID NO: 382
  synthetic

SEQ ID NO: 29118 - DNA, 203 bp, Artificial sequence; identical to SEQ ID NO: 391
  synthetic

SEQ ID NO: 29119 - DNA, 203 bp, Artificial sequence; identical to SEQ ID NO: 393
  synthetic

SEQ ID NO: 29120 - DNA, 203 bp, Artificial sequence; identical to SEQ ID NO: 396
  synthetic

SEQ ID NO: 29121 - DNA, 203 bp, Artificial sequence; identical to SEQ ID NO: 398
  synthetic

SEQ ID NO: 29122 - DNA, 203 bp, Artificial sequence; identical to SEQ ID NO: 402
  synthetic

SEQ ID NO: 29123 - DNA, 203 bp, Artificial sequence; identical to SEQ ID NO: 407
  synthetic

SEQ ID NO: 29124 - DNA, 203 bp, Artificial sequence; identical to SEQ ID NO: 408
  synthetic

SEQ ID NO: 29125 - DNA, 203 bp, Artificial sequence; identical to SEQ ID NO: 409
  synthetic

SEQ ID NO: 29126 - DNA, 203 bp, Artificial sequence; identical to SEQ ID NO: 410
  synthetic

SEQ ID NO: 29127 - DNA, 203 bp, Artificial sequence; identical to SEQ ID NO: 412
  synthetic

SEQ ID NO: 29128 - DNA, 203 bp, Artificial sequence; identical to SEQ ID NO: 413
  synthetic

SEQ ID NO: 29129 - DNA, 203 bp, Artificial sequence; identical to SEQ ID NO: 415
  synthetic

SEQ ID NO: 29130 - DNA, 203 bp, Artificial sequence; identical to SEQ ID NO: 427
  synthetic

SEQ ID NO: 29131 - DNA, 203 bp, Artificial sequence; identical to SEQ ID NO: 430
  synthetic

SEQ ID NO: 29132 - DNA, 203 bp, Artificial sequence; identical to SEQ ID NO: 432
  synthetic

SEQ ID NO: 29133 - DNA, 203 bp, Artificial sequence; identical to SEQ ID NO: 433
  synthetic

SEQ ID NO: 29134 - DNA, 203 bp, Artificial sequence; identical to SEQ ID NO: 434
  synthetic

SEQ ID NO: 29135 - DNA, 203 bp, Artificial sequence; identical to SEQ ID NO: 138
  synthetic

SEQ ID NO: 29136 - DNA, 203 bp, Artificial sequence; identical to SEQ ID NO: 437
  synthetic

SEQ ID NO: 29137 - DNA, 203 bp, Artificial sequence; identical to SEQ ID NO: 442
  synthetic

SEQ ID NO: 29138 - DNA, 203 bp, Artificial sequence; identical to SEQ ID NO: 444
  synthetic

SEQ ID NO: 29139 - DNA, 203 bp, Artificial sequence; identical to SEQ ID NO: 445
  synthetic

SEQ ID NO: 29140 - DNA, 203 bp, Artificial sequence; identical to SEQ ID NO: 451
  synthetic

SEQ ID NO: 29141 - DNA, 203 bp, Artificial sequence; identical to SEQ ID NO: 453
  synthetic

SEQ ID NO: 29142 - DNA, 203 bp, Artificial sequence; identical to SEQ ID NO: 454
  synthetic

SEQ ID NO: 29143 - DNA, 203 bp, Artificial sequence; identical to SEQ ID NO: 458
  synthetic

SEQ ID NO: 29144 - DNA, 203 bp, Artificial sequence; identical to SEQ ID NO: 466
  synthetic

SEQ ID NO: 29145 - DNA, 203 bp, Artificial sequence; identical to SEQ ID NO: 472
  synthetic

SEQ ID NO: 29146 - DNA, 203 bp, Artificial sequence; identical to SEQ ID NO: 476
  synthetic

SEQ ID NO: 29147 - DNA, 203 bp, Artificial sequence; identical to SEQ ID NO: 482
  synthetic

SEQ ID NO: 29148 - DNA, 203 bp, Artificial sequence; identical to SEQ ID NO: 485
  synthetic

SEQ ID NO: 29149 - DNA, 203 bp, Artificial sequence; identical to SEQ ID NO: 490
  synthetic

SEQ ID NO: 29150 - DNA, 203 bp, Artificial sequence; identical to SEQ ID NO: 495
  synthetic

SEQ ID NO: 29151 - DNA, 203 bp, Artificial sequence; identical to SEQ ID NO: 497
  synthetic

SEQ ID NO: 29152 - DNA, 203 bp, Artificial sequence; identical to SEQ ID NO: 500
  synthetic

SEQ ID NO: 29153 - DNA, 203 bp, Artificial sequence; identical to SEQ ID NO: 503
  synthetic

SEQ ID NO: 29154 - DNA, 203 bp, Artificial sequence; identical to SEQ ID NO: 514
  synthetic

SEQ ID NO: 29155 - DNA, 203 bp, Artificial sequence; identical to SEQ ID NO: 515
  synthetic

SEQ ID NO: 29156 - DNA, 203 bp, Artificial sequence; identical to SEQ ID NO: 520
  synthetic

SEQ ID NO: 29157 - DNA, 203 bp, Artificial sequence; identical to SEQ ID NO: 531
  synthetic

SEQ ID NO: 29158 - DNA, 203 bp, Artificial sequence; identical to SEQ ID NO: 541
  synthetic

SEQ ID NO: 29159 - DNA, 203 bp, Artificial sequence; identical to SEQ ID NO: 550
  synthetic

SEQ ID NO: 29160 - DNA, 203 bp, Artificial sequence; identical to SEQ ID NO: 553
  synthetic

SEQ ID NO: 29161 - DNA, 203 bp, Artificial sequence; identical to SEQ ID NO: 554
  synthetic

SEQ ID NO: 29162 - DNA, 203 bp, Artificial sequence; identical to SEQ ID NO: 558
  synthetic

SEQ ID NO: 29163 - DNA, 203 bp, Artificial sequence; identical to SEQ ID NO: 561
  synthetic

SEQ ID NO: 29164 - DNA, 203 bp, Artificial sequence; identical to SEQ ID NO: 566
  synthetic

SEQ ID NO: 29165 - DNA, 203 bp, Artificial sequence; identical to SEQ ID NO: 571
  synthetic

SEQ ID NO: 29166 - DNA, 203 bp, Artificial sequence; identical to SEQ ID NO: 578
  synthetic

SEQ ID NO: 29167 - DNA, 203 bp, Artificial sequence; identical to SEQ ID NO: 580
  synthetic

SEQ ID NO: 29168 - DNA, 203 bp, Artificial sequence; identical to SEQ ID NO: 585
  synthetic

SEQ ID NO: 29169 - DNA, 203 bp, Artificial sequence; identical to SEQ ID NO: 587
  synthetic

SEQ ID NO: 29170 - DNA, 203 bp, Artificial sequence; identical to SEQ ID NO: 591
  synthetic

SEQ ID NO: 29171 - DNA, 203 bp, Artificial sequence; identical to SEQ ID NO: 601
  synthetic

SEQ ID NO: 29172 - DNA, 203 bp, Artificial sequence; identical to SEQ ID NO: 603
  synthetic

SEQ ID NO: 29173 - DNA, 203 bp, Artificial sequence; identical to SEQ ID NO: 605
  synthetic

SEQ ID NO: 29174 - DNA, 203 bp, Artificial sequence; identical to SEQ ID NO: 614
  synthetic

SEQ ID NO: 29175 - DNA, 203 bp, Artificial sequence; identical to SEQ ID NO: 619
  synthetic

SEQ ID NO: 29176 - DNA, 203 bp, Artificial sequence; identical to SEQ ID NO: 622
  synthetic

SEQ ID NO: 29177 - DNA, 203 bp, Artificial sequence; identical to SEQ ID NO: 623
  synthetic

SEQ ID NO: 29178 - DNA, 203 bp, Artificial sequence; identical to SEQ ID NO: 624
  synthetic

SEQ ID NO: 29179 - DNA, 203 bp, Artificial sequence; identical to SEQ ID NO: 629
  synthetic

SEQ ID NO: 29180 - DNA, 203 bp, Artificial sequence; identical to SEQ ID NO: 639
  synthetic

SEQ ID NO: 29181 - DNA, 203 bp, Artificial sequence; identical to SEQ ID NO: 644
  synthetic

SEQ ID NO: 29182 - DNA, 203 bp, Artificial sequence; identical to SEQ ID NO: 645
  synthetic

SEQ ID NO: 29183 - DNA, 203 bp, Artificial sequence; identical to SEQ ID NO: 653
  synthetic

SEQ ID NO: 29184 - DNA, 203 bp, Artificial sequence; identical to SEQ ID NO: 658
  synthetic

SEQ ID NO: 29185 - DNA, 203 bp, Artificial sequence; identical to SEQ ID NO: 659
  synthetic

SEQ ID NO: 29186 - DNA, 203 bp, Artificial sequence; identical to SEQ ID NO: 664
  synthetic

SEQ ID NO: 29187 - DNA, 203 bp, Artificial sequence; identical to SEQ ID NO: 665
  synthetic

SEQ ID NO: 29188 - DNA, 203 bp, Artificial sequence; identical to SEQ ID NO: 670
  synthetic

SEQ ID NO: 29189 - DNA, 203 bp, Artificial sequence; identical to SEQ ID NO: 678
  synthetic

SEQ ID NO: 29190 - DNA, 203 bp, Artificial sequence; identical to SEQ ID NO: 682
  synthetic

SEQ ID NO: 29191 - DNA, 203 bp, Artificial sequence; identical to SEQ ID NO: 686
  synthetic

SEQ ID NO: 29192 - DNA, 203 bp, Artificial sequence; identical to SEQ ID NO: 687
  synthetic

SEQ ID NO: 29193 - DNA, 203 bp, Artificial sequence; identical to SEQ ID NO: 690
  synthetic

SEQ ID NO: 29194 - DNA, 203 bp, Artificial sequence; identical to SEQ ID NO: 696
  synthetic

SEQ ID NO: 29195 - DNA, 203 bp, Artificial sequence; identical to SEQ ID NO: 697
  synthetic

SEQ ID NO: 29196 - DNA, 203 bp, Artificial sequence; identical to SEQ ID NO: 698
  synthetic

SEQ ID NO: 29197 - DNA, 203 bp, Artificial sequence; identical to SEQ ID NO: 709
  synthetic

SEQ ID NO: 29198 - DNA, 203 bp, Artificial sequence; identical to SEQ ID NO: 712
  synthetic

SEQ ID NO: 29199 - DNA, 203 bp, Artificial sequence; identical to SEQ ID NO: 713
  synthetic

SEQ ID NO: 29200 - DNA, 203 bp, Artificial sequence; identical to SEQ ID NO: 718
  synthetic

SEQ ID NO: 29201 - DNA, 203 bp, Artificial sequence; identical to SEQ ID NO: 719
  synthetic

SEQ ID NO: 29202 - DNA, 203 bp, Artificial sequence; identical to SEQ ID NO: 722
  synthetic

SEQ ID NO: 29203 - DNA, 203 bp, Artificial sequence; identical to SEQ ID NO: 724
  synthetic

SEQ ID NO: 29204 - DNA, 203 bp, Artificial sequence; identical to SEQ ID NO: 726
  synthetic

SEQ ID NO: 29205 - DNA, 203 bp, Artificial sequence; identical to SEQ ID NO: 727
  synthetic

SEQ ID NO: 29206 - DNA, 203 bp, Artificial sequence; identical to SEQ ID NO: 731
  synthetic

SEQ ID NO: 29207 - DNA, 203 bp, Artificial sequence; identical to SEQ ID NO: 733
  synthetic

SEQ ID NO: 29208 - DNA, 203 bp, Artificial sequence; identical to SEQ ID NO: 735
  synthetic

SEQ ID NO: 29209 - DNA, 203 bp, Artificial sequence; identical to SEQ ID NO: 743
  synthetic

SEQ ID NO: 29210 - DNA, 203 bp, Artificial sequence; identical to SEQ ID NO: 754
  synthetic

SEQ ID NO: 29211 - DNA, 203 bp, Artificial sequence; identical to SEQ ID NO: 756
  synthetic

SEQ ID NO: 29212 - DNA, 203 bp, Artificial sequence; identical to SEQ ID NO: 761
  synthetic

SEQ ID NO: 29213 - DNA, 203 bp, Artificial sequence; identical to SEQ ID NO: 767
  synthetic

SEQ ID NO: 29214 - DNA, 203 bp, Artificial sequence; identical to SEQ ID NO: 770
  synthetic

SEQ ID NO: 29215 - DNA, 203 bp, Artificial sequence; identical to SEQ ID NO: 771
  synthetic

SEQ ID NO: 29216 - DNA, 203 bp, Artificial sequence; identical to SEQ ID NO: 777
  synthetic

SEQ ID NO: 29217 - DNA, 203 bp, Artificial sequence; identical to SEQ ID NO: 778
  synthetic

SEQ ID NO: 29218 - DNA, 203 bp, Artificial sequence; identical to SEQ ID NO: 792
  synthetic

SEQ ID NO: 29219 - DNA, 203 bp, Artificial sequence; identical to SEQ ID NO: 794
  synthetic

SEQ ID NO: 29220 - DNA, 203 bp, Artificial sequence; identical to SEQ ID NO: 797
  synthetic

SEQ ID NO: 29221 - DNA, 203 bp, Artificial sequence; identical to SEQ ID NO: 801
  synthetic

SEQ ID NO: 29222 - DNA, 203 bp, Artificial sequence; identical to SEQ ID NO: 139
  synthetic

SEQ ID NO: 29223 - DNA, 203 bp, Artificial sequence; identical to SEQ ID NO: 805
  synthetic

SEQ ID NO: 29224 - DNA, 203 bp, Artificial sequence; identical to SEQ ID NO: 806
  synthetic

SEQ ID NO: 29225 - DNA, 203 bp, Artificial sequence; identical to SEQ ID NO: 834
  synthetic

SEQ ID NO: 29226 - DNA, 203 bp, Artificial sequence; identical to SEQ ID NO: 840
  synthetic

SEQ ID NO: 29227 - DNA, 203 bp, Artificial sequence; identical to SEQ ID NO: 841
  synthetic

SEQ ID NO: 29228 - DNA, 203 bp, Artificial sequence; identical to SEQ ID NO: 847
  synthetic

SEQ ID NO: 29229 - DNA, 203 bp, Artificial sequence; identical to SEQ ID NO: 848
  synthetic

SEQ ID NO: 29230 - DNA, 203 bp, Artificial sequence; identical to SEQ ID NO: 850
  synthetic

SEQ ID NO: 29231 - DNA, 203 bp, Artificial sequence; identical to SEQ ID NO: 851
  synthetic

SEQ ID NO: 29232 - DNA, 203 bp, Artificial sequence; identical to SEQ ID NO: 854
  synthetic

SEQ ID NO: 29233 - DNA, 203 bp, Artificial sequence; identical to SEQ ID NO: 863
  synthetic

SEQ ID NO: 29234 - DNA, 203 bp, Artificial sequence; identical to SEQ ID NO: 865
  synthetic

SEQ ID NO: 29235 - DNA, 203 bp, Artificial sequence; identical to SEQ ID NO: 869
  synthetic

SEQ ID NO: 29236 - DNA, 203 bp, Artificial sequence; identical to SEQ ID NO: 873
  synthetic

SEQ ID NO: 29237 - DNA, 203 bp, Artificial sequence; identical to SEQ ID NO: 881
  synthetic

SEQ ID NO: 29238 - DNA, 203 bp, Artificial sequence; identical to SEQ ID NO: 883
  synthetic

SEQ ID NO: 29239 - DNA, 203 bp, Artificial sequence; identical to SEQ ID NO: 886
  synthetic

SEQ ID NO: 29240 - DNA, 203 bp, Artificial sequence; identical to SEQ ID NO: 892
  synthetic

SEQ ID NO: 29241 - DNA, 203 bp, Artificial sequence; identical to SEQ ID NO: 893
  synthetic

SEQ ID NO: 29242 - DNA, 203 bp, Artificial sequence; identical to SEQ ID NO: 908
  synthetic

SEQ ID NO: 29243 - DNA, 203 bp, Artificial sequence; identical to SEQ ID NO: 909
  synthetic

SEQ ID NO: 29244 - DNA, 203 bp, Artificial sequence; identical to SEQ ID NO: 911
  synthetic

SEQ ID NO: 29245 - DNA, 203 bp, Artificial sequence; identical to SEQ ID NO: 920
  synthetic

SEQ ID NO: 29246 - DNA, 203 bp, Artificial sequence; identical to SEQ ID NO: 921
  synthetic

SEQ ID NO: 29247 - DNA, 203 bp, Artificial sequence; identical to SEQ ID NO: 923
  synthetic

SEQ ID NO: 29248 - DNA, 203 bp, Artificial sequence; identical to SEQ ID NO: 931
  synthetic

SEQ ID NO: 29249 - DNA, 203 bp, Artificial sequence; identical to SEQ ID NO: 935
  synthetic

SEQ ID NO: 29250 - DNA, 203 bp, Artificial sequence; identical to SEQ ID NO: 936
  synthetic

SEQ ID NO: 29251 - DNA, 203 bp, Artificial sequence; identical to SEQ ID NO: 952
  synthetic

SEQ ID NO: 29252 - DNA, 203 bp, Artificial sequence; identical to SEQ ID NO: 957
  synthetic

SEQ ID NO: 29253 - DNA, 203 bp, Artificial sequence; identical to SEQ ID NO: 959
  synthetic

SEQ ID NO: 29254 - DNA, 203 bp, Artificial sequence; identical to SEQ ID NO: 961
  synthetic

SEQ ID NO: 29255 - DNA, 203 bp, Artificial sequence; identical to SEQ ID NO: 970
  synthetic

SEQ ID NO: 29256 - DNA, 203 bp, Artificial sequence; identical to SEQ ID NO: 971
  synthetic

SEQ ID NO: 29257 - DNA, 203 bp, Artificial sequence; identical to SEQ ID NO: 972
  synthetic

SEQ ID NO: 29258 - DNA, 203 bp, Artificial sequence; identical to SEQ ID NO: 980
  synthetic

SEQ ID NO: 29259 - DNA, 203 bp, Artificial sequence; identical to SEQ ID NO: 981
  synthetic

SEQ ID NO: 29260 - DNA, 203 bp, Artificial sequence; identical to SEQ ID NO: 986
  synthetic

SEQ ID NO: 29261 - DNA, 203 bp, Artificial sequence; identical to SEQ ID NO: 993
  synthetic

SEQ ID NO: 29262 - DNA, 203 bp, Artificial sequence; identical to SEQ ID NO: 997
  synthetic

SEQ ID NO: 29263 - DNA, 203 bp, Artificial sequence; identical to SEQ ID NO: 998
  synthetic

SEQ ID NO: 29264 - DNA, 203 bp, Artificial sequence; identical to SEQ ID NO: 1000
  synthetic

SEQ ID NO: 29265 - DNA, 203 bp, Artificial sequence; identical to SEQ ID NO: 1002
  synthetic

SEQ ID NO: 29266 - DNA, 203 bp, Artificial sequence; identical to SEQ ID NO: 1003
  synthetic

SEQ ID NO: 29267 - DNA, 203 bp, Artificial sequence; identical to SEQ ID NO: 1019
  synthetic

SEQ ID NO: 29268 - DNA, 203 bp, Artificial sequence; identical to SEQ ID NO: 1022
  synthetic

SEQ ID NO: 29269 - DNA, 203 bp, Artificial sequence; identical to SEQ ID NO: 1023
  synthetic

SEQ ID NO: 29270 - DNA, 203 bp, Artificial sequence; identical to SEQ ID NO: 1029
  synthetic

SEQ ID NO: 29271 - DNA, 203 bp, Artificial sequence; identical to SEQ ID NO: 1030
  synthetic

SEQ ID NO: 29272 - DNA, 203 bp, Artificial sequence; identical to SEQ ID NO: 1031
  synthetic

SEQ ID NO: 29273 - DNA, 203 bp, Artificial sequence; identical to SEQ ID NO: 1047
  synthetic

SEQ ID NO: 29274 - DNA, 203 bp, Artificial sequence; identical to SEQ ID NO: 1054
  synthetic

SEQ ID NO: 29275 - DNA, 203 bp, Artificial sequence; identical to SEQ ID NO: 1061
  synthetic

SEQ ID NO: 29276 - DNA, 203 bp, Artificial sequence; identical to SEQ ID NO: 1067
  synthetic

SEQ ID NO: 29277 - DNA, 203 bp, Artificial sequence; identical to SEQ ID NO: 1068
  synthetic

SEQ ID NO: 29278 - DNA, 203 bp, Artificial sequence; identical to SEQ ID NO: 1071
  synthetic

SEQ ID NO: 29279 - DNA, 203 bp, Artificial sequence; identical to SEQ ID NO: 1076
  synthetic

SEQ ID NO: 29280 - DNA, 203 bp, Artificial sequence; identical to SEQ ID NO: 1077
  synthetic

SEQ ID NO: 29281 - DNA, 203 bp, Artificial sequence; identical to SEQ ID NO: 1079
  synthetic

SEQ ID NO: 29282 - DNA, 203 bp, Artificial sequence; identical to SEQ ID NO: 1083
  synthetic

SEQ ID NO: 29283 - DNA, 203 bp, Artificial sequence; identical to SEQ ID NO: 1085
  synthetic

SEQ ID NO: 29284 - DNA, 203 bp, Artificial sequence; identical to SEQ ID NO: 1089
  synthetic

SEQ ID NO: 29285 - DNA, 203 bp, Artificial sequence; identical to SEQ ID NO: 1093
  synthetic

SEQ ID NO: 29286 - DNA, 203 bp, Artificial sequence; identical to SEQ ID NO: 1096
  synthetic

SEQ ID NO: 29287 - DNA, 203 bp, Artificial sequence; identical to SEQ ID NO: 1116
  synthetic

SEQ ID NO: 29288 - DNA, 203 bp, Artificial sequence; identical to SEQ ID NO: 1119
  synthetic

SEQ ID NO: 29289 - DNA, 203 bp, Artificial sequence; identical to SEQ ID NO: 1121
  synthetic

SEQ ID NO: 29290 - DNA, 203 bp, Artificial sequence; identical to SEQ ID NO: 1123
  synthetic

SEQ ID NO: 29291 - DNA, 203 bp, Artificial sequence; identical to SEQ ID NO: 1124
  synthetic

SEQ ID NO: 29292 - DNA, 203 bp, Artificial sequence; identical to SEQ ID NO: 1125
  synthetic

SEQ ID NO: 29293 - DNA, 203 bp, Artificial sequence; identical to SEQ ID NO: 1127
  synthetic

SEQ ID NO: 29294 - DNA, 203 bp, Artificial sequence; identical to SEQ ID NO: 1131
  synthetic

SEQ ID NO: 29295 - DNA, 203 bp, Artificial sequence; identical to SEQ ID NO: 1138
  synthetic

SEQ ID NO: 29296 - DNA, 203 bp, Artificial sequence; identical to SEQ ID NO: 1144
  synthetic

SEQ ID NO: 29297 - DNA, 203 bp, Artificial sequence; identical to SEQ ID NO: 1145
  synthetic

SEQ ID NO: 29298 - DNA, 203 bp, Artificial sequence; identical to SEQ ID NO: 1146
  synthetic

SEQ ID NO: 29299 - DNA, 203 bp, Artificial sequence; identical to SEQ ID NO: 1156
  synthetic

SEQ ID NO: 29300 - DNA, 203 bp, Artificial sequence; identical to SEQ ID NO: 1160
  synthetic

SEQ ID NO: 29301 - DNA, 203 bp, Artificial sequence; identical to SEQ ID NO: 1164
  synthetic

SEQ ID NO: 29302 - DNA, 203 bp, Artificial sequence; identical to SEQ ID NO: 1175
  synthetic

SEQ ID NO: 29303 - DNA, 203 bp, Artificial sequence; identical to SEQ ID NO: 1176
  synthetic

SEQ ID NO: 29304 - DNA, 203 bp, Artificial sequence; identical to SEQ ID NO: 1177
  synthetic

SEQ ID NO: 29305 - DNA, 203 bp, Artificial sequence; identical to SEQ ID NO: 1181
  synthetic

SEQ ID NO: 29306 - DNA, 203 bp, Artificial sequence; identical to SEQ ID NO: 1185
  synthetic

SEQ ID NO: 29307 - DNA, 203 bp, Artificial sequence; identical to SEQ ID NO: 1186
  synthetic

SEQ ID NO: 29308 - DNA, 203 bp, Artificial sequence; identical to SEQ ID NO: 1193
  synthetic

SEQ ID NO: 29309 - DNA, 203 bp, Artificial sequence; identical to SEQ ID NO: 1201
  synthetic

SEQ ID NO: 29310 - DNA, 203 bp, Artificial sequence; identical to SEQ ID NO: 1205
  synthetic

SEQ ID NO: 29311 - DNA, 203 bp, Artificial sequence; identical to SEQ ID NO: 1206
  synthetic

SEQ ID NO: 29312 - DNA, 203 bp, Artificial sequence; identical to SEQ ID NO: 1208
  synthetic

SEQ ID NO: 29313 - DNA, 203 bp, Artificial sequence; identical to SEQ ID NO: 1209
  synthetic

SEQ ID NO: 29314 - DNA, 203 bp, Artificial sequence; identical to SEQ ID NO: 1210
  synthetic

SEQ ID NO: 29315 - DNA, 203 bp, Artificial sequence; identical to SEQ ID NO: 1212
  synthetic

SEQ ID NO: 29316 - DNA, 203 bp, Artificial sequence; identical to SEQ ID NO: 1214
  synthetic

SEQ ID NO: 29317 - DNA, 203 bp, Artificial sequence; identical to SEQ ID NO: 1215
  synthetic

SEQ ID NO: 29318 - DNA, 203 bp, Artificial sequence; identical to SEQ ID NO: 1216
  synthetic

SEQ ID NO: 29319 - DNA, 203 bp, Artificial sequence; identical to SEQ ID NO: 1217
  synthetic

SEQ ID NO: 29320 - DNA, 203 bp, Artificial sequence; identical to SEQ ID NO: 1219
  synthetic

SEQ ID NO: 29321 - DNA, 203 bp, Artificial sequence; identical to SEQ ID NO: 1220
  synthetic

SEQ ID NO: 29322 - DNA, 203 bp, Artificial sequence; identical to SEQ ID NO: 1227
  synthetic

SEQ ID NO: 29323 - DNA, 203 bp, Artificial sequence; identical to SEQ ID NO: 1234
  synthetic

SEQ ID NO: 29324 - DNA, 203 bp, Artificial sequence; identical to SEQ ID NO: 1235
  synthetic

SEQ ID NO: 29325 - DNA, 203 bp, Artificial sequence; identical to SEQ ID NO: 1238
  synthetic

SEQ ID NO: 29326 - DNA, 203 bp, Artificial sequence; identical to SEQ ID NO: 1243
  synthetic

SEQ ID NO: 29327 - DNA, 203 bp, Artificial sequence; identical to SEQ ID NO: 1248
  synthetic

SEQ ID NO: 29328 - DNA, 203 bp, Artificial sequence; identical to SEQ ID NO: 1254
  synthetic

SEQ ID NO: 29329 - DNA, 203 bp, Artificial sequence; identical to SEQ ID NO: 1257
  synthetic

SEQ ID NO: 29330 - DNA, 203 bp, Artificial sequence; identical to SEQ ID NO: 1258
  synthetic

SEQ ID NO: 29331 - DNA, 203 bp, Artificial sequence; identical to SEQ ID NO: 1261
  synthetic

SEQ ID NO: 29332 - DNA, 203 bp, Artificial sequence; identical to SEQ ID NO: 1262
  synthetic

SEQ ID NO: 29333 - DNA, 203 bp, Artificial sequence; identical to SEQ ID NO: 1266
  synthetic

SEQ ID NO: 29334 - DNA, 203 bp, Artificial sequence; identical to SEQ ID NO: 1269
  synthetic

SEQ ID NO: 29335 - DNA, 203 bp, Artificial sequence; identical to SEQ ID NO: 1270
  synthetic

SEQ ID NO: 29336 - DNA, 203 bp, Artificial sequence; identical to SEQ ID NO: 1272
  synthetic

SEQ ID NO: 29337 - DNA, 203 bp, Artificial sequence; identical to SEQ ID NO: 1273
  synthetic

SEQ ID NO: 29338 - DNA, 203 bp, Artificial sequence; identical to SEQ ID NO: 1277
  synthetic

SEQ ID NO: 29339 - DNA, 203 bp, Artificial sequence; identical to SEQ ID NO: 1278
  synthetic

SEQ ID NO: 29340 - DNA, 203 bp, Artificial sequence; identical to SEQ ID NO: 1280
  synthetic

SEQ ID NO: 29341 - DNA, 203 bp, Artificial sequence; identical to SEQ ID NO: 1288
  synthetic

SEQ ID NO: 29342 - DNA, 203 bp, Artificial sequence; identical to SEQ ID NO: 1290
  synthetic

SEQ ID NO: 29343 - DNA, 203 bp, Artificial sequence; identical to SEQ ID NO: 1296
  synthetic

SEQ ID NO: 29344 - DNA, 203 bp, Artificial sequence; identical to SEQ ID NO: 1298
  synthetic

SEQ ID NO: 29345 - DNA, 203 bp, Artificial sequence; identical to SEQ ID NO: 1303
  synthetic

SEQ ID NO: 29346 - DNA, 203 bp, Artificial sequence; identical to SEQ ID NO: 1306
  synthetic

SEQ ID NO: 29347 - DNA, 203 bp, Artificial sequence; identical to SEQ ID NO: 1307
  synthetic

SEQ ID NO: 29348 - DNA, 203 bp, Artificial sequence; identical to SEQ ID NO: 1312
  synthetic

SEQ ID NO: 29349 - DNA, 203 bp, Artificial sequence; identical to SEQ ID NO: 1314
  synthetic

SEQ ID NO: 29350 - DNA, 203 bp, Artificial sequence; identical to SEQ ID NO: 1315
  synthetic

SEQ ID NO: 29351 - DNA, 203 bp, Artificial sequence; identical to SEQ ID NO: 1321
  synthetic

SEQ ID NO: 29352 - DNA, 203 bp, Artificial sequence; identical to SEQ ID NO: 1330
  synthetic

SEQ ID NO: 29353 - DNA, 203 bp, Artificial sequence; identical to SEQ ID NO: 1331
  synthetic

SEQ ID NO: 29354 - DNA, 203 bp, Artificial sequence; identical to SEQ ID NO: 1340
  synthetic

SEQ ID NO: 29355 - DNA, 203 bp, Artificial sequence; identical to SEQ ID NO: 1341
  synthetic

SEQ ID NO: 29356 - DNA, 203 bp, Artificial sequence; identical to SEQ ID NO: 1342
  synthetic

SEQ ID NO: 29357 - DNA, 203 bp, Artificial sequence; identical to SEQ ID NO: 1353
  synthetic

SEQ ID NO: 29358 - DNA, 203 bp, Artificial sequence; identical to SEQ ID NO: 1356
  synthetic

SEQ ID NO: 29359 - DNA, 203 bp, Artificial sequence; identical to SEQ ID NO: 1366
  synthetic

SEQ ID NO: 29360 - DNA, 203 bp, Artificial sequence; identical to SEQ ID NO: 1367
  synthetic

SEQ ID NO: 29361 - DNA, 203 bp, Artificial sequence; identical to SEQ ID NO: 1370
  synthetic

SEQ ID NO: 29362 - DNA, 203 bp, Artificial sequence; identical to SEQ ID NO: 1380
  synthetic

SEQ ID NO: 29363 - DNA, 203 bp, Artificial sequence; identical to SEQ ID NO: 1383
  synthetic

SEQ ID NO: 29364 - DNA, 203 bp, Artificial sequence; identical to SEQ ID NO: 1386
  synthetic

SEQ ID NO: 29365 - DNA, 203 bp, Artificial sequence; identical to SEQ ID NO: 1389
  synthetic

SEQ ID NO: 29366 - DNA, 203 bp, Artificial sequence; identical to SEQ ID NO: 1393
  synthetic

SEQ ID NO: 29367 - DNA, 203 bp, Artificial sequence; identical to SEQ ID NO: 140
  synthetic

SEQ ID NO: 29368 - DNA, 203 bp, Artificial sequence; identical to SEQ ID NO: 1395
  synthetic

SEQ ID NO: 29369 - DNA, 203 bp, Artificial sequence; identical to SEQ ID NO: 141
  synthetic

SEQ ID NO: 29370 - DNA, 203 bp, Artificial sequence; identical to SEQ ID NO: 1399
  synthetic

SEQ ID NO: 29371 - DNA, 203 bp, Artificial sequence; identical to SEQ ID NO: 1401
  synthetic

SEQ ID NO: 29372 - DNA, 203 bp, Artificial sequence; identical to SEQ ID NO: 1402
  synthetic

SEQ ID NO: 29373 - DNA, 203 bp, Artificial sequence; identical to SEQ ID NO: 1413
  synthetic

SEQ ID NO: 29374 - DNA, 203 bp, Artificial sequence; identical to SEQ ID NO: 1415
  synthetic

SEQ ID NO: 29375 - DNA, 203 bp, Artificial sequence; identical to SEQ ID NO: 1420
  synthetic

SEQ ID NO: 29376 - DNA, 203 bp, Artificial sequence; identical to SEQ ID NO: 1423
  synthetic

SEQ ID NO: 29377 - DNA, 203 bp, Artificial sequence; identical to SEQ ID NO: 1424
  synthetic

SEQ ID NO: 29378 - DNA, 203 bp, Artificial sequence; identical to SEQ ID NO: 1425
  synthetic

SEQ ID NO: 29379 - DNA, 203 bp, Artificial sequence; identical to SEQ ID NO: 1429
  synthetic

SEQ ID NO: 29380 - DNA, 203 bp, Artificial sequence; identical to SEQ ID NO: 1444
  synthetic

SEQ ID NO: 29381 - DNA, 203 bp, Artificial sequence; identical to SEQ ID NO: 1446
  synthetic

SEQ ID NO: 29382 - DNA, 203 bp, Artificial sequence; identical to SEQ ID NO: 1447
  synthetic

SEQ ID NO: 29383 - DNA, 203 bp, Artificial sequence; identical to SEQ ID NO: 1449
  synthetic

SEQ ID NO: 29384 - DNA, 203 bp, Artificial sequence; identical to SEQ ID NO: 1456
  synthetic

SEQ ID NO: 29385 - DNA, 203 bp, Artificial sequence; identical to SEQ ID NO: 1457
  synthetic

SEQ ID NO: 29386 - DNA, 203 bp, Artificial sequence; identical to SEQ ID NO: 1459
  synthetic

SEQ ID NO: 29387 - DNA, 203 bp, Artificial sequence; identical to SEQ ID NO: 1462
  synthetic

SEQ ID NO: 29388 - DNA, 203 bp, Artificial sequence; identical to SEQ ID NO: 1465
  synthetic

SEQ ID NO: 29389 - DNA, 203 bp, Artificial sequence; identical to SEQ ID NO: 1466
  synthetic

SEQ ID NO: 29390 - DNA, 203 bp, Artificial sequence; identical to SEQ ID NO: 1467
  synthetic

SEQ ID NO: 29391 - DNA, 203 bp, Artificial sequence; identical to SEQ ID NO: 1476
  synthetic

SEQ ID NO: 29392 - DNA, 203 bp, Artificial sequence; identical to SEQ ID NO: 1492
  synthetic

SEQ ID NO: 29393 - DNA, 203 bp, Artificial sequence; identical to SEQ ID NO: 1495
  synthetic

SEQ ID NO: 29394 - DNA, 203 bp, Artificial sequence; identical to SEQ ID NO: 1498
  synthetic

SEQ ID NO: 29395 - DNA, 203 bp, Artificial sequence; identical to SEQ ID NO: 1499
  synthetic

SEQ ID NO: 29396 - DNA, 203 bp, Artificial sequence; identical to SEQ ID NO: 1503
  synthetic

SEQ ID NO: 29397 - DNA, 203 bp, Artificial sequence; identical to SEQ ID NO: 1506
  synthetic

SEQ ID NO: 29398 - DNA, 203 bp, Artificial sequence; identical to SEQ ID NO: 1509
  synthetic

SEQ ID NO: 29399 - DNA, 203 bp, Artificial sequence; identical to SEQ ID NO: 1512
  synthetic

SEQ ID NO: 29400 - DNA, 203 bp, Artificial sequence; identical to SEQ ID NO: 1513
  synthetic

SEQ ID NO: 29401 - DNA, 203 bp, Artificial sequence; identical to SEQ ID NO: 1516
  synthetic

SEQ ID NO: 29402 - DNA, 203 bp, Artificial sequence; identical to SEQ ID NO: 1521
  synthetic

SEQ ID NO: 29403 - DNA, 203 bp, Artificial sequence; identical to SEQ ID NO: 1524
  synthetic

SEQ ID NO: 29404 - DNA, 203 bp, Artificial sequence; identical to SEQ ID NO: 1525
  synthetic

SEQ ID NO: 29405 - DNA, 203 bp, Artificial sequence; identical to SEQ ID NO: 1526
  synthetic

SEQ ID NO: 29406 - DNA, 203 bp, Artificial sequence; identical to SEQ ID NO: 1527
  synthetic

SEQ ID NO: 29407 - DNA, 203 bp, Artificial sequence; identical to SEQ ID NO: 1531
  synthetic

SEQ ID NO: 29408 - DNA, 203 bp, Artificial sequence; identical to SEQ ID NO: 1532
  synthetic

SEQ ID NO: 29409 - DNA, 203 bp, Artificial sequence; identical to SEQ ID NO: 1536
  synthetic

SEQ ID NO: 29410 - DNA, 203 bp, Artificial sequence; identical to SEQ ID NO: 1538
  synthetic

SEQ ID NO: 29411 - DNA, 203 bp, Artificial sequence; identical to SEQ ID NO: 1540
  synthetic

SEQ ID NO: 29412 - DNA, 203 bp, Artificial sequence; identical to SEQ ID NO: 1542
  synthetic

SEQ ID NO: 29413 - DNA, 203 bp, Artificial sequence; identical to SEQ ID NO: 1546
  synthetic

SEQ ID NO: 29414 - DNA, 203 bp, Artificial sequence; identical to SEQ ID NO: 1547
  synthetic

SEQ ID NO: 29415 - DNA, 203 bp, Artificial sequence; identical to SEQ ID NO: 1550
  synthetic

SEQ ID NO: 29416 - DNA, 203 bp, Artificial sequence; identical to SEQ ID NO: 1552
  synthetic

SEQ ID NO: 29417 - DNA, 203 bp, Artificial sequence; identical to SEQ ID NO: 1554
  synthetic

SEQ ID NO: 29418 - DNA, 203 bp, Artificial sequence; identical to SEQ ID NO: 1561
  synthetic

SEQ ID NO: 29419 - DNA, 203 bp, Artificial sequence; identical to SEQ ID NO: 1568
  synthetic

SEQ ID NO: 29420 - DNA, 203 bp, Artificial sequence; identical to SEQ ID NO: 1569
  synthetic

SEQ ID NO: 29421 - DNA, 203 bp, Artificial sequence; identical to SEQ ID NO: 1575
  synthetic

SEQ ID NO: 29422 - DNA, 203 bp, Artificial sequence; identical to SEQ ID NO: 1581
  synthetic

SEQ ID NO: 29423 - DNA, 203 bp, Artificial sequence; identical to SEQ ID NO: 1595
  synthetic

SEQ ID NO: 29424 - DNA, 203 bp, Artificial sequence; identical to SEQ ID NO: 1596
  synthetic

SEQ ID NO: 29425 - DNA, 203 bp, Artificial sequence; identical to SEQ ID NO: 1597
  synthetic

SEQ ID NO: 29426 - DNA, 203 bp, Artificial sequence; identical to SEQ ID NO: 1601
  synthetic

SEQ ID NO: 29427 - DNA, 203 bp, Artificial sequence; identical to SEQ ID NO: 1604
  synthetic

SEQ ID NO: 29428 - DNA, 203 bp, Artificial sequence; identical to SEQ ID NO: 1606
  synthetic

SEQ ID NO: 29429 - DNA, 203 bp, Artificial sequence; identical to SEQ ID NO: 1611
  synthetic

SEQ ID NO: 29430 - DNA, 203 bp, Artificial sequence; identical to SEQ ID NO: 1613
  synthetic

SEQ ID NO: 29431 - DNA, 203 bp, Artificial sequence; identical to SEQ ID NO: 1615
  synthetic

SEQ ID NO: 29432 - DNA, 203 bp, Artificial sequence; identical to SEQ ID NO: 1617
  synthetic

SEQ ID NO: 29433 - DNA, 203 bp, Artificial sequence; identical to SEQ ID NO: 1618
  synthetic

SEQ ID NO: 29434 - DNA, 203 bp, Artificial sequence; identical to SEQ ID NO: 1622
  synthetic

SEQ ID NO: 29435 - DNA, 203 bp, Artificial sequence; identical to SEQ ID NO: 1630
  synthetic

SEQ ID NO: 29436 - DNA, 203 bp, Artificial sequence; identical to SEQ ID NO: 1634
  synthetic

SEQ ID NO: 29437 - DNA, 203 bp, Artificial sequence; identical to SEQ ID NO: 1636
  synthetic

SEQ ID NO: 29438 - DNA, 203 bp, Artificial sequence; identical to SEQ ID NO: 1639
  synthetic

SEQ ID NO: 29439 - DNA, 203 bp, Artificial sequence; identical to SEQ ID NO: 1643
  synthetic

SEQ ID NO: 29440 - DNA, 203 bp, Artificial sequence; identical to SEQ ID NO: 1662
  synthetic

SEQ ID NO: 29441 - DNA, 203 bp, Artificial sequence; identical to SEQ ID NO: 1664
  synthetic

SEQ ID NO: 29442 - DNA, 203 bp, Artificial sequence; identical to SEQ ID NO: 1667
  synthetic

SEQ ID NO: 29443 - DNA, 203 bp, Artificial sequence; identical to SEQ ID NO: 1672
  synthetic

SEQ ID NO: 29444 - DNA, 203 bp, Artificial sequence; identical to SEQ ID NO: 1675
  synthetic

SEQ ID NO: 29445 - DNA, 203 bp, Artificial sequence; identical to SEQ ID NO: 1678
  synthetic

SEQ ID NO: 29446 - DNA, 203 bp, Artificial sequence; identical to SEQ ID NO: 1688
  synthetic

SEQ ID NO: 29447 - DNA, 203 bp, Artificial sequence; identical to SEQ ID NO: 1692
  synthetic

SEQ ID NO: 29448 - DNA, 203 bp, Artificial sequence; identical to SEQ ID NO: 1695
  synthetic

SEQ ID NO: 29449 - DNA, 203 bp, Artificial sequence; identical to SEQ ID NO: 1699
  synthetic

SEQ ID NO: 29450 - DNA, 203 bp, Artificial sequence; identical to SEQ ID NO: 1705
  synthetic

SEQ ID NO: 29451 - DNA, 203 bp, Artificial sequence; identical to SEQ ID NO: 1707
  synthetic

SEQ ID NO: 29452 - DNA, 203 bp, Artificial sequence; identical to SEQ ID NO: 1713
  synthetic

SEQ ID NO: 29453 - DNA, 203 bp, Artificial sequence; identical to SEQ ID NO: 1714
  synthetic

SEQ ID NO: 29454 - DNA, 203 bp, Artificial sequence; identical to SEQ ID NO: 1716
  synthetic

SEQ ID NO: 29455 - DNA, 203 bp, Artificial sequence; identical to SEQ ID NO: 1726
  synthetic

SEQ ID NO: 29456 - DNA, 203 bp, Artificial sequence; identical to SEQ ID NO: 1727
  synthetic

SEQ ID NO: 29457 - DNA, 203 bp, Artificial sequence; identical to SEQ ID NO: 1728
  synthetic

SEQ ID NO: 29458 - DNA, 203 bp, Artificial sequence; identical to SEQ ID NO: 1733
  synthetic

SEQ ID NO: 29459 - DNA, 203 bp, Artificial sequence; identical to SEQ ID NO: 1734
  synthetic

SEQ ID NO: 29460 - DNA, 203 bp, Artificial sequence; identical to SEQ ID NO: 1737
  synthetic

SEQ ID NO: 29461 - DNA, 203 bp, Artificial sequence; identical to SEQ ID NO: 1739
  synthetic

SEQ ID NO: 29462 - DNA, 203 bp, Artificial sequence; identical to SEQ ID NO: 1747
  synthetic

SEQ ID NO: 29463 - DNA, 203 bp, Artificial sequence; identical to SEQ ID NO: 1749
  synthetic

SEQ ID NO: 29464 - DNA, 203 bp, Artificial sequence; identical to SEQ ID NO: 1753
  synthetic

SEQ ID NO: 29465 - DNA, 203 bp, Artificial sequence; identical to SEQ ID NO: 1755
  synthetic

SEQ ID NO: 29466 - DNA, 203 bp, Artificial sequence; identical to SEQ ID NO: 1757
  synthetic

SEQ ID NO: 29467 - DNA, 203 bp, Artificial sequence; identical to SEQ ID NO: 1758
  synthetic

SEQ ID NO: 29468 - DNA, 203 bp, Artificial sequence; identical to SEQ ID NO: 1774
  synthetic

SEQ ID NO: 29469 - DNA, 203 bp, Artificial sequence; identical to SEQ ID NO: 1777
  synthetic

SEQ ID NO: 29470 - DNA, 203 bp, Artificial sequence; identical to SEQ ID NO: 1778
  synthetic

SEQ ID NO: 29471 - DNA, 203 bp, Artificial sequence; identical to SEQ ID NO: 1782
  synthetic

SEQ ID NO: 29472 - DNA, 203 bp, Artificial sequence; identical to SEQ ID NO: 1783
  synthetic

SEQ ID NO: 29473 - DNA, 203 bp, Artificial sequence; identical to SEQ ID NO: 1784
  synthetic

SEQ ID NO: 29474 - DNA, 203 bp, Artificial sequence; identical to SEQ ID NO: 1787
  synthetic

SEQ ID NO: 29475 - DNA, 203 bp, Artificial sequence; identical to SEQ ID NO: 1792
  synthetic

SEQ ID NO: 29476 - DNA, 203 bp, Artificial sequence; identical to SEQ ID NO: 1793
  synthetic

SEQ ID NO: 29477 - DNA, 203 bp, Artificial sequence; identical to SEQ ID NO: 1794
  synthetic

SEQ ID NO: 29478 - DNA, 203 bp, Artificial sequence; identical to SEQ ID NO: 1796
  synthetic

SEQ ID NO: 29479 - DNA, 203 bp, Artificial sequence; identical to SEQ ID NO: 1797
  synthetic

SEQ ID NO: 29480 - DNA, 203 bp, Artificial sequence; identical to SEQ ID NO: 1798
  synthetic

SEQ ID NO: 29481 - DNA, 203 bp, Artificial sequence; identical to SEQ ID NO: 1802
  synthetic

SEQ ID NO: 29482 - DNA, 203 bp, Artificial sequence; identical to SEQ ID NO: 1807
  synthetic

SEQ ID NO: 29483 - DNA, 203 bp, Artificial sequence; identical to SEQ ID NO: 1810
  synthetic

SEQ ID NO: 29484 - DNA, 203 bp, Artificial sequence; identical to SEQ ID NO: 1813
  synthetic

SEQ ID NO: 29485 - DNA, 203 bp, Artificial sequence; identical to SEQ ID NO: 1820
  synthetic

SEQ ID NO: 29486 - DNA, 203 bp, Artificial sequence; identical to SEQ ID NO: 1832
  synthetic

SEQ ID NO: 29487 - DNA, 203 bp, Artificial sequence; identical to SEQ ID NO: 1834
  synthetic

SEQ ID NO: 29488 - DNA, 203 bp, Artificial sequence; identical to SEQ ID NO: 1837
  synthetic

SEQ ID NO: 29489 - DNA, 203 bp, Artificial sequence; identical to SEQ ID NO: 1838
  synthetic

SEQ ID NO: 29490 - DNA, 203 bp, Artificial sequence; identical to SEQ ID NO: 1841
  synthetic

SEQ ID NO: 29491 - DNA, 203 bp, Artificial sequence; identical to SEQ ID NO: 1844
  synthetic

SEQ ID NO: 29492 - DNA, 203 bp, Artificial sequence; identical to SEQ ID NO: 1846
  synthetic

SEQ ID NO: 29493 - DNA, 203 bp, Artificial sequence; identical to SEQ ID NO: 1847
  synthetic

SEQ ID NO: 29494 - DNA, 203 bp, Artificial sequence; identical to SEQ ID NO: 142
  synthetic

SEQ ID NO: 29495 - DNA, 203 bp, Artificial sequence; identical to SEQ ID NO: 1851
  synthetic

SEQ ID NO: 29496 - DNA, 203 bp, Artificial sequence; identical to SEQ ID NO: 1852
  synthetic

SEQ ID NO: 29497 - DNA, 203 bp, Artificial sequence; identical to SEQ ID NO: 1855
  synthetic

SEQ ID NO: 29498 - DNA, 203 bp, Artificial sequence; identical to SEQ ID NO: 1857
  synthetic

SEQ ID NO: 29499 - DNA, 203 bp, Artificial sequence; identical to SEQ ID NO: 1860
  synthetic

SEQ ID NO: 29500 - DNA, 203 bp, Artificial sequence; identical to SEQ ID NO: 1861
  synthetic

SEQ ID NO: 29501 - DNA, 203 bp, Artificial sequence; identical to SEQ ID NO: 1862
  synthetic

SEQ ID NO: 29502 - DNA, 203 bp, Artificial sequence; identical to SEQ ID NO: 1863
  synthetic

SEQ ID NO: 29503 - DNA, 203 bp, Artificial sequence; identical to SEQ ID NO: 1864
  synthetic

SEQ ID NO: 29504 - DNA, 203 bp, Artificial sequence; identical to SEQ ID NO: 1866
  synthetic

SEQ ID NO: 29505 - DNA, 203 bp, Artificial sequence; identical to SEQ ID NO: 1885
  synthetic

SEQ ID NO: 29506 - DNA, 203 bp, Artificial sequence; identical to SEQ ID NO: 1893
  synthetic

SEQ ID NO: 29507 - DNA, 203 bp, Artificial sequence; identical to SEQ ID NO: 1895
  synthetic

SEQ ID NO: 29508 - DNA, 203 bp, Artificial sequence; identical to SEQ ID NO: 1897
  synthetic

SEQ ID NO: 29509 - DNA, 203 bp, Artificial sequence; identical to SEQ ID NO: 1903
  synthetic

SEQ ID NO: 29510 - DNA, 203 bp, Artificial sequence; identical to SEQ ID NO: 1904
  synthetic

SEQ ID NO: 29511 - DNA, 203 bp, Artificial sequence; identical to SEQ ID NO: 1905
  synthetic

SEQ ID NO: 29512 - DNA, 203 bp, Artificial sequence; identical to SEQ ID NO: 1915
  synthetic

SEQ ID NO: 29513 - DNA, 203 bp, Artificial sequence; identical to SEQ ID NO: 1916
  synthetic

SEQ ID NO: 29514 - DNA, 203 bp, Artificial sequence; identical to SEQ ID NO: 1918
  synthetic

SEQ ID NO: 29515 - DNA, 203 bp, Artificial sequence; identical to SEQ ID NO: 1919
  synthetic

SEQ ID NO: 29516 - DNA, 203 bp, Artificial sequence; identical to SEQ ID NO: 1930
  synthetic

SEQ ID NO: 29517 - DNA, 203 bp, Artificial sequence; identical to SEQ ID NO: 1931
  synthetic

SEQ ID NO: 29518 - DNA, 203 bp, Artificial sequence; identical to SEQ ID NO: 1932
  synthetic

SEQ ID NO: 29519 - DNA, 203 bp, Artificial sequence; identical to SEQ ID NO: 1940
  synthetic

SEQ ID NO: 29520 - DNA, 203 bp, Artificial sequence; identical to SEQ ID NO: 1947
  synthetic

SEQ ID NO: 29521 - DNA, 203 bp, Artificial sequence; identical to SEQ ID NO: 1951
  synthetic

SEQ ID NO: 29522 - DNA, 203 bp, Artificial sequence; identical to SEQ ID NO: 1954
  synthetic

SEQ ID NO: 29523 - DNA, 203 bp, Artificial sequence; identical to SEQ ID NO: 1957
  synthetic

SEQ ID NO: 29524 - DNA, 203 bp, Artificial sequence; identical to SEQ ID NO: 1959
  synthetic

SEQ ID NO: 29525 - DNA, 203 bp, Artificial sequence; identical to SEQ ID NO: 1960
  synthetic

SEQ ID NO: 29526 - DNA, 203 bp, Artificial sequence; identical to SEQ ID NO: 1971
  synthetic

SEQ ID NO: 29527 - DNA, 203 bp, Artificial sequence; identical to SEQ ID NO: 1972
  synthetic

SEQ ID NO: 29528 - DNA, 203 bp, Artificial sequence; identical to SEQ ID NO: 1980
  synthetic

SEQ ID NO: 29529 - DNA, 203 bp, Artificial sequence; identical to SEQ ID NO: 1981
  synthetic

SEQ ID NO: 29530 - DNA, 203 bp, Artificial sequence; identical to SEQ ID NO: 1987
  synthetic

SEQ ID NO: 29531 - DNA, 203 bp, Artificial sequence; identical to SEQ ID NO: 1989
  synthetic

SEQ ID NO: 29532 - DNA, 203 bp, Artificial sequence; identical to SEQ ID NO: 1991
  synthetic

SEQ ID NO: 29533 - DNA, 203 bp, Artificial sequence; identical to SEQ ID NO: 1992
  synthetic

SEQ ID NO: 29534 - DNA, 203 bp, Artificial sequence; identical to SEQ ID NO: 2006
  synthetic

SEQ ID NO: 29535 - DNA, 203 bp, Artificial sequence; identical to SEQ ID NO: 2007
  synthetic

SEQ ID NO: 29536 - DNA, 203 bp, Artificial sequence; identical to SEQ ID NO: 2016
  synthetic

SEQ ID NO: 29537 - DNA, 203 bp, Artificial sequence; identical to SEQ ID NO: 2017
  synthetic

SEQ ID NO: 29538 - DNA, 203 bp, Artificial sequence; identical to SEQ ID NO: 2023
  synthetic

SEQ ID NO: 29539 - DNA, 203 bp, Artificial sequence; identical to SEQ ID NO: 2025
  synthetic

SEQ ID NO: 29540 - DNA, 203 bp, Artificial sequence; identical to SEQ ID NO: 2027
  synthetic

SEQ ID NO: 29541 - DNA, 203 bp, Artificial sequence; identical to SEQ ID NO: 2030
  synthetic

SEQ ID NO: 29542 - DNA, 203 bp, Artificial sequence; identical to SEQ ID NO: 2033
  synthetic

SEQ ID NO: 29543 - DNA, 203 bp, Artificial sequence; identical to SEQ ID NO: 2034
  synthetic

SEQ ID NO: 29544 - DNA, 203 bp, Artificial sequence; identical to SEQ ID NO: 2035
  synthetic

SEQ ID NO: 29545 - DNA, 203 bp, Artificial sequence; identical to SEQ ID NO: 2036
  synthetic

SEQ ID NO: 29546 - DNA, 203 bp, Artificial sequence; identical to SEQ ID NO: 2037
  synthetic

SEQ ID NO: 29547 - DNA, 203 bp, Artificial sequence; identical to SEQ ID NO: 2041
  synthetic

SEQ ID NO: 29548 - DNA, 203 bp, Artificial sequence; identical to SEQ ID NO: 2042
  synthetic

SEQ ID NO: 29549 - DNA, 203 bp, Artificial sequence; identical to SEQ ID NO: 2057
  synthetic

SEQ ID NO: 29550 - DNA, 203 bp, Artificial sequence; identical to SEQ ID NO: 2059
  synthetic

SEQ ID NO: 29551 - DNA, 203 bp, Artificial sequence; identical to SEQ ID NO: 2063
  synthetic

SEQ ID NO: 29552 - DNA, 203 bp, Artificial sequence; identical to SEQ ID NO: 2066
  synthetic

SEQ ID NO: 29553 - DNA, 203 bp, Artificial sequence; identical to SEQ ID NO: 2071
  synthetic

SEQ ID NO: 29554 - DNA, 203 bp, Artificial sequence; identical to SEQ ID NO: 2072
  synthetic

SEQ ID NO: 29555 - DNA, 203 bp, Artificial sequence; identical to SEQ ID NO: 2077
  synthetic

SEQ ID NO: 29556 - DNA, 203 bp, Artificial sequence; identical to SEQ ID NO: 2080
  synthetic

SEQ ID NO: 29557 - DNA, 203 bp, Artificial sequence; identical to SEQ ID NO: 2082
  synthetic

SEQ ID NO: 29558 - DNA, 203 bp, Artificial sequence; identical to SEQ ID NO: 2083
  synthetic

SEQ ID NO: 29559 - DNA, 203 bp, Artificial sequence; identical to SEQ ID NO: 2085
  synthetic

SEQ ID NO: 29560 - DNA, 203 bp, Artificial sequence; identical to SEQ ID NO: 2086
  synthetic

SEQ ID NO: 29561 - DNA, 203 bp, Artificial sequence; identical to SEQ ID NO: 2087
  synthetic

SEQ ID NO: 29562 - DNA, 203 bp, Artificial sequence; identical to SEQ ID NO: 2088
  synthetic

SEQ ID NO: 29563 - DNA, 203 bp, Artificial sequence; identical to SEQ ID NO: 2089
  synthetic

SEQ ID NO: 29564 - DNA, 203 bp, Artificial sequence; identical to SEQ ID NO: 2090
  synthetic

SEQ ID NO: 29565 - DNA, 203 bp, Artificial sequence; identical to SEQ ID NO: 2091
  synthetic

SEQ ID NO: 29566 - DNA, 203 bp, Artificial sequence; identical to SEQ ID NO: 2092
  synthetic

SEQ ID NO: 29567 - DNA, 203 bp, Artificial sequence; identical to SEQ ID NO: 2093
  synthetic

SEQ ID NO: 29568 - DNA, 203 bp, Artificial sequence; identical to SEQ ID NO: 2102
  synthetic

SEQ ID NO: 29569 - DNA, 203 bp, Artificial sequence; identical to SEQ ID NO: 2107
  synthetic

SEQ ID NO: 29570 - DNA, 203 bp, Artificial sequence; identical to SEQ ID NO: 2110
  synthetic

SEQ ID NO: 29571 - DNA, 203 bp, Artificial sequence; identical to SEQ ID NO: 2115
  synthetic

SEQ ID NO: 29572 - DNA, 203 bp, Artificial sequence; identical to SEQ ID NO: 2116
  synthetic

SEQ ID NO: 29573 - DNA, 203 bp, Artificial sequence; identical to SEQ ID NO: 2121
  synthetic

SEQ ID NO: 29574 - DNA, 203 bp, Artificial sequence; identical to SEQ ID NO: 2124
  synthetic

SEQ ID NO: 29575 - DNA, 203 bp, Artificial sequence; identical to SEQ ID NO: 2127
  synthetic

SEQ ID NO: 29576 - DNA, 203 bp, Artificial sequence; identical to SEQ ID NO: 2129
  synthetic

SEQ ID NO: 29577 - DNA, 203 bp, Artificial sequence; identical to SEQ ID NO: 2130
  synthetic

SEQ ID NO: 29578 - DNA, 203 bp, Artificial sequence; identical to SEQ ID NO: 2136
  synthetic

SEQ ID NO: 29579 - DNA, 203 bp, Artificial sequence; identical to SEQ ID NO: 2141
  synthetic

SEQ ID NO: 29580 - DNA, 203 bp, Artificial sequence; identical to SEQ ID NO: 2143
  synthetic

SEQ ID NO: 29581 - DNA, 203 bp, Artificial sequence; identical to SEQ ID NO: 2172
  synthetic

SEQ ID NO: 29582 - DNA, 203 bp, Artificial sequence; identical to SEQ ID NO: 2175
  synthetic

SEQ ID NO: 29583 - DNA, 203 bp, Artificial sequence; identical to SEQ ID NO: 2176
  synthetic

SEQ ID NO: 29584 - DNA, 203 bp, Artificial sequence; identical to SEQ ID NO: 2177
  synthetic

SEQ ID NO: 29585 - DNA, 203 bp, Artificial sequence; identical to SEQ ID NO: 2178
  synthetic

SEQ ID NO: 29586 - DNA, 203 bp, Artificial sequence; identical to SEQ ID NO: 2179
  synthetic

SEQ ID NO: 29587 - DNA, 203 bp, Artificial sequence; identical to SEQ ID NO: 2180
  synthetic

SEQ ID NO: 29588 - DNA, 203 bp, Artificial sequence; identical to SEQ ID NO: 2181
  synthetic

SEQ ID NO: 29589 - DNA, 203 bp, Artificial sequence; identical to SEQ ID NO: 2182
  synthetic

SEQ ID NO: 29590 - DNA, 203 bp, Artificial sequence; identical to SEQ ID NO: 2183
  synthetic

SEQ ID NO: 29591 - DNA, 203 bp, Artificial sequence; identical to SEQ ID NO: 2184
  synthetic

SEQ ID NO: 29592 - DNA, 203 bp, Artificial sequence; identical to SEQ ID NO: 2185
  synthetic

SEQ ID NO: 29593 - DNA, 203 bp, Artificial sequence; identical to SEQ ID NO: 2186
  synthetic

SEQ ID NO: 29594 - DNA, 203 bp, Artificial sequence; identical to SEQ ID NO: 2187
  synthetic

SEQ ID NO: 29595 - DNA, 203 bp, Artificial sequence; identical to SEQ ID NO: 2190
  synthetic

SEQ ID NO: 29596 - DNA, 203 bp, Artificial sequence; identical to SEQ ID NO: 2192
  synthetic

SEQ ID NO: 29597 - DNA, 203 bp, Artificial sequence; identical to SEQ ID NO: 2199
  synthetic

SEQ ID NO: 29598 - DNA, 203 bp, Artificial sequence; identical to SEQ ID NO: 2202
  synthetic

SEQ ID NO: 29599 - DNA, 203 bp, Artificial sequence; identical to SEQ ID NO: 2205
  synthetic

SEQ ID NO: 29600 - DNA, 203 bp, Artificial sequence; identical to SEQ ID NO: 2206
  synthetic

SEQ ID NO: 29601 - DNA, 203 bp, Artificial sequence; identical to SEQ ID NO: 2207
  synthetic

SEQ ID NO: 29602 - DNA, 203 bp, Artificial sequence; identical to SEQ ID NO: 2208
  synthetic

SEQ ID NO: 29603 - DNA, 203 bp, Artificial sequence; identical to SEQ ID NO: 2210
  synthetic

SEQ ID NO: 29604 - DNA, 203 bp, Artificial sequence; identical to SEQ ID NO: 2211
  synthetic

SEQ ID NO: 29605 - DNA, 203 bp, Artificial sequence; identical to SEQ ID NO: 2212
  synthetic

SEQ ID NO: 29606 - DNA, 203 bp, Artificial sequence; identical to SEQ ID NO: 2213
  synthetic

SEQ ID NO: 29607 - DNA, 203 bp, Artificial sequence; identical to SEQ ID NO: 2214
  synthetic

SEQ ID NO: 29608 - DNA, 203 bp, Artificial sequence; identical to SEQ ID NO: 2224
  synthetic

SEQ ID NO: 29609 - DNA, 203 bp, Artificial sequence; identical to SEQ ID NO: 2229
  synthetic

SEQ ID NO: 29610 - DNA, 203 bp, Artificial sequence; identical to SEQ ID NO: 2233
  synthetic

SEQ ID NO: 29611 - DNA, 203 bp, Artificial sequence; identical to SEQ ID NO: 2240
  synthetic

SEQ ID NO: 29612 - DNA, 203 bp, Artificial sequence; identical to SEQ ID NO: 2245
  synthetic

SEQ ID NO: 29613 - DNA, 203 bp, Artificial sequence; identical to SEQ ID NO: 2246
  synthetic

SEQ ID NO: 29614 - DNA, 203 bp, Artificial sequence; identical to SEQ ID NO: 2247
  synthetic

SEQ ID NO: 29615 - DNA, 203 bp, Artificial sequence; identical to SEQ ID NO: 2248
  synthetic

SEQ ID NO: 29616 - DNA, 203 bp, Artificial sequence; identical to SEQ ID NO: 2256
  synthetic

SEQ ID NO: 29617 - DNA, 203 bp, Artificial sequence; identical to SEQ ID NO: 2259
  synthetic

SEQ ID NO: 29618 - DNA, 203 bp, Artificial sequence; identical to SEQ ID NO: 2275
  synthetic

SEQ ID NO: 29619 - DNA, 203 bp, Artificial sequence; identical to SEQ ID NO: 2276
  synthetic

SEQ ID NO: 29620 - DNA, 203 bp, Artificial sequence; identical to SEQ ID NO: 2279
  synthetic

SEQ ID NO: 29621 - DNA, 203 bp, Artificial sequence; identical to SEQ ID NO: 2281
  synthetic

SEQ ID NO: 29622 - DNA, 203 bp, Artificial sequence; identical to SEQ ID NO: 2289
  synthetic

SEQ ID NO: 29623 - DNA, 203 bp, Artificial sequence; identical to SEQ ID NO: 2302
  synthetic

SEQ ID NO: 29624 - DNA, 203 bp, Artificial sequence; identical to SEQ ID NO: 2308
  synthetic

SEQ ID NO: 29625 - DNA, 203 bp, Artificial sequence; identical to SEQ ID NO: 2309
  synthetic

SEQ ID NO: 29626 - DNA, 203 bp, Artificial sequence; identical to SEQ ID NO: 2313
  synthetic

SEQ ID NO: 29627 - DNA, 203 bp, Artificial sequence; identical to SEQ ID NO: 2314
  synthetic

SEQ ID NO: 29628 - DNA, 203 bp, Artificial sequence; identical to SEQ ID NO: 2320
  synthetic

SEQ ID NO: 29629 - DNA, 203 bp, Artificial sequence; identical to SEQ ID NO: 2321
  synthetic

SEQ ID NO: 29630 - DNA, 203 bp, Artificial sequence; identical to SEQ ID NO: 2323
  synthetic

SEQ ID NO: 29631 - DNA, 203 bp, Artificial sequence; identical to SEQ ID NO: 2326
  synthetic

SEQ ID NO: 29632 - DNA, 203 bp, Artificial sequence; identical to SEQ ID NO: 2327
  synthetic

SEQ ID NO: 29633 - DNA, 203 bp, Artificial sequence; identical to SEQ ID NO: 2328
  synthetic

SEQ ID NO: 29634 - DNA, 203 bp, Artificial sequence; identical to SEQ ID NO: 2330
  synthetic

SEQ ID NO: 29635 - DNA, 203 bp, Artificial sequence; identical to SEQ ID NO: 2335
  synthetic

SEQ ID NO: 29636 - DNA, 203 bp, Artificial sequence; identical to SEQ ID NO: 2337
  synthetic

SEQ ID NO: 29637 - DNA, 203 bp, Artificial sequence; identical to SEQ ID NO: 2338
  synthetic

SEQ ID NO: 29638 - DNA, 203 bp, Artificial sequence; identical to SEQ ID NO: 2339
  synthetic

SEQ ID NO: 29639 - DNA, 203 bp, Artificial sequence; identical to SEQ ID NO: 2340
  synthetic

SEQ ID NO: 29640 - DNA, 203 bp, Artificial sequence; identical to SEQ ID NO: 2341
  synthetic

SEQ ID NO: 29641 - DNA, 203 bp, Artificial sequence; identical to SEQ ID NO: 2349
  synthetic

SEQ ID NO: 29642 - DNA, 203 bp, Artificial sequence; identical to SEQ ID NO: 2357
  synthetic

SEQ ID NO: 29643 - DNA, 203 bp, Artificial sequence; identical to SEQ ID NO: 2358
  synthetic

SEQ ID NO: 29644 - DNA, 203 bp, Artificial sequence; identical to SEQ ID NO: 2359
  synthetic

SEQ ID NO: 29645 - DNA, 203 bp, Artificial sequence; identical to SEQ ID NO: 2360
  synthetic

SEQ ID NO: 29646 - DNA, 203 bp, Artificial sequence; identical to SEQ ID NO: 2365
  synthetic

SEQ ID NO: 29647 - DNA, 203 bp, Artificial sequence; identical to SEQ ID NO: 2366
  synthetic

SEQ ID NO: 29648 - DNA, 203 bp, Artificial sequence; identical to SEQ ID NO: 2367
  synthetic

SEQ ID NO: 29649 - DNA, 203 bp, Artificial sequence; identical to SEQ ID NO: 2371
  synthetic

SEQ ID NO: 29650 - DNA, 203 bp, Artificial sequence; identical to SEQ ID NO: 2372
  synthetic

SEQ ID NO: 29651 - DNA, 203 bp, Artificial sequence; identical to SEQ ID NO: 2373
  synthetic

SEQ ID NO: 29652 - DNA, 203 bp, Artificial sequence; identical to SEQ ID NO: 2378
  synthetic

SEQ ID NO: 29653 - DNA, 203 bp, Artificial sequence; identical to SEQ ID NO: 2379
  synthetic

SEQ ID NO: 29654 - DNA, 203 bp, Artificial sequence; identical to SEQ ID NO: 2383
  synthetic

SEQ ID NO: 29655 - DNA, 203 bp, Artificial sequence; identical to SEQ ID NO: 2390
  synthetic

SEQ ID NO: 29656 - DNA, 203 bp, Artificial sequence; identical to SEQ ID NO: 2391
  synthetic

SEQ ID NO: 29657 - DNA, 203 bp, Artificial sequence; identical to SEQ ID NO: 2392
  synthetic

SEQ ID NO: 29658 - DNA, 203 bp, Artificial sequence; identical to SEQ ID NO: 2398
  synthetic

SEQ ID NO: 29659 - DNA, 203 bp, Artificial sequence; identical to SEQ ID NO: 2427
  synthetic

SEQ ID NO: 29660 - DNA, 203 bp, Artificial sequence; identical to SEQ ID NO: 2431
  synthetic

SEQ ID NO: 29661 - DNA, 203 bp, Artificial sequence; identical to SEQ ID NO: 2435
  synthetic

SEQ ID NO: 29662 - DNA, 203 bp, Artificial sequence; identical to SEQ ID NO: 2437
  synthetic

SEQ ID NO: 29663 - DNA, 203 bp, Artificial sequence; identical to SEQ ID NO: 2438
  synthetic

SEQ ID NO: 29664 - DNA, 203 bp, Artificial sequence; identical to SEQ ID NO: 2446
  synthetic

SEQ ID NO: 29665 - DNA, 203 bp, Artificial sequence; identical to SEQ ID NO: 2457
  synthetic

SEQ ID NO: 29666 - DNA, 203 bp, Artificial sequence; identical to SEQ ID NO: 2467
  synthetic

SEQ ID NO: 29667 - DNA, 203 bp, Artificial sequence; identical to SEQ ID NO: 2473
  synthetic

SEQ ID NO: 29668 - DNA, 203 bp, Artificial sequence; identical to SEQ ID NO: 2477
  synthetic

SEQ ID NO: 29669 - DNA, 203 bp, Artificial sequence; identical to SEQ ID NO: 2478
  synthetic

SEQ ID NO: 29670 - DNA, 203 bp, Artificial sequence; identical to SEQ ID NO: 2479
  synthetic

SEQ ID NO: 29671 - DNA, 203 bp, Artificial sequence; identical to SEQ ID NO: 2480
  synthetic

SEQ ID NO: 29672 - DNA, 203 bp, Artificial sequence; identical to SEQ ID NO: 2481
  synthetic

SEQ ID NO: 29673 - DNA, 203 bp, Artificial sequence; identical to SEQ ID NO: 2482
  synthetic

SEQ ID NO: 29674 - DNA, 203 bp, Artificial sequence; identical to SEQ ID NO: 2483
  synthetic

SEQ ID NO: 29675 - DNA, 203 bp, Artificial sequence; identical to SEQ ID NO: 2484
  synthetic

SEQ ID NO: 29676 - DNA, 203 bp, Artificial sequence; identical to SEQ ID NO: 2485
  synthetic

SEQ ID NO: 29677 - DNA, 203 bp, Artificial sequence; identical to SEQ ID NO: 2487
  synthetic

SEQ ID NO: 29678 - DNA, 203 bp, Artificial sequence; identical to SEQ ID NO: 2488
  synthetic

SEQ ID NO: 29679 - DNA, 203 bp, Artificial sequence; identical to SEQ ID NO: 2489
  synthetic

SEQ ID NO: 29680 - DNA, 203 bp, Artificial sequence; identical to SEQ ID NO: 2490
  synthetic

SEQ ID NO: 29681 - DNA, 203 bp, Artificial sequence; identical to SEQ ID NO: 2491
  synthetic

SEQ ID NO: 29682 - DNA, 203 bp, Artificial sequence; identical to SEQ ID NO: 2494
  synthetic

SEQ ID NO: 29683 - DNA, 203 bp, Artificial sequence; identical to SEQ ID NO: 2495
  synthetic

SEQ ID NO: 29684 - DNA, 203 bp, Artificial sequence; identical to SEQ ID NO: 2500
  synthetic

SEQ ID NO: 29685 - DNA, 203 bp, Artificial sequence; identical to SEQ ID NO: 2503
  synthetic

SEQ ID NO: 29686 - DNA, 203 bp, Artificial sequence; identical to SEQ ID NO: 2505
  synthetic

SEQ ID NO: 29687 - DNA, 203 bp, Artificial sequence; identical to SEQ ID NO: 2507
  synthetic

SEQ ID NO: 29688 - DNA, 203 bp, Artificial sequence; identical to SEQ ID NO: 2508
  synthetic

SEQ ID NO: 29689 - DNA, 203 bp, Artificial sequence; identical to SEQ ID NO: 2509
  synthetic

SEQ ID NO: 29690 - DNA, 203 bp, Artificial sequence; identical to SEQ ID NO: 2510
  synthetic

SEQ ID NO: 29691 - DNA, 203 bp, Artificial sequence; identical to SEQ ID NO: 2511
  synthetic

SEQ ID NO: 29692 - DNA, 203 bp, Artificial sequence; identical to SEQ ID NO: 2512
  synthetic

SEQ ID NO: 29693 - DNA, 203 bp, Artificial sequence; identical to SEQ ID NO: 2514
  synthetic

SEQ ID NO: 29694 - DNA, 203 bp, Artificial sequence; identical to SEQ ID NO: 2530
  synthetic

SEQ ID NO: 29695 - DNA, 203 bp, Artificial sequence; identical to SEQ ID NO: 2531
  synthetic

SEQ ID NO: 29696 - DNA, 203 bp, Artificial sequence; identical to SEQ ID NO: 2532
  synthetic

SEQ ID NO: 29697 - DNA, 203 bp, Artificial sequence; identical to SEQ ID NO: 2533
  synthetic

SEQ ID NO: 29698 - DNA, 203 bp, Artificial sequence; identical to SEQ ID NO: 2534
  synthetic

SEQ ID NO: 29699 - DNA, 203 bp, Artificial sequence; identical to SEQ ID NO: 2546
  synthetic

SEQ ID NO: 29700 - DNA, 203 bp, Artificial sequence; identical to SEQ ID NO: 2551
  synthetic

SEQ ID NO: 29701 - DNA, 203 bp, Artificial sequence; identical to SEQ ID NO: 2556
  synthetic

SEQ ID NO: 29702 - DNA, 203 bp, Artificial sequence; identical to SEQ ID NO: 2557
  synthetic

SEQ ID NO: 29703 - DNA, 203 bp, Artificial sequence; identical to SEQ ID NO: 2558
  synthetic

SEQ ID NO: 29704 - DNA, 203 bp, Artificial sequence; identical to SEQ ID NO: 2559
  synthetic

SEQ ID NO: 29705 - DNA, 203 bp, Artificial sequence; identical to SEQ ID NO: 2560
  synthetic

SEQ ID NO: 29706 - DNA, 203 bp, Artificial sequence; identical to SEQ ID NO: 2561
  synthetic

SEQ ID NO: 29707 - DNA, 203 bp, Artificial sequence; identical to SEQ ID NO: 2567
  synthetic

SEQ ID NO: 29708 - DNA, 203 bp, Artificial sequence; identical to SEQ ID NO: 2570
  synthetic

SEQ ID NO: 29709 - DNA, 203 bp, Artificial sequence; identical to SEQ ID NO: 2577
  synthetic

SEQ ID NO: 29710 - DNA, 203 bp, Artificial sequence; identical to SEQ ID NO: 2596
  synthetic

SEQ ID NO: 29711 - DNA, 203 bp, Artificial sequence; identical to SEQ ID NO: 2601
  synthetic

SEQ ID NO: 29712 - DNA, 203 bp, Artificial sequence; identical to SEQ ID NO: 2612
  synthetic

SEQ ID NO: 29713 - DNA, 203 bp, Artificial sequence; identical to SEQ ID NO: 2616
  synthetic

SEQ ID NO: 29714 - DNA, 203 bp, Artificial sequence; identical to SEQ ID NO: 2618
  synthetic

SEQ ID NO: 29715 - DNA, 203 bp, Artificial sequence; identical to SEQ ID NO: 2619
  synthetic

SEQ ID NO: 29716 - DNA, 203 bp, Artificial sequence; identical to SEQ ID NO: 2620
  synthetic

SEQ ID NO: 29717 - DNA, 203 bp, Artificial sequence; identical to SEQ ID NO: 2623
  synthetic

SEQ ID NO: 29718 - DNA, 203 bp, Artificial sequence; identical to SEQ ID NO: 2626
  synthetic

SEQ ID NO: 29719 - DNA, 203 bp, Artificial sequence; identical to SEQ ID NO: 2634
  synthetic

SEQ ID NO: 29720 - DNA, 203 bp, Artificial sequence; identical to SEQ ID NO: 2636
  synthetic

SEQ ID NO: 29721 - DNA, 203 bp, Artificial sequence; identical to SEQ ID NO: 2648
  synthetic

SEQ ID NO: 29722 - DNA, 203 bp, Artificial sequence; identical to SEQ ID NO: 2654
  synthetic

SEQ ID NO: 29723 - DNA, 203 bp, Artificial sequence; identical to SEQ ID NO: 2658
  synthetic

SEQ ID NO: 29724 - DNA, 203 bp, Artificial sequence; identical to SEQ ID NO: 2659
  synthetic

SEQ ID NO: 29725 - DNA, 203 bp, Artificial sequence; identical to SEQ ID NO: 2660
  synthetic

SEQ ID NO: 29726 - DNA, 203 bp, Artificial sequence; identical to SEQ ID NO: 2666
  synthetic

SEQ ID NO: 29727 - DNA, 203 bp, Artificial sequence; identical to SEQ ID NO: 2670
  synthetic

SEQ ID NO: 29728 - DNA, 203 bp, Artificial sequence; identical to SEQ ID NO: 2671
  synthetic

SEQ ID NO: 29729 - DNA, 203 bp, Artificial sequence; identical to SEQ ID NO: 2680
  synthetic

SEQ ID NO: 29730 - DNA, 203 bp, Artificial sequence; identical to SEQ ID NO: 2681
  synthetic

SEQ ID NO: 29731 - DNA, 203 bp, Artificial sequence; identical to SEQ ID NO: 2682
  synthetic

SEQ ID NO: 29732 - DNA, 203 bp, Artificial sequence; identical to SEQ ID NO: 2686
  synthetic

SEQ ID NO: 29733 - DNA, 203 bp, Artificial sequence; identical to SEQ ID NO: 2694
  synthetic

SEQ ID NO: 29734 - DNA, 203 bp, Artificial sequence; identical to SEQ ID NO: 2704
  synthetic

SEQ ID NO: 29735 - DNA, 203 bp, Artificial sequence; identical to SEQ ID NO: 2710
  synthetic

SEQ ID NO: 29736 - DNA, 203 bp, Artificial sequence; identical to SEQ ID NO: 2716
  synthetic

SEQ ID NO: 29737 - DNA, 203 bp, Artificial sequence; identical to SEQ ID NO: 2732
  synthetic

SEQ ID NO: 29738 - DNA, 203 bp, Artificial sequence; identical to SEQ ID NO: 2733
  synthetic

SEQ ID NO: 29739 - DNA, 203 bp, Artificial sequence; identical to SEQ ID NO: 2734
  synthetic

SEQ ID NO: 29740 - DNA, 203 bp, Artificial sequence; identical to SEQ ID NO: 2735
  synthetic

SEQ ID NO: 29741 - DNA, 203 bp, Artificial sequence; identical to SEQ ID NO: 2736
  synthetic

SEQ ID NO: 29742 - DNA, 203 bp, Artificial sequence; identical to SEQ ID NO: 2737
  synthetic

SEQ ID NO: 29743 - DNA, 203 bp, Artificial sequence; identical to SEQ ID NO: 2738
  synthetic

SEQ ID NO: 29744 - DNA, 203 bp, Artificial sequence; identical to SEQ ID NO: 2739
  synthetic

SEQ ID NO: 29745 - DNA, 203 bp, Artificial sequence; identical to SEQ ID NO: 2740
  synthetic

SEQ ID NO: 29746 - DNA, 203 bp, Artificial sequence; identical to SEQ ID NO: 2741
  synthetic

SEQ ID NO: 29747 - DNA, 203 bp, Artificial sequence; identical to SEQ ID NO: 2742
  synthetic

SEQ ID NO: 29748 - DNA, 203 bp, Artificial sequence; identical to SEQ ID NO: 2743
  synthetic

SEQ ID NO: 29749 - DNA, 203 bp, Artificial sequence; identical to SEQ ID NO: 2752
  synthetic

SEQ ID NO: 29750 - DNA, 203 bp, Artificial sequence; identical to SEQ ID NO: 2754
  synthetic

SEQ ID NO: 29751 - DNA, 203 bp, Artificial sequence; identical to SEQ ID NO: 2757
  synthetic

SEQ ID NO: 29752 - DNA, 203 bp, Artificial sequence; identical to SEQ ID NO: 2763
  synthetic

SEQ ID NO: 29753 - DNA, 203 bp, Artificial sequence; identical to SEQ ID NO: 2770
  synthetic

SEQ ID NO: 29754 - DNA, 203 bp, Artificial sequence; identical to SEQ ID NO: 2771
  synthetic

SEQ ID NO: 29755 - DNA, 203 bp, Artificial sequence; identical to SEQ ID NO: 2772
  synthetic

SEQ ID NO: 29756 - DNA, 203 bp, Artificial sequence; identical to SEQ ID NO: 2773
  synthetic

SEQ ID NO: 29757 - DNA, 203 bp, Artificial sequence; identical to SEQ ID NO: 2774
  synthetic

SEQ ID NO: 29758 - DNA, 203 bp, Artificial sequence; identical to SEQ ID NO: 2775
  synthetic

SEQ ID NO: 29759 - DNA, 203 bp, Artificial sequence; identical to SEQ ID NO: 2776
  synthetic

SEQ ID NO: 29760 - DNA, 203 bp, Artificial sequence; identical to SEQ ID NO: 2777
  synthetic

SEQ ID NO: 29761 - DNA, 203 bp, Artificial sequence; identical to SEQ ID NO: 2779
  synthetic

SEQ ID NO: 29762 - DNA, 203 bp, Artificial sequence; identical to SEQ ID NO: 2780
  synthetic

SEQ ID NO: 29763 - DNA, 203 bp, Artificial sequence; identical to SEQ ID NO: 2781
  synthetic

SEQ ID NO: 29764 - DNA, 203 bp, Artificial sequence; identical to SEQ ID NO: 2782
  synthetic

SEQ ID NO: 29765 - DNA, 203 bp, Artificial sequence; identical to SEQ ID NO: 2783
  synthetic

SEQ ID NO: 29766 - DNA, 203 bp, Artificial sequence; identical to SEQ ID NO: 2784
  synthetic

SEQ ID NO: 29767 - DNA, 203 bp, Artificial sequence; identical to SEQ ID NO: 2785
  synthetic

SEQ ID NO: 29768 - DNA, 203 bp, Artificial sequence; identical to SEQ ID NO: 2787
  synthetic

SEQ ID NO: 29769 - DNA, 203 bp, Artificial sequence; identical to SEQ ID NO: 2788
  synthetic

SEQ ID NO: 29770 - DNA, 203 bp, Artificial sequence; identical to SEQ ID NO: 2789
  synthetic

SEQ ID NO: 29771 - DNA, 203 bp, Artificial sequence; identical to SEQ ID NO: 2793
  synthetic

SEQ ID NO: 29772 - DNA, 203 bp, Artificial sequence; identical to SEQ ID NO: 2794
  synthetic

SEQ ID NO: 29773 - DNA, 203 bp, Artificial sequence; identical to SEQ ID NO: 2795
  synthetic

SEQ ID NO: 29774 - DNA, 203 bp, Artificial sequence; identical to SEQ ID NO: 2796
  synthetic

SEQ ID NO: 29775 - DNA, 203 bp, Artificial sequence; identical to SEQ ID NO: 2797
  synthetic

SEQ ID NO: 29776 - DNA, 203 bp, Artificial sequence; identical to SEQ ID NO: 2798
  synthetic

SEQ ID NO: 29777 - DNA, 203 bp, Artificial sequence; identical to SEQ ID NO: 2799
  synthetic

SEQ ID NO: 29778 - DNA, 203 bp, Artificial sequence; identical to SEQ ID NO: 2800
  synthetic

SEQ ID NO: 29779 - DNA, 203 bp, Artificial sequence; identical to SEQ ID NO: 2801
  synthetic

SEQ ID NO: 29780 - DNA, 203 bp, Artificial sequence; identical to SEQ ID NO: 2802
  synthetic

SEQ ID NO: 29781 - DNA, 203 bp, Artificial sequence; identical to SEQ ID NO: 2803
  synthetic

SEQ ID NO: 29782 - DNA, 203 bp, Artificial sequence; identical to SEQ ID NO: 2804
  synthetic

SEQ ID NO: 29783 - DNA, 203 bp, Artificial sequence; identical to SEQ ID NO: 2805
  synthetic

SEQ ID NO: 29784 - DNA, 203 bp, Artificial sequence; identical to SEQ ID NO: 2806
  synthetic

SEQ ID NO: 29785 - DNA, 203 bp, Artificial sequence; identical to SEQ ID NO: 2807
  synthetic

SEQ ID NO: 29786 - DNA, 203 bp, Artificial sequence; identical to SEQ ID NO: 2808
  synthetic

SEQ ID NO: 29787 - DNA, 203 bp, Artificial sequence; identical to SEQ ID NO: 2809
  synthetic

SEQ ID NO: 29788 - DNA, 203 bp, Artificial sequence; identical to SEQ ID NO: 2810
  synthetic

SEQ ID NO: 29789 - DNA, 203 bp, Artificial sequence; identical to SEQ ID NO: 2811
  synthetic

SEQ ID NO: 29790 - DNA, 203 bp, Artificial sequence; identical to SEQ ID NO: 2812
  synthetic

SEQ ID NO: 29791 - DNA, 203 bp, Artificial sequence; identical to SEQ ID NO: 2813
  synthetic

SEQ ID NO: 29792 - DNA, 203 bp, Artificial sequence; identical to SEQ ID NO: 2814
  synthetic

SEQ ID NO: 29793 - DNA, 203 bp, Artificial sequence; identical to SEQ ID NO: 2815
  synthetic

SEQ ID NO: 29794 - DNA, 203 bp, Artificial sequence; identical to SEQ ID NO: 2822
  synthetic

SEQ ID NO: 29795 - DNA, 203 bp, Artificial sequence; identical to SEQ ID NO: 2841
  synthetic

SEQ ID NO: 29796 - DNA, 203 bp, Artificial sequence; identical to SEQ ID NO: 2852
  synthetic

SEQ ID NO: 29797 - DNA, 203 bp, Artificial sequence; identical to SEQ ID NO: 2853
  synthetic

SEQ ID NO: 29798 - DNA, 203 bp, Artificial sequence; identical to SEQ ID NO: 2857
  synthetic

SEQ ID NO: 29799 - DNA, 203 bp, Artificial sequence; identical to SEQ ID NO: 2865
  synthetic

SEQ ID NO: 29800 - DNA, 203 bp, Artificial sequence; identical to SEQ ID NO: 2872
  synthetic

SEQ ID NO: 29801 - DNA, 203 bp, Artificial sequence; identical to SEQ ID NO: 2873
  synthetic

SEQ ID NO: 29802 - DNA, 203 bp, Artificial sequence; identical to SEQ ID NO: 2874
  synthetic

SEQ ID NO: 29803 - DNA, 203 bp, Artificial sequence; identical to SEQ ID NO: 2875
  synthetic

SEQ ID NO: 29804 - DNA, 203 bp, Artificial sequence; identical to SEQ ID NO: 2876
  synthetic

SEQ ID NO: 29805 - DNA, 203 bp, Artificial sequence; identical to SEQ ID NO: 2878
  synthetic

SEQ ID NO: 29806 - DNA, 203 bp, Artificial sequence; identical to SEQ ID NO: 2888
  synthetic

SEQ ID NO: 29807 - DNA, 203 bp, Artificial sequence; identical to SEQ ID NO: 2890
  synthetic

SEQ ID NO: 29808 - DNA, 203 bp, Artificial sequence; identical to SEQ ID NO: 2891
  synthetic

SEQ ID NO: 29809 - DNA, 203 bp, Artificial sequence; identical to SEQ ID NO: 2892
  synthetic

SEQ ID NO: 29810 - DNA, 203 bp, Artificial sequence; identical to SEQ ID NO: 2893
  synthetic

SEQ ID NO: 29811 - DNA, 203 bp, Artificial sequence; identical to SEQ ID NO: 2894
  synthetic

SEQ ID NO: 29812 - DNA, 203 bp, Artificial sequence; identical to SEQ ID NO: 2895
  synthetic

SEQ ID NO: 29813 - DNA, 203 bp, Artificial sequence; identical to SEQ ID NO: 2901
  synthetic

SEQ ID NO: 29814 - DNA, 203 bp, Artificial sequence; identical to SEQ ID NO: 2908
  synthetic

SEQ ID NO: 29815 - DNA, 203 bp, Artificial sequence; identical to SEQ ID NO: 2914
  synthetic

SEQ ID NO: 29816 - DNA, 203 bp, Artificial sequence; identical to SEQ ID NO: 2915
  synthetic

SEQ ID NO: 29817 - DNA, 203 bp, Artificial sequence; identical to SEQ ID NO: 2920
  synthetic

SEQ ID NO: 29818 - DNA, 203 bp, Artificial sequence; identical to SEQ ID NO: 2924
  synthetic

SEQ ID NO: 29819 - DNA, 203 bp, Artificial sequence; identical to SEQ ID NO: 2937
  synthetic

SEQ ID NO: 29820 - DNA, 203 bp, Artificial sequence; identical to SEQ ID NO: 2938
  synthetic

SEQ ID NO: 29821 - DNA, 203 bp, Artificial sequence; identical to SEQ ID NO: 2950
  synthetic

SEQ ID NO: 29822 - DNA, 203 bp, Artificial sequence; identical to SEQ ID NO: 2951
  synthetic

SEQ ID NO: 29823 - DNA, 203 bp, Artificial sequence; identical to SEQ ID NO: 2952
  synthetic

SEQ ID NO: 29824 - DNA, 203 bp, Artificial sequence; identical to SEQ ID NO: 2953
  synthetic

SEQ ID NO: 29825 - DNA, 203 bp, Artificial sequence; identical to SEQ ID NO: 2959
  synthetic

SEQ ID NO: 29826 - DNA, 203 bp, Artificial sequence; identical to SEQ ID NO: 2962
  synthetic

SEQ ID NO: 29827 - DNA, 203 bp, Artificial sequence; identical to SEQ ID NO: 2965
  synthetic

SEQ ID NO: 29828 - DNA, 203 bp, Artificial sequence; identical to SEQ ID NO: 2972
  synthetic

SEQ ID NO: 29829 - DNA, 203 bp, Artificial sequence; identical to SEQ ID NO: 2973
  synthetic

SEQ ID NO: 29830 - DNA, 203 bp, Artificial sequence; identical to SEQ ID NO: 2974
  synthetic

SEQ ID NO: 29831 - DNA, 203 bp, Artificial sequence; identical to SEQ ID NO: 2984
  synthetic

SEQ ID NO: 29832 - DNA, 203 bp, Artificial sequence; identical to SEQ ID NO: 2985
  synthetic

SEQ ID NO: 29833 - DNA, 203 bp, Artificial sequence; identical to SEQ ID NO: 2986
  synthetic

SEQ ID NO: 29834 - DNA, 203 bp, Artificial sequence; identical to SEQ ID NO: 2990
  synthetic

SEQ ID NO: 29835 - DNA, 203 bp, Artificial sequence; identical to SEQ ID NO: 3013
  synthetic

SEQ ID NO: 29836 - DNA, 203 bp, Artificial sequence; identical to SEQ ID NO: 3016
  synthetic

SEQ ID NO: 29837 - DNA, 203 bp, Artificial sequence; identical to SEQ ID NO: 3019
  synthetic

SEQ ID NO: 29838 - DNA, 203 bp, Artificial sequence; identical to SEQ ID NO: 3020
  synthetic

SEQ ID NO: 29839 - DNA, 203 bp, Artificial sequence; identical to SEQ ID NO: 3023
  synthetic

SEQ ID NO: 29840 - DNA, 203 bp, Artificial sequence; identical to SEQ ID NO: 3024
  synthetic

SEQ ID NO: 29841 - DNA, 203 bp, Artificial sequence; identical to SEQ ID NO: 3027
  synthetic

SEQ ID NO: 29842 - DNA, 203 bp, Artificial sequence; identical to SEQ ID NO: 3028
  synthetic

SEQ ID NO: 29843 - DNA, 203 bp, Artificial sequence; identical to SEQ ID NO: 3036
  synthetic

SEQ ID NO: 29844 - DNA, 203 bp, Artificial sequence; identical to SEQ ID NO: 3037
  synthetic

SEQ ID NO: 29845 - DNA, 203 bp, Artificial sequence; identical to SEQ ID NO: 3045
  synthetic

SEQ ID NO: 29846 - DNA, 203 bp, Artificial sequence; identical to SEQ ID NO: 3048
  synthetic

SEQ ID NO: 29847 - DNA, 203 bp, Artificial sequence; identical to SEQ ID NO: 3051
  synthetic

SEQ ID NO: 29848 - DNA, 203 bp, Artificial sequence; identical to SEQ ID NO: 3058
  synthetic

SEQ ID NO: 29849 - DNA, 203 bp, Artificial sequence; identical to SEQ ID NO: 3060
  synthetic

SEQ ID NO: 29850 - DNA, 203 bp, Artificial sequence; identical to SEQ ID NO: 3061
  synthetic

SEQ ID NO: 29851 - DNA, 203 bp, Artificial sequence; identical to SEQ ID NO: 3064
  synthetic

SEQ ID NO: 29852 - DNA, 203 bp, Artificial sequence; identical to SEQ ID NO: 3066
  synthetic

SEQ ID NO: 29853 - DNA, 203 bp, Artificial sequence; identical to SEQ ID NO: 3072
  synthetic

SEQ ID NO: 29854 - DNA, 203 bp, Artificial sequence; identical to SEQ ID NO: 3075
  synthetic

SEQ ID NO: 29855 - DNA, 203 bp, Artificial sequence; identical to SEQ ID NO: 3086
  synthetic

SEQ ID NO: 29856 - DNA, 203 bp, Artificial sequence; identical to SEQ ID NO: 3087
  synthetic

SEQ ID NO: 29857 - DNA, 203 bp, Artificial sequence; identical to SEQ ID NO: 3093
  synthetic

SEQ ID NO: 29858 - DNA, 203 bp, Artificial sequence; identical to SEQ ID NO: 3094
  synthetic

SEQ ID NO: 29859 - DNA, 203 bp, Artificial sequence; identical to SEQ ID NO: 3099
  synthetic

SEQ ID NO: 29860 - DNA, 203 bp, Artificial sequence; identical to SEQ ID NO: 3100
  synthetic

SEQ ID NO: 29861 - DNA, 203 bp, Artificial sequence; identical to SEQ ID NO: 3107
  synthetic

SEQ ID NO: 29862 - DNA, 203 bp, Artificial sequence; identical to SEQ ID NO: 3108
  synthetic

SEQ ID NO: 29863 - DNA, 203 bp, Artificial sequence; identical to SEQ ID NO: 3112
  synthetic

SEQ ID NO: 29864 - DNA, 203 bp, Artificial sequence; identical to SEQ ID NO: 3113
  synthetic

SEQ ID NO: 29865 - DNA, 203 bp, Artificial sequence; identical to SEQ ID NO: 3117
  synthetic

SEQ ID NO: 29866 - DNA, 203 bp, Artificial sequence; identical to SEQ ID NO: 3118
  synthetic

SEQ ID NO: 29867 - DNA, 203 bp, Artificial sequence; identical to SEQ ID NO: 3122
  synthetic

SEQ ID NO: 29868 - DNA, 203 bp, Artificial sequence; identical to SEQ ID NO: 3125
  synthetic

SEQ ID NO: 29869 - DNA, 203 bp, Artificial sequence; identical to SEQ ID NO: 3126
  synthetic

SEQ ID NO: 29870 - DNA, 203 bp, Artificial sequence; identical to SEQ ID NO: 3128
  synthetic

SEQ ID NO: 29871 - DNA, 203 bp, Artificial sequence; identical to SEQ ID NO: 3131
  synthetic

SEQ ID NO: 29872 - DNA, 203 bp, Artificial sequence; identical to SEQ ID NO: 3140
  synthetic

SEQ ID NO: 29873 - DNA, 203 bp, Artificial sequence; identical to SEQ ID NO: 3142
  synthetic

SEQ ID NO: 29874 - DNA, 203 bp, Artificial sequence; identical to SEQ ID NO: 3143
  synthetic

SEQ ID NO: 29875 - DNA, 203 bp, Artificial sequence; identical to SEQ ID NO: 3144
  synthetic

SEQ ID NO: 29876 - DNA, 203 bp, Artificial sequence; identical to SEQ ID NO: 3150
  synthetic

SEQ ID NO: 29877 - DNA, 203 bp, Artificial sequence; identical to SEQ ID NO: 3153
  synthetic

SEQ ID NO: 29878 - DNA, 203 bp, Artificial sequence; identical to SEQ ID NO: 3154
  synthetic

SEQ ID NO: 29879 - DNA, 203 bp, Artificial sequence; identical to SEQ ID NO: 3158
  synthetic

SEQ ID NO: 29880 - DNA, 203 bp, Artificial sequence; identical to SEQ ID NO: 3159
  synthetic

SEQ ID NO: 29881 - DNA, 203 bp, Artificial sequence; identical to SEQ ID NO: 3165
  synthetic

SEQ ID NO: 29882 - DNA, 203 bp, Artificial sequence; identical to SEQ ID NO: 3169
  synthetic

SEQ ID NO: 29883 - DNA, 203 bp, Artificial sequence; identical to SEQ ID NO: 3170
  synthetic

SEQ ID NO: 29884 - DNA, 203 bp, Artificial sequence; identical to SEQ ID NO: 3175
  synthetic

SEQ ID NO: 29885 - DNA, 203 bp, Artificial sequence; identical to SEQ ID NO: 3176
  synthetic

SEQ ID NO: 29886 - DNA, 203 bp, Artificial sequence; identical to SEQ ID NO: 3183
  synthetic

SEQ ID NO: 29887 - DNA, 203 bp, Artificial sequence; identical to SEQ ID NO: 3187
  synthetic

SEQ ID NO: 29888 - DNA, 203 bp, Artificial sequence; identical to SEQ ID NO: 3189
  synthetic

SEQ ID NO: 29889 - DNA, 203 bp, Artificial sequence; identical to SEQ ID NO: 3200
  synthetic

SEQ ID NO: 29890 - DNA, 203 bp, Artificial sequence; identical to SEQ ID NO: 3205
  synthetic

SEQ ID NO: 29891 - DNA, 203 bp, Artificial sequence; identical to SEQ ID NO: 3206
  synthetic

SEQ ID NO: 29892 - DNA, 203 bp, Artificial sequence; identical to SEQ ID NO: 3208
  synthetic

SEQ ID NO: 29893 - DNA, 203 bp, Artificial sequence; identical to SEQ ID NO: 3214
  synthetic

SEQ ID NO: 29894 - DNA, 203 bp, Artificial sequence; identical to SEQ ID NO: 3220
  synthetic

SEQ ID NO: 29895 - DNA, 203 bp, Artificial sequence; identical to SEQ ID NO: 3221
  synthetic

SEQ ID NO: 29896 - DNA, 203 bp, Artificial sequence; identical to SEQ ID NO: 3225
  synthetic

SEQ ID NO: 29897 - DNA, 203 bp, Artificial sequence; identical to SEQ ID NO: 3231
  synthetic

SEQ ID NO: 29898 - DNA, 203 bp, Artificial sequence; identical to SEQ ID NO: 3232
  synthetic

SEQ ID NO: 29899 - DNA, 203 bp, Artificial sequence; identical to SEQ ID NO: 3234
  synthetic

SEQ ID NO: 29900 - DNA, 203 bp, Artificial sequence; identical to SEQ ID NO: 3237
  synthetic

SEQ ID NO: 29901 - DNA, 203 bp, Artificial sequence; identical to SEQ ID NO: 3238
  synthetic

SEQ ID NO: 29902 - DNA, 203 bp, Artificial sequence; identical to SEQ ID NO: 3243
  synthetic

SEQ ID NO: 29903 - DNA, 203 bp, Artificial sequence; identical to SEQ ID NO: 3244
  synthetic

SEQ ID NO: 29904 - DNA, 203 bp, Artificial sequence; identical to SEQ ID NO: 3245
  synthetic

SEQ ID NO: 29905 - DNA, 203 bp, Artificial sequence; identical to SEQ ID NO: 3248
  synthetic

SEQ ID NO: 29906 - DNA, 203 bp, Artificial sequence; identical to SEQ ID NO: 3250
  synthetic

SEQ ID NO: 29907 - DNA, 203 bp, Artificial sequence; identical to SEQ ID NO: 3253
  synthetic

SEQ ID NO: 29908 - DNA, 203 bp, Artificial sequence; identical to SEQ ID NO: 3255
  synthetic

SEQ ID NO: 29909 - DNA, 203 bp, Artificial sequence; identical to SEQ ID NO: 3258
  synthetic

SEQ ID NO: 29910 - DNA, 203 bp, Artificial sequence; identical to SEQ ID NO: 3260
  synthetic

SEQ ID NO: 29911 - DNA, 203 bp, Artificial sequence; identical to SEQ ID NO: 3262
  synthetic

SEQ ID NO: 29912 - DNA, 203 bp, Artificial sequence; identical to SEQ ID NO: 3267
  synthetic

SEQ ID NO: 29913 - DNA, 203 bp, Artificial sequence; identical to SEQ ID NO: 3271
  synthetic

SEQ ID NO: 29914 - DNA, 203 bp, Artificial sequence; identical to SEQ ID NO: 3277
  synthetic

SEQ ID NO: 29915 - DNA, 203 bp, Artificial sequence; identical to SEQ ID NO: 3278
  synthetic

SEQ ID NO: 29916 - DNA, 203 bp, Artificial sequence; identical to SEQ ID NO: 3282
  synthetic

SEQ ID NO: 29917 - DNA, 203 bp, Artificial sequence; identical to SEQ ID NO: 3300
  synthetic

SEQ ID NO: 29918 - DNA, 203 bp, Artificial sequence; identical to SEQ ID NO: 3302
  synthetic

SEQ ID NO: 29919 - DNA, 203 bp, Artificial sequence; identical to SEQ ID NO: 3305
  synthetic

SEQ ID NO: 29920 - DNA, 203 bp, Artificial sequence; identical to SEQ ID NO: 3306
  synthetic

SEQ ID NO: 29921 - DNA, 203 bp, Artificial sequence; identical to SEQ ID NO: 3309
  synthetic

SEQ ID NO: 29922 - DNA, 203 bp, Artificial sequence; identical to SEQ ID NO: 3310
  synthetic

SEQ ID NO: 29923 - DNA, 203 bp, Artificial sequence; identical to SEQ ID NO: 3312
  synthetic

SEQ ID NO: 29924 - DNA, 203 bp, Artificial sequence; identical to SEQ ID NO: 3313
  synthetic

SEQ ID NO: 29925 - DNA, 203 bp, Artificial sequence; identical to SEQ ID NO: 3322
  synthetic

SEQ ID NO: 29926 - DNA, 203 bp, Artificial sequence; identical to SEQ ID NO: 3323
  synthetic

SEQ ID NO: 29927 - DNA, 203 bp, Artificial sequence; identical to SEQ ID NO: 3324
  synthetic

SEQ ID NO: 29928 - DNA, 203 bp, Artificial sequence; identical to SEQ ID NO: 3325
  synthetic

SEQ ID NO: 29929 - DNA, 203 bp, Artificial sequence; identical to SEQ ID NO: 3334
  synthetic

SEQ ID NO: 29930 - DNA, 203 bp, Artificial sequence; identical to SEQ ID NO: 3336
  synthetic

SEQ ID NO: 29931 - DNA, 203 bp, Artificial sequence; identical to SEQ ID NO: 3340
  synthetic

SEQ ID NO: 29932 - DNA, 203 bp, Artificial sequence; identical to SEQ ID NO: 3345
  synthetic

SEQ ID NO: 29933 - DNA, 203 bp, Artificial sequence; identical to SEQ ID NO: 3348
  synthetic

SEQ ID NO: 29934 - DNA, 203 bp, Artificial sequence; identical to SEQ ID NO: 3350
  synthetic

SEQ ID NO: 29935 - DNA, 203 bp, Artificial sequence; identical to SEQ ID NO: 3353
  synthetic

SEQ ID NO: 29936 - DNA, 203 bp, Artificial sequence; identical to SEQ ID NO: 3355
  synthetic

SEQ ID NO: 29937 - DNA, 203 bp, Artificial sequence; identical to SEQ ID NO: 3356
  synthetic

SEQ ID NO: 29938 - DNA, 203 bp, Artificial sequence; identical to SEQ ID NO: 3361
  synthetic

SEQ ID NO: 29939 - DNA, 203 bp, Artificial sequence; identical to SEQ ID NO: 3367
  synthetic

SEQ ID NO: 29940 - DNA, 203 bp, Artificial sequence; identical to SEQ ID NO: 3368
  synthetic

SEQ ID NO: 29941 - DNA, 203 bp, Artificial sequence; identical to SEQ ID NO: 3370
  synthetic

SEQ ID NO: 29942 - DNA, 203 bp, Artificial sequence; identical to SEQ ID NO: 3372
  synthetic

SEQ ID NO: 29943 - DNA, 203 bp, Artificial sequence; identical to SEQ ID NO: 3389
  synthetic

SEQ ID NO: 29944 - DNA, 203 bp, Artificial sequence; identical to SEQ ID NO: 3402
  synthetic

SEQ ID NO: 29945 - DNA, 203 bp, Artificial sequence; identical to SEQ ID NO: 3406
  synthetic

SEQ ID NO: 29946 - DNA, 203 bp, Artificial sequence; identical to SEQ ID NO: 3407
  synthetic

SEQ ID NO: 29947 - DNA, 203 bp, Artificial sequence; identical to SEQ ID NO: 3408
  synthetic

SEQ ID NO: 29948 - DNA, 203 bp, Artificial sequence; identical to SEQ ID NO: 3409
  synthetic

SEQ ID NO: 29949 - DNA, 203 bp, Artificial sequence; identical to SEQ ID NO: 3416
  synthetic

SEQ ID NO: 29950 - DNA, 203 bp, Artificial sequence; identical to SEQ ID NO: 3419
  synthetic

SEQ ID NO: 29951 - DNA, 203 bp, Artificial sequence; identical to SEQ ID NO: 3421
  synthetic

SEQ ID NO: 29952 - DNA, 203 bp, Artificial sequence; identical to SEQ ID NO: 3423
  synthetic

SEQ ID NO: 29953 - DNA, 203 bp, Artificial sequence; identical to SEQ ID NO: 3424
  synthetic

SEQ ID NO: 29954 - DNA, 203 bp, Artificial sequence; identical to SEQ ID NO: 3428
  synthetic

SEQ ID NO: 29955 - DNA, 203 bp, Artificial sequence; identical to SEQ ID NO: 3429
  synthetic

SEQ ID NO: 29956 - DNA, 203 bp, Artificial sequence; identical to SEQ ID NO: 3431
  synthetic

SEQ ID NO: 29957 - DNA, 203 bp, Artificial sequence; identical to SEQ ID NO: 3436
  synthetic

SEQ ID NO: 29958 - DNA, 203 bp, Artificial sequence; identical to SEQ ID NO: 3439
  synthetic

SEQ ID NO: 29959 - DNA, 203 bp, Artificial sequence; identical to SEQ ID NO: 3440
  synthetic

SEQ ID NO: 29960 - DNA, 203 bp, Artificial sequence; identical to SEQ ID NO: 3447
  synthetic

SEQ ID NO: 29961 - DNA, 203 bp, Artificial sequence; identical to SEQ ID NO: 3448
  synthetic

SEQ ID NO: 29962 - DNA, 203 bp, Artificial sequence; identical to SEQ ID NO: 3452
  synthetic

SEQ ID NO: 29963 - DNA, 203 bp, Artificial sequence; identical to SEQ ID NO: 3455
  synthetic

SEQ ID NO: 29964 - DNA, 203 bp, Artificial sequence; identical to SEQ ID NO: 3457
  synthetic

SEQ ID NO: 29965 - DNA, 203 bp, Artificial sequence; identical to SEQ ID NO: 3460
  synthetic

SEQ ID NO: 29966 - DNA, 203 bp, Artificial sequence; identical to SEQ ID NO: 3462
  synthetic

SEQ ID NO: 29967 - DNA, 203 bp, Artificial sequence; identical to SEQ ID NO: 3465
  synthetic

SEQ ID NO: 29968 - DNA, 203 bp, Artificial sequence; identical to SEQ ID NO: 3473
  synthetic

SEQ ID NO: 29969 - DNA, 203 bp, Artificial sequence; identical to SEQ ID NO: 3475
  synthetic

SEQ ID NO: 29970 - DNA, 203 bp, Artificial sequence; identical to SEQ ID NO: 3478
  synthetic

SEQ ID NO: 29971 - DNA, 203 bp, Artificial sequence; identical to SEQ ID NO: 3482
  synthetic

SEQ ID NO: 29972 - DNA, 203 bp, Artificial sequence; identical to SEQ ID NO: 3489
  synthetic

SEQ ID NO: 29973 - DNA, 203 bp, Artificial sequence; identical to SEQ ID NO: 3495
  synthetic

SEQ ID NO: 29974 - DNA, 203 bp, Artificial sequence; identical to SEQ ID NO: 3496
  synthetic

SEQ ID NO: 29975 - DNA, 203 bp, Artificial sequence; identical to SEQ ID NO: 3497
  synthetic

SEQ ID NO: 29976 - DNA, 203 bp, Artificial sequence; identical to SEQ ID NO: 3506
  synthetic

SEQ ID NO: 29977 - DNA, 203 bp, Artificial sequence; identical to SEQ ID NO: 3507
  synthetic

SEQ ID NO: 29978 - DNA, 203 bp, Artificial sequence; identical to SEQ ID NO: 3510
  synthetic

SEQ ID NO: 29979 - DNA, 203 bp, Artificial sequence; identical to SEQ ID NO: 3514
  synthetic

SEQ ID NO: 29980 - DNA, 203 bp, Artificial sequence; identical to SEQ ID NO: 3533
  synthetic

SEQ ID NO: 29981 - DNA, 203 bp, Artificial sequence; identical to SEQ ID NO: 3541
  synthetic

SEQ ID NO: 29982 - DNA, 203 bp, Artificial sequence; identical to SEQ ID NO: 3557
  synthetic

SEQ ID NO: 29983 - DNA, 203 bp, Artificial sequence; identical to SEQ ID NO: 3565
  synthetic

SEQ ID NO: 29984 - DNA, 203 bp, Artificial sequence; identical to SEQ ID NO: 3566
  synthetic

SEQ ID NO: 29985 - DNA, 203 bp, Artificial sequence; identical to SEQ ID NO: 3603
  synthetic

SEQ ID NO: 29986 - DNA, 203 bp, Artificial sequence; identical to SEQ ID NO: 3623
  synthetic

SEQ ID NO: 29987 - DNA, 203 bp, Artificial sequence; identical to SEQ ID NO: 3625
  synthetic

SEQ ID NO: 29988 - DNA, 203 bp, Artificial sequence; identical to SEQ ID NO: 3628
  synthetic

SEQ ID NO: 29989 - DNA, 203 bp, Artificial sequence; identical to SEQ ID NO: 3630
  synthetic

SEQ ID NO: 29990 - DNA, 203 bp, Artificial sequence; identical to SEQ ID NO: 3633
  synthetic

SEQ ID NO: 29991 - DNA, 203 bp, Artificial sequence; identical to SEQ ID NO: 3639
  synthetic

SEQ ID NO: 29992 - DNA, 203 bp, Artificial sequence; identical to SEQ ID NO: 3640
  synthetic

SEQ ID NO: 29993 - DNA, 203 bp, Artificial sequence; identical to SEQ ID NO: 3646
  synthetic

SEQ ID NO: 29994 - DNA, 203 bp, Artificial sequence; identical to SEQ ID NO: 3650
  synthetic

SEQ ID NO: 29995 - DNA, 203 bp, Artificial sequence; identical to SEQ ID NO: 3662
  synthetic

SEQ ID NO: 29996 - DNA, 203 bp, Artificial sequence; identical to SEQ ID NO: 3675
  synthetic

SEQ ID NO: 29997 - DNA, 203 bp, Artificial sequence; identical to SEQ ID NO: 3677
  synthetic

SEQ ID NO: 29998 - DNA, 203 bp, Artificial sequence; identical to SEQ ID NO: 3678
  synthetic

SEQ ID NO: 29999 - DNA, 203 bp, Artificial sequence; identical to SEQ ID NO: 3679
  synthetic

SEQ ID NO: 30000 - DNA, 203 bp, Artificial sequence; identical to SEQ ID NO: 3685
  synthetic

SEQ ID NO: 30001 - DNA, 203 bp, Artificial sequence; identical to SEQ ID NO: 3688
  synthetic

SEQ ID NO: 30002 - DNA, 203 bp, Artificial sequence; identical to SEQ ID NO: 3690
  synthetic

SEQ ID NO: 30003 - DNA, 203 bp, Artificial sequence; identical to SEQ ID NO: 3692
  synthetic

SEQ ID NO: 30004 - DNA, 203 bp, Artificial sequence; identical to SEQ ID NO: 3694
  synthetic

SEQ ID NO: 30005 - DNA, 203 bp, Artificial sequence; identical to SEQ ID NO: 3706
  synthetic

SEQ ID NO: 30006 - DNA, 203 bp, Artificial sequence; identical to SEQ ID NO: 3713
  synthetic

SEQ ID NO: 30007 - DNA, 203 bp, Artificial sequence; identical to SEQ ID NO: 3723
  synthetic

SEQ ID NO: 30008 - DNA, 203 bp, Artificial sequence; identical to SEQ ID NO: 3728
  synthetic

SEQ ID NO: 30009 - DNA, 203 bp, Artificial sequence; identical to SEQ ID NO: 3734
  synthetic

SEQ ID NO: 30010 - DNA, 203 bp, Artificial sequence; identical to SEQ ID NO: 3742
  synthetic

SEQ ID NO: 30011 - DNA, 203 bp, Artificial sequence; identical to SEQ ID NO: 3748
  synthetic

SEQ ID NO: 30012 - DNA, 203 bp, Artificial sequence; identical to SEQ ID NO: 3752
  synthetic

SEQ ID NO: 30013 - DNA, 203 bp, Artificial sequence; identical to SEQ ID NO: 3755
  synthetic

SEQ ID NO: 30014 - DNA, 203 bp, Artificial sequence; identical to SEQ ID NO: 3764
  synthetic

SEQ ID NO: 30015 - DNA, 203 bp, Artificial sequence; identical to SEQ ID NO: 3765
  synthetic

SEQ ID NO: 30016 - DNA, 203 bp, Artificial sequence; identical to SEQ ID NO: 3766
  synthetic

SEQ ID NO: 30017 - DNA, 203 bp, Artificial sequence; identical to SEQ ID NO: 3770
  synthetic

SEQ ID NO: 30018 - DNA, 203 bp, Artificial sequence; identical to SEQ ID NO: 3771
  synthetic

SEQ ID NO: 30019 - DNA, 203 bp, Artificial sequence; identical to SEQ ID NO: 3774
  synthetic

SEQ ID NO: 30020 - DNA, 203 bp, Artificial sequence; identical to SEQ ID NO: 3776
  synthetic

SEQ ID NO: 30021 - DNA, 203 bp, Artificial sequence; identical to SEQ ID NO: 3778
  synthetic

SEQ ID NO: 30022 - DNA, 203 bp, Artificial sequence; identical to SEQ ID NO: 3792
  synthetic

SEQ ID NO: 30023 - DNA, 203 bp, Artificial sequence; identical to SEQ ID NO: 3799
  synthetic

SEQ ID NO: 30024 - DNA, 203 bp, Artificial sequence; identical to SEQ ID NO: 3800
  synthetic

SEQ ID NO: 30025 - DNA, 203 bp, Artificial sequence; identical to SEQ ID NO: 3810
  synthetic

SEQ ID NO: 30026 - DNA, 203 bp, Artificial sequence; identical to SEQ ID NO: 3811
  synthetic

SEQ ID NO: 30027 - DNA, 203 bp, Artificial sequence; identical to SEQ ID NO: 3813
  synthetic

SEQ ID NO: 30028 - DNA, 203 bp, Artificial sequence; identical to SEQ ID NO: 3814
  synthetic

SEQ ID NO: 30029 - DNA, 203 bp, Artificial sequence; identical to SEQ ID NO: 3838
  synthetic

SEQ ID NO: 30030 - DNA, 203 bp, Artificial sequence; identical to SEQ ID NO: 3839
  synthetic

SEQ ID NO: 30031 - DNA, 203 bp, Artificial sequence; identical to SEQ ID NO: 3840
  synthetic

SEQ ID NO: 30032 - DNA, 203 bp, Artificial sequence; identical to SEQ ID NO: 3843
  synthetic

SEQ ID NO: 30033 - DNA, 203 bp, Artificial sequence; identical to SEQ ID NO: 3847
  synthetic

SEQ ID NO: 30034 - DNA, 203 bp, Artificial sequence; identical to SEQ ID NO: 3857
  synthetic

SEQ ID NO: 30035 - DNA, 203 bp, Artificial sequence; identical to SEQ ID NO: 3864
  synthetic

SEQ ID NO: 30036 - DNA, 203 bp, Artificial sequence; identical to SEQ ID NO: 3870
  synthetic

SEQ ID NO: 30037 - DNA, 203 bp, Artificial sequence; identical to SEQ ID NO: 3881
  synthetic

SEQ ID NO: 30038 - DNA, 203 bp, Artificial sequence; identical to SEQ ID NO: 3895
  synthetic

SEQ ID NO: 30039 - DNA, 203 bp, Artificial sequence; identical to SEQ ID NO: 3908
  synthetic

SEQ ID NO: 30040 - DNA, 203 bp, Artificial sequence; identical to SEQ ID NO: 3910
  synthetic

SEQ ID NO: 30041 - DNA, 203 bp, Artificial sequence; identical to SEQ ID NO: 3911
  synthetic

SEQ ID NO: 30042 - DNA, 203 bp, Artificial sequence; identical to SEQ ID NO: 3912
  synthetic

SEQ ID NO: 30043 - DNA, 203 bp, Artificial sequence; identical to SEQ ID NO: 3914
  synthetic

SEQ ID NO: 30044 - DNA, 203 bp, Artificial sequence; identical to SEQ ID NO: 3918
  synthetic

SEQ ID NO: 30045 - DNA, 203 bp, Artificial sequence; identical to SEQ ID NO: 3919
  synthetic

SEQ ID NO: 30046 - DNA, 203 bp, Artificial sequence; identical to SEQ ID NO: 3922
  synthetic

SEQ ID NO: 30047 - DNA, 203 bp, Artificial sequence; identical to SEQ ID NO: 3927
  synthetic

SEQ ID NO: 30048 - DNA, 203 bp, Artificial sequence; identical to SEQ ID NO: 3929
  synthetic

SEQ ID NO: 30049 - DNA, 203 bp, Artificial sequence; identical to SEQ ID NO: 3930
  synthetic

SEQ ID NO: 30050 - DNA, 203 bp, Artificial sequence; identical to SEQ ID NO: 3933
  synthetic

SEQ ID NO: 30051 - DNA, 203 bp, Artificial sequence; identical to SEQ ID NO: 3934
  synthetic

SEQ ID NO: 30052 - DNA, 203 bp, Artificial sequence; identical to SEQ ID NO: 3935
  synthetic

SEQ ID NO: 30053 - DNA, 203 bp, Artificial sequence; identical to SEQ ID NO: 3936
  synthetic

SEQ ID NO: 30054 - DNA, 203 bp, Artificial sequence; identical to SEQ ID NO: 3937
  synthetic

SEQ ID NO: 30055 - DNA, 203 bp, Artificial sequence; identical to SEQ ID NO: 3938
  synthetic

SEQ ID NO: 30056 - DNA, 203 bp, Artificial sequence; identical to SEQ ID NO: 3941
  synthetic

SEQ ID NO: 30057 - DNA, 203 bp, Artificial sequence; identical to SEQ ID NO: 3943
  synthetic

SEQ ID NO: 30058 - DNA, 203 bp, Artificial sequence; identical to SEQ ID NO: 3944
  synthetic

SEQ ID NO: 30059 - DNA, 203 bp, Artificial sequence; identical to SEQ ID NO: 3945
  synthetic

SEQ ID NO: 30060 - DNA, 203 bp, Artificial sequence; identical to SEQ ID NO: 3946
  synthetic

SEQ ID NO: 30061 - DNA, 203 bp, Artificial sequence; identical to SEQ ID NO: 3948
  synthetic

SEQ ID NO: 30062 - DNA, 203 bp, Artificial sequence; identical to SEQ ID NO: 3949
  synthetic

SEQ ID NO: 30063 - DNA, 203 bp, Artificial sequence; identical to SEQ ID NO: 3950
  synthetic

SEQ ID NO: 30064 - DNA, 203 bp, Artificial sequence; identical to SEQ ID NO: 3951
  synthetic

SEQ ID NO: 30065 - DNA, 203 bp, Artificial sequence; identical to SEQ ID NO: 3963
  synthetic

SEQ ID NO: 30066 - DNA, 203 bp, Artificial sequence; identical to SEQ ID NO: 3964
  synthetic

SEQ ID NO: 30067 - DNA, 203 bp, Artificial sequence; identical to SEQ ID NO: 3965
  synthetic

SEQ ID NO: 30068 - DNA, 203 bp, Artificial sequence; identical to SEQ ID NO: 3968
  synthetic

SEQ ID NO: 30069 - DNA, 203 bp, Artificial sequence; identical to SEQ ID NO: 3973
  synthetic

SEQ ID NO: 30070 - DNA, 203 bp, Artificial sequence; identical to SEQ ID NO: 3974
  synthetic

SEQ ID NO: 30071 - DNA, 203 bp, Artificial sequence; identical to SEQ ID NO: 3976
  synthetic

SEQ ID NO: 30072 - DNA, 203 bp, Artificial sequence; identical to SEQ ID NO: 3983
  synthetic

SEQ ID NO: 30073 - DNA, 203 bp, Artificial sequence; identical to SEQ ID NO: 3984
  synthetic

SEQ ID NO: 30074 - DNA, 203 bp, Artificial sequence; identical to SEQ ID NO: 3988
  synthetic

SEQ ID NO: 30075 - DNA, 203 bp, Artificial sequence; identical to SEQ ID NO: 3989
  synthetic

SEQ ID NO: 30076 - DNA, 203 bp, Artificial sequence; identical to SEQ ID NO: 3990
  synthetic

SEQ ID NO: 30077 - DNA, 203 bp, Artificial sequence; identical to SEQ ID NO: 3993
  synthetic

SEQ ID NO: 30078 - DNA, 203 bp, Artificial sequence; identical to SEQ ID NO: 3998
  synthetic

SEQ ID NO: 30079 - DNA, 203 bp, Artificial sequence; identical to SEQ ID NO: 3999
  synthetic

SEQ ID NO: 30080 - DNA, 203 bp, Artificial sequence; identical to SEQ ID NO: 4008
  synthetic

SEQ ID NO: 30081 - DNA, 203 bp, Artificial sequence; identical to SEQ ID NO: 4009
  synthetic

SEQ ID NO: 30082 - DNA, 203 bp, Artificial sequence; identical to SEQ ID NO: 4011
  synthetic

SEQ ID NO: 30083 - DNA, 203 bp, Artificial sequence; identical to SEQ ID NO: 4012
  synthetic

SEQ ID NO: 30084 - DNA, 203 bp, Artificial sequence; identical to SEQ ID NO: 4013
  synthetic

SEQ ID NO: 30085 - DNA, 203 bp, Artificial sequence; identical to SEQ ID NO: 4014
  synthetic

SEQ ID NO: 30086 - DNA, 203 bp, Artificial sequence; identical to SEQ ID NO: 4017
  synthetic

SEQ ID NO: 30087 - DNA, 203 bp, Artificial sequence; identical to SEQ ID NO: 4018
  synthetic

SEQ ID NO: 30088 - DNA, 203 bp, Artificial sequence; identical to SEQ ID NO: 4020
  synthetic

SEQ ID NO: 30089 - DNA, 203 bp, Artificial sequence; identical to SEQ ID NO: 4023
  synthetic

SEQ ID NO: 30090 - DNA, 203 bp, Artificial sequence; identical to SEQ ID NO: 4024
  synthetic

SEQ ID NO: 30091 - DNA, 203 bp, Artificial sequence; identical to SEQ ID NO: 4025
  synthetic

SEQ ID NO: 30092 - DNA, 203 bp, Artificial sequence; identical to SEQ ID NO: 4026
  synthetic

SEQ ID NO: 30093 - DNA, 203 bp, Artificial sequence; identical to SEQ ID NO: 4031
  synthetic

SEQ ID NO: 30094 - DNA, 203 bp, Artificial sequence; identical to SEQ ID NO: 4033
  synthetic

SEQ ID NO: 30095 - DNA, 203 bp, Artificial sequence; identical to SEQ ID NO: 4034
  synthetic

SEQ ID NO: 30096 - DNA, 203 bp, Artificial sequence; identical to SEQ ID NO: 4045
  synthetic

SEQ ID NO: 30097 - DNA, 203 bp, Artificial sequence; identical to SEQ ID NO: 4046
  synthetic

SEQ ID NO: 30098 - DNA, 203 bp, Artificial sequence; identical to SEQ ID NO: 4051
  synthetic

SEQ ID NO: 30099 - DNA, 203 bp, Artificial sequence; identical to SEQ ID NO: 4052
  synthetic

SEQ ID NO: 30100 - DNA, 203 bp, Artificial sequence; identical to SEQ ID NO: 4063
  synthetic

SEQ ID NO: 30101 - DNA, 203 bp, Artificial sequence; identical to SEQ ID NO: 4066
  synthetic

SEQ ID NO: 30102 - DNA, 203 bp, Artificial sequence; identical to SEQ ID NO: 4068
  synthetic

SEQ ID NO: 30103 - DNA, 203 bp, Artificial sequence; identical to SEQ ID NO: 4070
  synthetic

SEQ ID NO: 30104 - DNA, 203 bp, Artificial sequence; identical to SEQ ID NO: 4071
  synthetic

SEQ ID NO: 30105 - DNA, 203 bp, Artificial sequence; identical to SEQ ID NO: 4074
  synthetic

SEQ ID NO: 30106 - DNA, 203 bp, Artificial sequence; identical to SEQ ID NO: 4086
  synthetic

SEQ ID NO: 30107 - DNA, 203 bp, Artificial sequence; identical to SEQ ID NO: 4095
  synthetic

SEQ ID NO: 30108 - DNA, 203 bp, Artificial sequence; identical to SEQ ID NO: 4104
  synthetic

SEQ ID NO: 30109 - DNA, 203 bp, Artificial sequence; identical to SEQ ID NO: 4106
  synthetic

SEQ ID NO: 30110 - DNA, 203 bp, Artificial sequence; identical to SEQ ID NO: 4107
  synthetic

SEQ ID NO: 30111 - DNA, 203 bp, Artificial sequence; identical to SEQ ID NO: 4109
  synthetic

SEQ ID NO: 30112 - DNA, 203 bp, Artificial sequence; identical to SEQ ID NO: 4113
  synthetic

SEQ ID NO: 30113 - DNA, 203 bp, Artificial sequence; identical to SEQ ID NO: 4114
  synthetic

SEQ ID NO: 30114 - DNA, 203 bp, Artificial sequence; identical to SEQ ID NO: 4117
  synthetic

SEQ ID NO: 30115 - DNA, 203 bp, Artificial sequence; identical to SEQ ID NO: 4126
  synthetic

SEQ ID NO: 30116 - DNA, 203 bp, Artificial sequence; identical to SEQ ID NO: 4127
  synthetic

SEQ ID NO: 30117 - DNA, 203 bp, Artificial sequence; identical to SEQ ID NO: 4129
  synthetic

SEQ ID NO: 30118 - DNA, 203 bp, Artificial sequence; identical to SEQ ID NO: 4130
  synthetic

SEQ ID NO: 30119 - DNA, 203 bp, Artificial sequence; identical to SEQ ID NO: 4143
  synthetic

SEQ ID NO: 30120 - DNA, 203 bp, Artificial sequence; identical to SEQ ID NO: 4145
  synthetic

SEQ ID NO: 30121 - DNA, 203 bp, Artificial sequence; identical to SEQ ID NO: 4154
  synthetic

SEQ ID NO: 30122 - DNA, 203 bp, Artificial sequence; identical to SEQ ID NO: 4158
  synthetic

SEQ ID NO: 30123 - DNA, 203 bp, Artificial sequence; identical to SEQ ID NO: 4159
  synthetic

SEQ ID NO: 30124 - DNA, 203 bp, Artificial sequence; identical to SEQ ID NO: 4160
  synthetic

SEQ ID NO: 30125 - DNA, 203 bp, Artificial sequence; identical to SEQ ID NO: 4167
  synthetic

SEQ ID NO: 30126 - DNA, 203 bp, Artificial sequence; identical to SEQ ID NO: 4178
  synthetic

SEQ ID NO: 30127 - DNA, 203 bp, Artificial sequence; identical to SEQ ID NO: 4194
  synthetic

SEQ ID NO: 30128 - DNA, 203 bp, Artificial sequence; identical to SEQ ID NO: 4196
  synthetic

SEQ ID NO: 30129 - DNA, 203 bp, Artificial sequence; identical to SEQ ID NO: 4202
  synthetic

SEQ ID NO: 30130 - DNA, 203 bp, Artificial sequence; identical to SEQ ID NO: 4205
  synthetic

SEQ ID NO: 30131 - DNA, 203 bp, Artificial sequence; identical to SEQ ID NO: 4206
  synthetic

SEQ ID NO: 30132 - DNA, 203 bp, Artificial sequence; identical to SEQ ID NO: 4224
  synthetic

SEQ ID NO: 30133 - DNA, 203 bp, Artificial sequence; identical to SEQ ID NO: 4230
  synthetic

SEQ ID NO: 30134 - DNA, 203 bp, Artificial sequence; identical to SEQ ID NO: 4234
  synthetic

SEQ ID NO: 30135 - DNA, 203 bp, Artificial sequence; identical to SEQ ID NO: 4238
  synthetic

SEQ ID NO: 30136 - DNA, 203 bp, Artificial sequence; identical to SEQ ID NO: 4245
  synthetic

SEQ ID NO: 30137 - DNA, 203 bp, Artificial sequence; identical to SEQ ID NO: 4246
  synthetic

SEQ ID NO: 30138 - DNA, 203 bp, Artificial sequence; identical to SEQ ID NO: 4250
  synthetic

SEQ ID NO: 30139 - DNA, 203 bp, Artificial sequence; identical to SEQ ID NO: 4252
  synthetic

SEQ ID NO: 30140 - DNA, 203 bp, Artificial sequence; identical to SEQ ID NO: 4253
  synthetic

SEQ ID NO: 30141 - DNA, 203 bp, Artificial sequence; identical to SEQ ID NO: 4264
  synthetic

SEQ ID NO: 30142 - DNA, 203 bp, Artificial sequence; identical to SEQ ID NO: 4268
  synthetic

SEQ ID NO: 30143 - DNA, 203 bp, Artificial sequence; identical to SEQ ID NO: 4286
  synthetic

SEQ ID NO: 30144 - DNA, 203 bp, Artificial sequence; identical to SEQ ID NO: 4288
  synthetic

SEQ ID NO: 30145 - DNA, 203 bp, Artificial sequence; identical to SEQ ID NO: 4289
  synthetic

SEQ ID NO: 30146 - DNA, 203 bp, Artificial sequence; identical to SEQ ID NO: 4292
  synthetic

SEQ ID NO: 30147 - DNA, 203 bp, Artificial sequence; identical to SEQ ID NO: 4293
  synthetic

SEQ ID NO: 30148 - DNA, 203 bp, Artificial sequence; identical to SEQ ID NO: 4294
  synthetic

SEQ ID NO: 30149 - DNA, 203 bp, Artificial sequence; identical to SEQ ID NO: 4301
  synthetic

SEQ ID NO: 30150 - DNA, 203 bp, Artificial sequence; identical to SEQ ID NO: 4306
  synthetic

SEQ ID NO: 30151 - DNA, 203 bp, Artificial sequence; identical to SEQ ID NO: 4308
  synthetic

SEQ ID NO: 30152 - DNA, 203 bp, Artificial sequence; identical to SEQ ID NO: 4309
  synthetic

SEQ ID NO: 30153 - DNA, 203 bp, Artificial sequence; identical to SEQ ID NO: 4313
  synthetic

SEQ ID NO: 30154 - DNA, 203 bp, Artificial sequence; identical to SEQ ID NO: 4316
  synthetic

SEQ ID NO: 30155 - DNA, 203 bp, Artificial sequence; identical to SEQ ID NO: 4326
  synthetic

SEQ ID NO: 30156 - DNA, 203 bp, Artificial sequence; identical to SEQ ID NO: 4327
  synthetic

SEQ ID NO: 30157 - DNA, 203 bp, Artificial sequence; identical to SEQ ID NO: 4342
  synthetic

SEQ ID NO: 30158 - DNA, 203 bp, Artificial sequence; identical to SEQ ID NO: 4347
  synthetic

SEQ ID NO: 30159 - DNA, 203 bp, Artificial sequence; identical to SEQ ID NO: 4348
  synthetic

SEQ ID NO: 30160 - DNA, 203 bp, Artificial sequence; identical to SEQ ID NO: 4371
  synthetic

SEQ ID NO: 30161 - DNA, 203 bp, Artificial sequence; identical to SEQ ID NO: 4374
  synthetic

SEQ ID NO: 30162 - DNA, 203 bp, Artificial sequence; identical to SEQ ID NO: 4382
  synthetic

SEQ ID NO: 30163 - DNA, 203 bp, Artificial sequence; identical to SEQ ID NO: 4399
  synthetic

SEQ ID NO: 30164 - DNA, 203 bp, Artificial sequence; identical to SEQ ID NO: 4401
  synthetic

SEQ ID NO: 30165 - DNA, 203 bp, Artificial sequence; identical to SEQ ID NO: 4402
  synthetic

SEQ ID NO: 30166 - DNA, 203 bp, Artificial sequence; identical to SEQ ID NO: 4406
  synthetic

SEQ ID NO: 30167 - DNA, 203 bp, Artificial sequence; identical to SEQ ID NO: 4409
  synthetic

SEQ ID NO: 30168 - DNA, 203 bp, Artificial sequence; identical to SEQ ID NO: 4443
  synthetic

SEQ ID NO: 30169 - DNA, 203 bp, Artificial sequence; identical to SEQ ID NO: 4448
  synthetic

SEQ ID NO: 30170 - DNA, 203 bp, Artificial sequence; identical to SEQ ID NO: 4452
  synthetic

SEQ ID NO: 30171 - DNA, 203 bp, Artificial sequence; identical to SEQ ID NO: 4462
  synthetic

SEQ ID NO: 30172 - DNA, 203 bp, Artificial sequence; identical to SEQ ID NO: 4465
  synthetic

SEQ ID NO: 30173 - DNA, 203 bp, Artificial sequence; identical to SEQ ID NO: 4466
  synthetic

SEQ ID NO: 30174 - DNA, 203 bp, Artificial sequence; identical to SEQ ID NO: 4470
  synthetic

SEQ ID NO: 30175 - DNA, 203 bp, Artificial sequence; identical to SEQ ID NO: 4471
  synthetic

SEQ ID NO: 30176 - DNA, 203 bp, Artificial sequence; identical to SEQ ID NO: 4474
  synthetic

SEQ ID NO: 30177 - DNA, 203 bp, Artificial sequence; identical to SEQ ID NO: 4485
  synthetic

SEQ ID NO: 30178 - DNA, 203 bp, Artificial sequence; identical to SEQ ID NO: 4488
  synthetic

SEQ ID NO: 30179 - DNA, 203 bp, Artificial sequence; identical to SEQ ID NO: 4489
  synthetic

SEQ ID NO: 30180 - DNA, 203 bp, Artificial sequence; identical to SEQ ID NO: 4500
  synthetic

SEQ ID NO: 30181 - DNA, 203 bp, Artificial sequence; identical to SEQ ID NO: 4503
  synthetic

SEQ ID NO: 30182 - DNA, 203 bp, Artificial sequence; identical to SEQ ID NO: 4510
  synthetic

SEQ ID NO: 30183 - DNA, 203 bp, Artificial sequence; identical to SEQ ID NO: 4514
  synthetic

SEQ ID NO: 30184 - DNA, 203 bp, Artificial sequence; identical to SEQ ID NO: 4516
  synthetic

SEQ ID NO: 30185 - DNA, 203 bp, Artificial sequence; identical to SEQ ID NO: 4522
  synthetic

SEQ ID NO: 30186 - DNA, 203 bp, Artificial sequence; identical to SEQ ID NO: 4527
  synthetic

SEQ ID NO: 30187 - DNA, 203 bp, Artificial sequence; identical to SEQ ID NO: 4542
  synthetic

SEQ ID NO: 30188 - DNA, 203 bp, Artificial sequence; identical to SEQ ID NO: 4548
  synthetic

SEQ ID NO: 30189 - DNA, 203 bp, Artificial sequence; identical to SEQ ID NO: 4549
  synthetic

SEQ ID NO: 30190 - DNA, 203 bp, Artificial sequence; identical to SEQ ID NO: 4555
  synthetic

SEQ ID NO: 30191 - DNA, 203 bp, Artificial sequence; identical to SEQ ID NO: 4559
  synthetic

SEQ ID NO: 30192 - DNA, 203 bp, Artificial sequence; identical to SEQ ID NO: 4562
  synthetic

SEQ ID NO: 30193 - DNA, 203 bp, Artificial sequence; identical to SEQ ID NO: 4591
  synthetic

SEQ ID NO: 30194 - DNA, 203 bp, Artificial sequence; identical to SEQ ID NO: 4598
  synthetic

SEQ ID NO: 30195 - DNA, 203 bp, Artificial sequence; identical to SEQ ID NO: 4610
  synthetic

SEQ ID NO: 30196 - DNA, 203 bp, Artificial sequence; identical to SEQ ID NO: 4613
  synthetic

SEQ ID NO: 30197 - DNA, 203 bp, Artificial sequence; identical to SEQ ID NO: 4614
  synthetic

SEQ ID NO: 30198 - DNA, 203 bp, Artificial sequence; identical to SEQ ID NO: 4619
  synthetic

SEQ ID NO: 30199 - DNA, 203 bp, Artificial sequence; identical to SEQ ID NO: 4628
  synthetic

SEQ ID NO: 30200 - DNA, 203 bp, Artificial sequence; identical to SEQ ID NO: 4629
  synthetic

SEQ ID NO: 30201 - DNA, 203 bp, Artificial sequence; identical to SEQ ID NO: 4633
  synthetic

SEQ ID NO: 30202 - DNA, 203 bp, Artificial sequence; identical to SEQ ID NO: 4639
  synthetic

SEQ ID NO: 30203 - DNA, 203 bp, Artificial sequence; identical to SEQ ID NO: 4651
  synthetic

SEQ ID NO: 30204 - DNA, 203 bp, Artificial sequence; identical to SEQ ID NO: 4654
  synthetic

SEQ ID NO: 30205 - DNA, 203 bp, Artificial sequence; identical to SEQ ID NO: 4655
  synthetic

SEQ ID NO: 30206 - DNA, 203 bp, Artificial sequence; identical to SEQ ID NO: 4656
  synthetic

SEQ ID NO: 30207 - DNA, 203 bp, Artificial sequence; identical to SEQ ID NO: 4657
  synthetic

SEQ ID NO: 30208 - DNA, 203 bp, Artificial sequence; identical to SEQ ID NO: 4658
  synthetic

SEQ ID NO: 30209 - DNA, 203 bp, Artificial sequence; identical to SEQ ID NO: 4659
  synthetic

SEQ ID NO: 30210 - DNA, 203 bp, Artificial sequence; identical to SEQ ID NO: 4660
  synthetic

SEQ ID NO: 30211 - DNA, 203 bp, Artificial sequence; identical to SEQ ID NO: 4661
  synthetic

SEQ ID NO: 30212 - DNA, 203 bp, Artificial sequence; identical to SEQ ID NO: 4662
  synthetic

SEQ ID NO: 30213 - DNA, 203 bp, Artificial sequence; identical to SEQ ID NO: 4663
  synthetic

SEQ ID NO: 30214 - DNA, 203 bp, Artificial sequence; identical to SEQ ID NO: 4664
  synthetic

SEQ ID NO: 30215 - DNA, 203 bp, Artificial sequence; identical to SEQ ID NO: 4665
  synthetic

SEQ ID NO: 30216 - DNA, 203 bp, Artificial sequence; identical to SEQ ID NO: 4666
  synthetic

SEQ ID NO: 30217 - DNA, 203 bp, Artificial sequence; identical to SEQ ID NO: 4667
  synthetic

SEQ ID NO: 30218 - DNA, 203 bp, Artificial sequence; identical to SEQ ID NO: 4668
  synthetic

SEQ ID NO: 30219 - DNA, 203 bp, Artificial sequence; identical to SEQ ID NO: 4669
  synthetic

SEQ ID NO: 30220 - DNA, 203 bp, Artificial sequence; identical to SEQ ID NO: 4670
  synthetic

SEQ ID NO: 30221 - DNA, 203 bp, Artificial sequence; identical to SEQ ID NO: 4671
  synthetic

SEQ ID NO: 30222 - DNA, 203 bp, Artificial sequence; identical to SEQ ID NO: 4709
  synthetic

SEQ ID NO: 30223 - DNA, 203 bp, Artificial sequence; identical to SEQ ID NO: 4765
  synthetic

SEQ ID NO: 30224 - DNA, 203 bp, Artificial sequence; identical to SEQ ID NO: 4766
  synthetic

SEQ ID NO: 30225 - DNA, 203 bp, Artificial sequence; identical to SEQ ID NO: 4771
  synthetic

SEQ ID NO: 30226 - DNA, 203 bp, Artificial sequence; identical to SEQ ID NO: 4774
  synthetic

SEQ ID NO: 30227 - DNA, 203 bp, Artificial sequence; identical to SEQ ID NO: 4781
  synthetic

SEQ ID NO: 30228 - DNA, 203 bp, Artificial sequence; identical to SEQ ID NO: 4787
  synthetic

SEQ ID NO: 30229 - DNA, 203 bp, Artificial sequence; identical to SEQ ID NO: 4792
  synthetic

SEQ ID NO: 30230 - DNA, 203 bp, Artificial sequence; identical to SEQ ID NO: 4796
  synthetic

SEQ ID NO: 30231 - DNA, 203 bp, Artificial sequence; identical to SEQ ID NO: 4827
  synthetic

SEQ ID NO: 30232 - DNA, 203 bp, Artificial sequence; identical to SEQ ID NO: 4828
  synthetic

SEQ ID NO: 30233 - DNA, 203 bp, Artificial sequence; identical to SEQ ID NO: 4829
  synthetic

SEQ ID NO: 30234 - DNA, 203 bp, Artificial sequence; identical to SEQ ID NO: 4830
  synthetic

SEQ ID NO: 30235 - DNA, 203 bp, Artificial sequence; identical to SEQ ID NO: 4831
  synthetic

SEQ ID NO: 30236 - DNA, 203 bp, Artificial sequence; identical to SEQ ID NO: 4832
  synthetic

SEQ ID NO: 30237 - DNA, 203 bp, Artificial sequence; identical to SEQ ID NO: 4833
  synthetic

SEQ ID NO: 30238 - DNA, 203 bp, Artificial sequence; identical to SEQ ID NO: 4834
  synthetic

SEQ ID NO: 30239 - DNA, 203 bp, Artificial sequence; identical to SEQ ID NO: 4835
  synthetic

SEQ ID NO: 30240 - DNA, 203 bp, Artificial sequence; identical to SEQ ID NO: 4836
  synthetic

SEQ ID NO: 30241 - DNA, 203 bp, Artificial sequence; identical to SEQ ID NO: 4837
  synthetic

SEQ ID NO: 30242 - DNA, 203 bp, Artificial sequence; identical to SEQ ID NO: 4844
  synthetic

SEQ ID NO: 30243 - DNA, 203 bp, Artificial sequence; identical to SEQ ID NO: 4845
  synthetic

SEQ ID NO: 30244 - DNA, 203 bp, Artificial sequence; identical to SEQ ID NO: 4846
  synthetic

SEQ ID NO: 30245 - DNA, 203 bp, Artificial sequence; identical to SEQ ID NO: 4847
  synthetic

SEQ ID NO: 30246 - DNA, 203 bp, Artificial sequence; identical to SEQ ID NO: 4848
  synthetic

SEQ ID NO: 30247 - DNA, 203 bp, Artificial sequence; identical to SEQ ID NO: 4849
  synthetic

SEQ ID NO: 30248 - DNA, 203 bp, Artificial sequence; identical to SEQ ID NO: 4856
  synthetic

SEQ ID NO: 30249 - DNA, 203 bp, Artificial sequence; identical to SEQ ID NO: 4857
  synthetic

SEQ ID NO: 30250 - DNA, 203 bp, Artificial sequence; identical to SEQ ID NO: 4858
  synthetic

SEQ ID NO: 30251 - DNA, 203 bp, Artificial sequence; identical to SEQ ID NO: 4859
  synthetic

SEQ ID NO: 30252 - DNA, 203 bp, Artificial sequence; identical to SEQ ID NO: 4869
  synthetic

SEQ ID NO: 30253 - DNA, 203 bp, Artificial sequence; identical to SEQ ID NO: 4878
  synthetic

SEQ ID NO: 30254 - DNA, 203 bp, Artificial sequence; identical to SEQ ID NO: 4880
  synthetic

SEQ ID NO: 30255 - DNA, 203 bp, Artificial sequence; identical to SEQ ID NO: 4886
  synthetic

SEQ ID NO: 30256 - DNA, 203 bp, Artificial sequence; identical to SEQ ID NO: 4887
  synthetic

SEQ ID NO: 30257 - DNA, 203 bp, Artificial sequence; identical to SEQ ID NO: 4888
  synthetic

SEQ ID NO: 30258 - DNA, 203 bp, Artificial sequence; identical to SEQ ID NO: 4889
  synthetic

SEQ ID NO: 30259 - DNA, 203 bp, Artificial sequence; identical to SEQ ID NO: 4895
  synthetic

SEQ ID NO: 30260 - DNA, 203 bp, Artificial sequence; identical to SEQ ID NO: 4896
  synthetic

SEQ ID NO: 30261 - DNA, 203 bp, Artificial sequence; identical to SEQ ID NO: 4897
  synthetic

SEQ ID NO: 30262 - DNA, 203 bp, Artificial sequence; identical to SEQ ID NO: 4898
  synthetic

SEQ ID NO: 30263 - DNA, 203 bp, Artificial sequence; identical to SEQ ID NO: 4899
  synthetic

SEQ ID NO: 30264 - DNA, 203 bp, Artificial sequence; identical to SEQ ID NO: 4900
  synthetic

SEQ ID NO: 30265 - DNA, 203 bp, Artificial sequence; identical to SEQ ID NO: 4908
  synthetic

SEQ ID NO: 30266 - DNA, 203 bp, Artificial sequence; identical to SEQ ID NO: 4909
  synthetic

SEQ ID NO: 30267 - DNA, 203 bp, Artificial sequence; identical to SEQ ID NO: 4910
  synthetic

SEQ ID NO: 30268 - DNA, 203 bp, Artificial sequence; identical to SEQ ID NO: 4911
  synthetic

SEQ ID NO: 30269 - DNA, 203 bp, Artificial sequence; identical to SEQ ID NO: 4912
  synthetic

SEQ ID NO: 30270 - DNA, 203 bp, Artificial sequence; identical to SEQ ID NO: 4915
  synthetic

SEQ ID NO: 30271 - DNA, 203 bp, Artificial sequence; identical to SEQ ID NO: 4926
  synthetic

SEQ ID NO: 30272 - DNA, 203 bp, Artificial sequence; identical to SEQ ID NO: 4927
  synthetic

SEQ ID NO: 30273 - DNA, 203 bp, Artificial sequence; identical to SEQ ID NO: 4940
  synthetic

SEQ ID NO: 30274 - DNA, 203 bp, Artificial sequence; identical to SEQ ID NO: 4941
  synthetic

SEQ ID NO: 30275 - DNA, 203 bp, Artificial sequence; identical to SEQ ID NO: 4950
  synthetic

SEQ ID NO: 30276 - DNA, 203 bp, Artificial sequence; identical to SEQ ID NO: 4951
  synthetic

SEQ ID NO: 30277 - DNA, 203 bp, Artificial sequence; identical to SEQ ID NO: 4952
  synthetic

SEQ ID NO: 30278 - DNA, 203 bp, Artificial sequence; identical to SEQ ID NO: 4953
  synthetic

SEQ ID NO: 30279 - DNA, 203 bp, Artificial sequence; identical to SEQ ID NO: 4954
  synthetic

SEQ ID NO: 30280 - DNA, 203 bp, Artificial sequence; identical to SEQ ID NO: 4956
  synthetic

SEQ ID NO: 30281 - DNA, 203 bp, Artificial sequence; identical to SEQ ID NO: 4965
  synthetic

SEQ ID NO: 30282 - DNA, 203 bp, Artificial sequence; identical to SEQ ID NO: 4966
  synthetic

SEQ ID NO: 30283 - DNA, 203 bp, Artificial sequence; identical to SEQ ID NO: 4967
  synthetic

SEQ ID NO: 30284 - DNA, 203 bp, Artificial sequence; identical to SEQ ID NO: 4968
  synthetic

SEQ ID NO: 30285 - DNA, 203 bp, Artificial sequence; identical to SEQ ID NO: 4969
  synthetic

SEQ ID NO: 30286 - DNA, 203 bp, Artificial sequence; identical to SEQ ID NO: 4970
  synthetic

SEQ ID NO: 30287 - DNA, 203 bp, Artificial sequence; identical to SEQ ID NO: 4971
  synthetic

SEQ ID NO: 30288 - DNA, 203 bp, Artificial sequence; identical to SEQ ID NO: 4972
  synthetic

SEQ ID NO: 30289 - DNA, 203 bp, Artificial sequence; identical to SEQ ID NO: 4973
  synthetic

SEQ ID NO: 30290 - DNA, 203 bp, Artificial sequence; identical to SEQ ID NO: 4974
  synthetic

SEQ ID NO: 30291 - DNA, 203 bp, Artificial sequence; identical to SEQ ID NO: 4975
  synthetic

SEQ ID NO: 30292 - DNA, 203 bp, Artificial sequence; identical to SEQ ID NO: 4976
  synthetic

SEQ ID NO: 30293 - DNA, 203 bp, Artificial sequence; identical to SEQ ID NO: 4977
  synthetic

SEQ ID NO: 30294 - DNA, 203 bp, Artificial sequence; identical to SEQ ID NO: 4978
  synthetic

SEQ ID NO: 30295 - DNA, 203 bp, Artificial sequence; identical to SEQ ID NO: 4979
  synthetic

SEQ ID NO: 30296 - DNA, 203 bp, Artificial sequence; identical to SEQ ID NO: 4980
  synthetic

SEQ ID NO: 30297 - DNA, 203 bp, Artificial sequence; identical to SEQ ID NO: 4981
  synthetic

SEQ ID NO: 30298 - DNA, 203 bp, Artificial sequence; identical to SEQ ID NO: 4982
  synthetic

SEQ ID NO: 30299 - DNA, 203 bp, Artificial sequence; identical to SEQ ID NO: 4983
  synthetic

SEQ ID NO: 30300 - DNA, 203 bp, Artificial sequence; identical to SEQ ID NO: 4984
  synthetic

SEQ ID NO: 30301 - DNA, 203 bp, Artificial sequence; identical to SEQ ID NO: 4985
  synthetic

SEQ ID NO: 30302 - DNA, 203 bp, Artificial sequence; identical to SEQ ID NO: 4986
  synthetic

SEQ ID NO: 30303 - DNA, 203 bp, Artificial sequence; identical to SEQ ID NO: 4987
  synthetic

SEQ ID NO: 30304 - DNA, 203 bp, Artificial sequence; identical to SEQ ID NO: 4988
  synthetic

SEQ ID NO: 30305 - DNA, 203 bp, Artificial sequence; identical to SEQ ID NO: 4989
  synthetic

SEQ ID NO: 30306 - DNA, 203 bp, Artificial sequence; identical to SEQ ID NO: 4999
  synthetic

SEQ ID NO: 30307 - DNA, 203 bp, Artificial sequence; identical to SEQ ID NO: 5030
  synthetic

SEQ ID NO: 30308 - DNA, 203 bp, Artificial sequence; identical to SEQ ID NO: 5040
  synthetic

SEQ ID NO: 30309 - DNA, 203 bp, Artificial sequence; identical to SEQ ID NO: 5041
  synthetic

SEQ ID NO: 30310 - DNA, 203 bp, Artificial sequence; identical to SEQ ID NO: 5042
  synthetic

SEQ ID NO: 30311 - DNA, 203 bp, Artificial sequence; identical to SEQ ID NO: 5043
  synthetic

SEQ ID NO: 30312 - DNA, 203 bp, Artificial sequence; identical to SEQ ID NO: 5044
  synthetic

SEQ ID NO: 30313 - DNA, 203 bp, Artificial sequence; identical to SEQ ID NO: 5054
  synthetic

SEQ ID NO: 30314 - DNA, 203 bp, Artificial sequence; identical to SEQ ID NO: 5069
  synthetic

SEQ ID NO: 30315 - DNA, 203 bp, Artificial sequence; identical to SEQ ID NO: 5070
  synthetic

SEQ ID NO: 30316 - DNA, 203 bp, Artificial sequence; identical to SEQ ID NO: 5071
  synthetic

SEQ ID NO: 30317 - DNA, 203 bp, Artificial sequence; identical to SEQ ID NO: 5072
  synthetic

SEQ ID NO: 30318 - DNA, 203 bp, Artificial sequence; identical to SEQ ID NO: 5074
  synthetic

SEQ ID NO: 30319 - DNA, 203 bp, Artificial sequence; identical to SEQ ID NO: 5085
  synthetic

SEQ ID NO: 30320 - DNA, 203 bp, Artificial sequence; identical to SEQ ID NO: 5086
  synthetic

SEQ ID NO: 30321 - DNA, 203 bp, Artificial sequence; identical to SEQ ID NO: 5087
  synthetic

SEQ ID NO: 30322 - DNA, 203 bp, Artificial sequence; identical to SEQ ID NO: 5088
  synthetic

SEQ ID NO: 30323 - DNA, 203 bp, Artificial sequence; identical to SEQ ID NO: 5089
  synthetic

SEQ ID NO: 30324 - DNA, 203 bp, Artificial sequence; identical to SEQ ID NO: 5090
  synthetic

SEQ ID NO: 30325 - DNA, 203 bp, Artificial sequence; identical to SEQ ID NO: 5091
  synthetic

SEQ ID NO: 30326 - DNA, 203 bp, Artificial sequence; identical to SEQ ID NO: 5092
  synthetic

SEQ ID NO: 30327 - DNA, 203 bp, Artificial sequence; identical to SEQ ID NO: 5093
  synthetic

SEQ ID NO: 30328 - DNA, 203 bp, Artificial sequence; identical to SEQ ID NO: 5094
  synthetic

SEQ ID NO: 30329 - DNA, 203 bp, Artificial sequence; identical to SEQ ID NO: 5095
  synthetic

SEQ ID NO: 30330 - DNA, 203 bp, Artificial sequence; identical to SEQ ID NO: 5096
  synthetic

SEQ ID NO: 30331 - DNA, 203 bp, Artificial sequence; identical to SEQ ID NO: 5097
  synthetic

SEQ ID NO: 30332 - DNA, 203 bp, Artificial sequence; identical to SEQ ID NO: 5098
  synthetic

SEQ ID NO: 30333 - DNA, 203 bp, Artificial sequence; identical to SEQ ID NO: 5100
  synthetic

SEQ ID NO: 30334 - DNA, 203 bp, Artificial sequence; identical to SEQ ID NO: 5101
  synthetic

SEQ ID NO: 30335 - DNA, 203 bp, Artificial sequence; identical to SEQ ID NO: 5102
  synthetic

SEQ ID NO: 30336 - DNA, 203 bp, Artificial sequence; identical to SEQ ID NO: 5103
  synthetic

SEQ ID NO: 30337 - DNA, 203 bp, Artificial sequence; identical to SEQ ID NO: 5104
  synthetic

SEQ ID NO: 30338 - DNA, 203 bp, Artificial sequence; identical to SEQ ID NO: 5105
  synthetic

SEQ ID NO: 30339 - DNA, 203 bp, Artificial sequence; identical to SEQ ID NO: 5106
  synthetic

SEQ ID NO: 30340 - DNA, 203 bp, Artificial sequence; identical to SEQ ID NO: 5107
  synthetic

SEQ ID NO: 30341 - DNA, 203 bp, Artificial sequence; identical to SEQ ID NO: 5108
  synthetic

SEQ ID NO: 30342 - DNA, 203 bp, Artificial sequence; identical to SEQ ID NO: 5109
  synthetic

SEQ ID NO: 30343 - DNA, 203 bp, Artificial sequence; identical to SEQ ID NO: 5110
  synthetic

SEQ ID NO: 30344 - DNA, 203 bp, Artificial sequence; identical to SEQ ID NO: 5111
  synthetic

SEQ ID NO: 30345 - DNA, 203 bp, Artificial sequence; identical to SEQ ID NO: 5112
  synthetic

SEQ ID NO: 30346 - DNA, 203 bp, Artificial sequence; identical to SEQ ID NO: 5113
  synthetic

SEQ ID NO: 30347 - DNA, 203 bp, Artificial sequence; identical to SEQ ID NO: 5114
  synthetic

SEQ ID NO: 30348 - DNA, 203 bp, Artificial sequence; identical to SEQ ID NO: 5115
  synthetic

SEQ ID NO: 30349 - DNA, 203 bp, Artificial sequence; identical to SEQ ID NO: 5116
  synthetic

SEQ ID NO: 30350 - DNA, 203 bp, Artificial sequence; identical to SEQ ID NO: 5117
  synthetic

SEQ ID NO: 30351 - DNA, 203 bp, Artificial sequence; identical to SEQ ID NO: 5118
  synthetic

SEQ ID NO: 30352 - DNA, 203 bp, Artificial sequence; identical to SEQ ID NO: 5149
  synthetic

SEQ ID NO: 30353 - DNA, 203 bp, Artificial sequence; identical to SEQ ID NO: 5174
  synthetic

SEQ ID NO: 30354 - DNA, 203 bp, Artificial sequence; identical to SEQ ID NO: 5185
  synthetic

SEQ ID NO: 30355 - DNA, 203 bp, Artificial sequence; identical to SEQ ID NO: 5189
  synthetic

SEQ ID NO: 30356 - DNA, 203 bp, Artificial sequence; identical to SEQ ID NO: 5190
  synthetic

SEQ ID NO: 30357 - DNA, 203 bp, Artificial sequence; identical to SEQ ID NO: 5191
  synthetic

SEQ ID NO: 30358 - DNA, 203 bp, Artificial sequence; identical to SEQ ID NO: 5192
  synthetic

SEQ ID NO: 30359 - DNA, 203 bp, Artificial sequence; identical to SEQ ID NO: 5193
  synthetic

SEQ ID NO: 30360 - DNA, 203 bp, Artificial sequence; identical to SEQ ID NO: 5194
  synthetic

SEQ ID NO: 30361 - DNA, 203 bp, Artificial sequence; identical to SEQ ID NO: 5195
  synthetic

SEQ ID NO: 30362 - DNA, 203 bp, Artificial sequence; identical to SEQ ID NO: 5196
  synthetic

SEQ ID NO: 30363 - DNA, 203 bp, Artificial sequence; identical to SEQ ID NO: 5197
  synthetic

SEQ ID NO: 30364 - DNA, 203 bp, Artificial sequence; identical to SEQ ID NO: 5203
  synthetic

SEQ ID NO: 30365 - DNA, 203 bp, Artificial sequence; identical to SEQ ID NO: 5204
  synthetic

SEQ ID NO: 30366 - DNA, 203 bp, Artificial sequence; identical to SEQ ID NO: 5205
  synthetic

SEQ ID NO: 30367 - DNA, 203 bp, Artificial sequence; identical to SEQ ID NO: 5206
  synthetic

SEQ ID NO: 30368 - DNA, 203 bp, Artificial sequence; identical to SEQ ID NO: 5221
  synthetic

SEQ ID NO: 30369 - DNA, 203 bp, Artificial sequence; identical to SEQ ID NO: 5229
  synthetic

SEQ ID NO: 30370 - DNA, 203 bp, Artificial sequence; identical to SEQ ID NO: 5230
  synthetic

SEQ ID NO: 30371 - DNA, 203 bp, Artificial sequence; identical to SEQ ID NO: 5231
  synthetic

SEQ ID NO: 30372 - DNA, 203 bp, Artificial sequence; identical to SEQ ID NO: 5232
  synthetic

SEQ ID NO: 30373 - DNA, 203 bp, Artificial sequence; identical to SEQ ID NO: 5238
  synthetic

SEQ ID NO: 30374 - DNA, 203 bp, Artificial sequence; identical to SEQ ID NO: 5239
  synthetic

SEQ ID NO: 30375 - DNA, 203 bp, Artificial sequence; identical to SEQ ID NO: 5240
  synthetic

SEQ ID NO: 30376 - DNA, 203 bp, Artificial sequence; identical to SEQ ID NO: 5243
  synthetic

SEQ ID NO: 30377 - DNA, 203 bp, Artificial sequence; identical to SEQ ID NO: 5244
  synthetic

SEQ ID NO: 30378 - DNA, 203 bp, Artificial sequence; identical to SEQ ID NO: 5245
  synthetic

SEQ ID NO: 30379 - DNA, 203 bp, Artificial sequence; identical to SEQ ID NO: 5246
  synthetic

SEQ ID NO: 30380 - DNA, 203 bp, Artificial sequence; identical to SEQ ID NO: 5247
  synthetic

SEQ ID NO: 30381 - DNA, 203 bp, Artificial sequence; identical to SEQ ID NO: 5248
  synthetic

SEQ ID NO: 30382 - DNA, 203 bp, Artificial sequence; identical to SEQ ID NO: 5270
  synthetic

SEQ ID NO: 30383 - DNA, 203 bp, Artificial sequence; identical to SEQ ID NO: 5272
  synthetic

SEQ ID NO: 30384 - DNA, 203 bp, Artificial sequence; identical to SEQ ID NO: 5276
  synthetic

SEQ ID NO: 30385 - DNA, 203 bp, Artificial sequence; identical to SEQ ID NO: 5280
  synthetic

SEQ ID NO: 30386 - DNA, 203 bp, Artificial sequence; identical to SEQ ID NO: 5293
  synthetic

SEQ ID NO: 30387 - DNA, 203 bp, Artificial sequence; identical to SEQ ID NO: 5294
  synthetic

SEQ ID NO: 30388 - DNA, 203 bp, Artificial sequence; identical to SEQ ID NO: 5295
  synthetic

SEQ ID NO: 30389 - DNA, 203 bp, Artificial sequence; identical to SEQ ID NO: 5296
  synthetic

SEQ ID NO: 30390 - DNA, 203 bp, Artificial sequence; identical to SEQ ID NO: 5297
  synthetic

SEQ ID NO: 30391 - DNA, 203 bp, Artificial sequence; identical to SEQ ID NO: 5336
  synthetic

SEQ ID NO: 30392 - DNA, 203 bp, Artificial sequence; identical to SEQ ID NO: 5337
  synthetic

SEQ ID NO: 30393 - DNA, 203 bp, Artificial sequence; identical to SEQ ID NO: 5348
  synthetic

SEQ ID NO: 30394 - DNA, 203 bp, Artificial sequence; identical to SEQ ID NO: 5371
  synthetic

SEQ ID NO: 30395 - DNA, 203 bp, Artificial sequence; identical to SEQ ID NO: 5391
  synthetic

SEQ ID NO: 30396 - DNA, 203 bp, Artificial sequence; identical to SEQ ID NO: 5397
  synthetic

SEQ ID NO: 30397 - DNA, 203 bp, Artificial sequence; identical to SEQ ID NO: 5399
  synthetic

SEQ ID NO: 30398 - DNA, 203 bp, Artificial sequence; identical to SEQ ID NO: 5400
  synthetic

SEQ ID NO: 30399 - DNA, 203 bp, Artificial sequence; identical to SEQ ID NO: 5403
  synthetic

SEQ ID NO: 30400 - DNA, 203 bp, Artificial sequence; identical to SEQ ID NO: 5408
  synthetic

SEQ ID NO: 30401 - DNA, 203 bp, Artificial sequence; identical to SEQ ID NO: 5409
  synthetic

SEQ ID NO: 30402 - DNA, 203 bp, Artificial sequence; identical to SEQ ID NO: 5410
  synthetic

SEQ ID NO: 30403 - DNA, 203 bp, Artificial sequence; identical to SEQ ID NO: 5420
  synthetic

SEQ ID NO: 30404 - DNA, 203 bp, Artificial sequence; identical to SEQ ID NO: 5421
  synthetic

SEQ ID NO: 30405 - DNA, 203 bp, Artificial sequence; identical to SEQ ID NO: 5422
  synthetic

SEQ ID NO: 30406 - DNA, 203 bp, Artificial sequence; identical to SEQ ID NO: 5423
  synthetic

SEQ ID NO: 30407 - DNA, 203 bp, Artificial sequence; identical to SEQ ID NO: 5424
  synthetic

SEQ ID NO: 30408 - DNA, 203 bp, Artificial sequence; identical to SEQ ID NO: 5425
  synthetic

SEQ ID NO: 30409 - DNA, 203 bp, Artificial sequence; identical to SEQ ID NO: 5430
  synthetic

SEQ ID NO: 30410 - DNA, 203 bp, Artificial sequence; identical to SEQ ID NO: 5431
  synthetic

SEQ ID NO: 30411 - DNA, 203 bp, Artificial sequence; identical to SEQ ID NO: 5443
  synthetic

SEQ ID NO: 30412 - DNA, 203 bp, Artificial sequence; identical to SEQ ID NO: 5444
  synthetic

SEQ ID NO: 30413 - DNA, 203 bp, Artificial sequence; identical to SEQ ID NO: 5445
  synthetic

SEQ ID NO: 30414 - DNA, 203 bp, Artificial sequence; identical to SEQ ID NO: 5446
  synthetic

SEQ ID NO: 30415 - DNA, 203 bp, Artificial sequence; identical to SEQ ID NO: 5447
  synthetic

SEQ ID NO: 30416 - DNA, 203 bp, Artificial sequence; identical to SEQ ID NO: 5448
  synthetic

SEQ ID NO: 30417 - DNA, 203 bp, Artificial sequence; identical to SEQ ID NO: 5449
  synthetic

SEQ ID NO: 30418 - DNA, 203 bp, Artificial sequence; identical to SEQ ID NO: 5450
  synthetic

SEQ ID NO: 30419 - DNA, 203 bp, Artificial sequence; identical to SEQ ID NO: 5451
  synthetic

SEQ ID NO: 30420 - DNA, 203 bp, Artificial sequence; identical to SEQ ID NO: 5452
  synthetic

SEQ ID NO: 30421 - DNA, 203 bp, Artificial sequence; identical to SEQ ID NO: 5453
  synthetic

SEQ ID NO: 30422 - DNA, 203 bp, Artificial sequence; identical to SEQ ID NO: 5454
  synthetic

SEQ ID NO: 30423 - DNA, 203 bp, Artificial sequence; identical to SEQ ID NO: 5455
  synthetic

SEQ ID NO: 30424 - DNA, 203 bp, Artificial sequence; identical to SEQ ID NO: 5456
  synthetic

SEQ ID NO: 30425 - DNA, 203 bp, Artificial sequence; identical to SEQ ID NO: 5457
  synthetic

SEQ ID NO: 30426 - DNA, 203 bp, Artificial sequence; identical to SEQ ID NO: 5458
  synthetic

SEQ ID NO: 30427 - DNA, 203 bp, Artificial sequence; identical to SEQ ID NO: 5459
  synthetic

SEQ ID NO: 30428 - DNA, 203 bp, Artificial sequence; identical to SEQ ID NO: 5460
  synthetic

SEQ ID NO: 30429 - DNA, 203 bp, Artificial sequence; identical to SEQ ID NO: 5461
  synthetic

SEQ ID NO: 30430 - DNA, 203 bp, Artificial sequence; identical to SEQ ID NO: 5462
  synthetic

SEQ ID NO: 30431 - DNA, 203 bp, Artificial sequence; identical to SEQ ID NO: 5463
  synthetic

SEQ ID NO: 30432 - DNA, 203 bp, Artificial sequence; identical to SEQ ID NO: 5464
  synthetic

SEQ ID NO: 30433 - DNA, 203 bp, Artificial sequence; identical to SEQ ID NO: 5465
  synthetic

SEQ ID NO: 30434 - DNA, 203 bp, Artificial sequence; identical to SEQ ID NO: 5466
  synthetic

SEQ ID NO: 30435 - DNA, 203 bp, Artificial sequence; identical to SEQ ID NO: 5467
  synthetic

SEQ ID NO: 30436 - DNA, 203 bp, Artificial sequence; identical to SEQ ID NO: 5468
  synthetic

SEQ ID NO: 30437 - DNA, 203 bp, Artificial sequence; identical to SEQ ID NO: 5471
  synthetic

SEQ ID NO: 30438 - DNA, 203 bp, Artificial sequence; identical to SEQ ID NO: 5502
  synthetic

SEQ ID NO: 30439 - DNA, 203 bp, Artificial sequence; identical to SEQ ID NO: 5503
  synthetic

SEQ ID NO: 30440 - DNA, 203 bp, Artificial sequence; identical to SEQ ID NO: 5504
  synthetic

SEQ ID NO: 30441 - DNA, 203 bp, Artificial sequence; identical to SEQ ID NO: 5505
  synthetic

SEQ ID NO: 30442 - DNA, 203 bp, Artificial sequence; identical to SEQ ID NO: 5508
  synthetic

SEQ ID NO: 30443 - DNA, 203 bp, Artificial sequence; identical to SEQ ID NO: 5518
  synthetic

SEQ ID NO: 30444 - DNA, 203 bp, Artificial sequence; identical to SEQ ID NO: 5519
  synthetic

SEQ ID NO: 30445 - DNA, 203 bp, Artificial sequence; identical to SEQ ID NO: 5520
  synthetic

SEQ ID NO: 30446 - DNA, 203 bp, Artificial sequence; identical to SEQ ID NO: 5521
  synthetic

SEQ ID NO: 30447 - DNA, 203 bp, Artificial sequence; identical to SEQ ID NO: 5522
  synthetic

SEQ ID NO: 30448 - DNA, 203 bp, Artificial sequence; identical to SEQ ID NO: 5523
  synthetic

SEQ ID NO: 30449 - DNA, 203 bp, Artificial sequence; identical to SEQ ID NO: 5524
  synthetic

SEQ ID NO: 30450 - DNA, 203 bp, Artificial sequence; identical to SEQ ID NO: 5525
  synthetic

SEQ ID NO: 30451 - DNA, 203 bp, Artificial sequence; identical to SEQ ID NO: 5526
  synthetic

SEQ ID NO: 30452 - DNA, 203 bp, Artificial sequence; identical to SEQ ID NO: 5527
  synthetic

SEQ ID NO: 30453 - DNA, 203 bp, Artificial sequence; identical to SEQ ID NO: 5528
  synthetic

SEQ ID NO: 30454 - DNA, 203 bp, Artificial sequence; identical to SEQ ID NO: 5532
  synthetic

SEQ ID NO: 30455 - DNA, 203 bp, Artificial sequence; identical to SEQ ID NO: 5533
  synthetic

SEQ ID NO: 30456 - DNA, 203 bp, Artificial sequence; identical to SEQ ID NO: 5534
  synthetic

SEQ ID NO: 30457 - DNA, 203 bp, Artificial sequence; identical to SEQ ID NO: 5535
  synthetic

SEQ ID NO: 30458 - DNA, 203 bp, Artificial sequence; identical to SEQ ID NO: 5536
  synthetic

SEQ ID NO: 30459 - DNA, 203 bp, Artificial sequence; identical to SEQ ID NO: 5537
  synthetic

SEQ ID NO: 30460 - DNA, 203 bp, Artificial sequence; identical to SEQ ID NO: 5538
  synthetic

SEQ ID NO: 30461 - DNA, 203 bp, Artificial sequence; identical to SEQ ID NO: 5539
  synthetic

SEQ ID NO: 30462 - DNA, 203 bp, Artificial sequence; identical to SEQ ID NO: 5540
  synthetic

SEQ ID NO: 30463 - DNA, 203 bp, Artificial sequence; identical to SEQ ID NO: 5541
  synthetic

SEQ ID NO: 30464 - DNA, 203 bp, Artificial sequence; identical to SEQ ID NO: 5542
  synthetic

SEQ ID NO: 30465 - DNA, 203 bp, Artificial sequence; identical to SEQ ID NO: 5549
  synthetic

SEQ ID NO: 30466 - DNA, 203 bp, Artificial sequence; identical to SEQ ID NO: 5550
  synthetic

SEQ ID NO: 30467 - DNA, 203 bp, Artificial sequence; identical to SEQ ID NO: 5551
  synthetic

SEQ ID NO: 30468 - DNA, 203 bp, Artificial sequence; identical to SEQ ID NO: 5552
  synthetic

SEQ ID NO: 30469 - DNA, 203 bp, Artificial sequence; identical to SEQ ID NO: 5553
  synthetic

SEQ ID NO: 30470 - DNA, 203 bp, Artificial sequence; identical to SEQ ID NO: 5554
  synthetic

SEQ ID NO: 30471 - DNA, 203 bp, Artificial sequence; identical to SEQ ID NO: 5555
  synthetic

SEQ ID NO: 30472 - DNA, 203 bp, Artificial sequence; identical to SEQ ID NO: 5556
  synthetic

SEQ ID NO: 30473 - DNA, 203 bp, Artificial sequence; identical to SEQ ID NO: 5557
  synthetic

SEQ ID NO: 30474 - DNA, 203 bp, Artificial sequence; identical to SEQ ID NO: 5558
  synthetic

SEQ ID NO: 30475 - DNA, 203 bp, Artificial sequence; identical to SEQ ID NO: 5559
  synthetic

SEQ ID NO: 30476 - DNA, 203 bp, Artificial sequence; identical to SEQ ID NO: 5560
  synthetic

SEQ ID NO: 30477 - DNA, 203 bp, Artificial sequence; identical to SEQ ID NO: 5561
  synthetic

SEQ ID NO: 30478 - DNA, 203 bp, Artificial sequence; identical to SEQ ID NO: 5562
  synthetic

SEQ ID NO: 30479 - DNA, 203 bp, Artificial sequence; identical to SEQ ID NO: 5563
  synthetic

SEQ ID NO: 30480 - DNA, 203 bp, Artificial sequence; identical to SEQ ID NO: 5564
  synthetic

SEQ ID NO: 30481 - DNA, 203 bp, Artificial sequence; identical to SEQ ID NO: 5565
  synthetic

SEQ ID NO: 30482 - DNA, 203 bp, Artificial sequence; identical to SEQ ID NO: 5566
  synthetic

SEQ ID NO: 30483 - DNA, 203 bp, Artificial sequence; identical to SEQ ID NO: 5567
  synthetic

SEQ ID NO: 30484 - DNA, 203 bp, Artificial sequence; identical to SEQ ID NO: 5568
  synthetic

SEQ ID NO: 30485 - DNA, 203 bp, Artificial sequence; identical to SEQ ID NO: 5569
  synthetic

SEQ ID NO: 30486 - DNA, 203 bp, Artificial sequence; identical to SEQ ID NO: 5570
  synthetic

SEQ ID NO: 30487 - DNA, 203 bp, Artificial sequence; identical to SEQ ID NO: 5571
  synthetic

SEQ ID NO: 30488 - DNA, 203 bp, Artificial sequence; identical to SEQ ID NO: 5586
  synthetic

SEQ ID NO: 30489 - DNA, 203 bp, Artificial sequence; identical to SEQ ID NO: 5595
  synthetic

SEQ ID NO: 30490 - DNA, 203 bp, Artificial sequence; identical to SEQ ID NO: 5603
  synthetic

SEQ ID NO: 30491 - DNA, 203 bp, Artificial sequence; identical to SEQ ID NO: 5604
  synthetic

SEQ ID NO: 30492 - DNA, 203 bp, Artificial sequence; identical to SEQ ID NO: 5605
  synthetic

SEQ ID NO: 30493 - DNA, 203 bp, Artificial sequence; identical to SEQ ID NO: 5606
  synthetic

SEQ ID NO: 30494 - DNA, 203 bp, Artificial sequence; identical to SEQ ID NO: 5607
  synthetic

SEQ ID NO: 30495 - DNA, 203 bp, Artificial sequence; identical to SEQ ID NO: 5608
  synthetic

SEQ ID NO: 30496 - DNA, 203 bp, Artificial sequence; identical to SEQ ID NO: 5618
  synthetic

SEQ ID NO: 30497 - DNA, 203 bp, Artificial sequence; identical to SEQ ID NO: 5619
  synthetic

SEQ ID NO: 30498 - DNA, 203 bp, Artificial sequence; identical to SEQ ID NO: 5620
  synthetic

SEQ ID NO: 30499 - DNA, 203 bp, Artificial sequence; identical to SEQ ID NO: 5621
  synthetic

SEQ ID NO: 30500 - DNA, 203 bp, Artificial sequence; identical to SEQ ID NO: 5622
  synthetic

SEQ ID NO: 30501 - DNA, 203 bp, Artificial sequence; identical to SEQ ID NO: 5623
  synthetic

SEQ ID NO: 30502 - DNA, 203 bp, Artificial sequence; identical to SEQ ID NO: 5624
  synthetic

SEQ ID NO: 30503 - DNA, 203 bp, Artificial sequence; identical to SEQ ID NO: 5625
  synthetic

SEQ ID NO: 30504 - DNA, 203 bp, Artificial sequence; identical to SEQ ID NO: 5626
  synthetic

SEQ ID NO: 30505 - DNA, 203 bp, Artificial sequence; identical to SEQ ID NO: 5627
  synthetic

SEQ ID NO: 30506 - DNA, 203 bp, Artificial sequence; identical to SEQ ID NO: 5628
  synthetic

SEQ ID NO: 30507 - DNA, 203 bp, Artificial sequence; identical to SEQ ID NO: 5629
  synthetic

SEQ ID NO: 30508 - DNA, 203 bp, Artificial sequence; identical to SEQ ID NO: 5630
  synthetic

SEQ ID NO: 30509 - DNA, 203 bp, Artificial sequence; identical to SEQ ID NO: 5647
  synthetic

SEQ ID NO: 30510 - DNA, 203 bp, Artificial sequence; identical to SEQ ID NO: 5648
  synthetic

SEQ ID NO: 30511 - DNA, 203 bp, Artificial sequence; identical to SEQ ID NO: 5649
  synthetic

SEQ ID NO: 30512 - DNA, 203 bp, Artificial sequence; identical to SEQ ID NO: 5652
  synthetic

SEQ ID NO: 30513 - DNA, 203 bp, Artificial sequence; identical to SEQ ID NO: 5653
  synthetic

SEQ ID NO: 30514 - DNA, 203 bp, Artificial sequence; identical to SEQ ID NO: 5654
  synthetic

SEQ ID NO: 30515 - DNA, 203 bp, Artificial sequence; identical to SEQ ID NO: 5655
  synthetic

SEQ ID NO: 30516 - DNA, 203 bp, Artificial sequence; identical to SEQ ID NO: 5656
  synthetic

SEQ ID NO: 30517 - DNA, 203 bp, Artificial sequence; identical to SEQ ID NO: 5681
  synthetic

SEQ ID NO: 30518 - DNA, 203 bp, Artificial sequence; identical to SEQ ID NO: 5687
  synthetic

SEQ ID NO: 30519 - DNA, 203 bp, Artificial sequence; identical to SEQ ID NO: 5689
  synthetic

SEQ ID NO: 30520 - DNA, 203 bp, Artificial sequence; identical to SEQ ID NO: 5693
  synthetic

SEQ ID NO: 30521 - DNA, 203 bp, Artificial sequence; identical to SEQ ID NO: 5694
  synthetic

SEQ ID NO: 30522 - DNA, 203 bp, Artificial sequence; identical to SEQ ID NO: 5695
  synthetic

SEQ ID NO: 30523 - DNA, 203 bp, Artificial sequence; identical to SEQ ID NO: 5705
  synthetic

SEQ ID NO: 30524 - DNA, 203 bp, Artificial sequence; identical to SEQ ID NO: 5706
  synthetic

SEQ ID NO: 30525 - DNA, 203 bp, Artificial sequence; identical to SEQ ID NO: 5707
  synthetic

SEQ ID NO: 30526 - DNA, 203 bp, Artificial sequence; identical to SEQ ID NO: 5708
  synthetic

SEQ ID NO: 30527 - DNA, 203 bp, Artificial sequence; identical to SEQ ID NO: 5709
  synthetic

SEQ ID NO: 30528 - DNA, 203 bp, Artificial sequence; identical to SEQ ID NO: 5710
  synthetic

SEQ ID NO: 30529 - DNA, 203 bp, Artificial sequence; identical to SEQ ID NO: 5711
  synthetic

SEQ ID NO: 30530 - DNA, 203 bp, Artificial sequence; identical to SEQ ID NO: 5712
  synthetic

SEQ ID NO: 30531 - DNA, 203 bp, Artificial sequence; identical to SEQ ID NO: 5713
  synthetic

SEQ ID NO: 30532 - DNA, 203 bp, Artificial sequence; identical to SEQ ID NO: 5714
  synthetic

SEQ ID NO: 30533 - DNA, 203 bp, Artificial sequence; identical to SEQ ID NO: 5715
  synthetic

SEQ ID NO: 30534 - DNA, 203 bp, Artificial sequence; identical to SEQ ID NO: 5716
  synthetic

SEQ ID NO: 30535 - DNA, 203 bp, Artificial sequence; identical to SEQ ID NO: 5717
  synthetic

SEQ ID NO: 30536 - DNA, 203 bp, Artificial sequence; identical to SEQ ID NO: 5718
  synthetic

SEQ ID NO: 30537 - DNA, 203 bp, Artificial sequence; identical to SEQ ID NO: 5719
  synthetic

SEQ ID NO: 30538 - DNA, 203 bp, Artificial sequence; identical to SEQ ID NO: 5720
  synthetic

SEQ ID NO: 30539 - DNA, 203 bp, Artificial sequence; identical to SEQ ID NO: 5721
  synthetic

SEQ ID NO: 30540 - DNA, 203 bp, Artificial sequence; identical to SEQ ID NO: 5729
  synthetic

SEQ ID NO: 30541 - DNA, 203 bp, Artificial sequence; identical to SEQ ID NO: 5730
  synthetic

SEQ ID NO: 30542 - DNA, 203 bp, Artificial sequence; identical to SEQ ID NO: 5731
  synthetic

SEQ ID NO: 30543 - DNA, 203 bp, Artificial sequence; identical to SEQ ID NO: 5732
  synthetic

SEQ ID NO: 30544 - DNA, 203 bp, Artificial sequence; identical to SEQ ID NO: 5733
  synthetic

SEQ ID NO: 30545 - DNA, 203 bp, Artificial sequence; identical to SEQ ID NO: 5734
  synthetic

SEQ ID NO: 30546 - DNA, 203 bp, Artificial sequence; identical to SEQ ID NO: 5735
  synthetic

SEQ ID NO: 30547 - DNA, 203 bp, Artificial sequence; identical to SEQ ID NO: 5736
  synthetic

SEQ ID NO: 30548 - DNA, 203 bp, Artificial sequence; identical to SEQ ID NO: 5740
  synthetic

SEQ ID NO: 30549 - DNA, 203 bp, Artificial sequence; identical to SEQ ID NO: 5744
  synthetic

SEQ ID NO: 30550 - DNA, 203 bp, Artificial sequence; identical to SEQ ID NO: 5745
  synthetic

SEQ ID NO: 30551 - DNA, 203 bp, Artificial sequence; identical to SEQ ID NO: 5750
  synthetic

SEQ ID NO: 30552 - DNA, 203 bp, Artificial sequence; identical to SEQ ID NO: 5751
  synthetic

SEQ ID NO: 30553 - DNA, 203 bp, Artificial sequence; identical to SEQ ID NO: 5752
  synthetic

SEQ ID NO: 30554 - DNA, 203 bp, Artificial sequence; identical to SEQ ID NO: 5753
  synthetic

SEQ ID NO: 30555 - DNA, 203 bp, Artificial sequence; identical to SEQ ID NO: 5754
  synthetic

SEQ ID NO: 30556 - DNA, 203 bp, Artificial sequence; identical to SEQ ID NO: 5755
  synthetic

SEQ ID NO: 30557 - DNA, 203 bp, Artificial sequence; identical to SEQ ID NO: 5756
  synthetic

SEQ ID NO: 30558 - DNA, 203 bp, Artificial sequence; identical to SEQ ID NO: 5757
  synthetic

SEQ ID NO: 30559 - DNA, 203 bp, Artificial sequence; identical to SEQ ID NO: 5758
  synthetic

SEQ ID NO: 30560 - DNA, 203 bp, Artificial sequence; identical to SEQ ID NO: 5759
  synthetic

SEQ ID NO: 30561 - DNA, 203 bp, Artificial sequence; identical to SEQ ID NO: 5764
  synthetic

SEQ ID NO: 30562 - DNA, 203 bp, Artificial sequence; identical to SEQ ID NO: 5765
  synthetic

SEQ ID NO: 30563 - DNA, 203 bp, Artificial sequence; identical to SEQ ID NO: 5766
  synthetic

SEQ ID NO: 30564 - DNA, 203 bp, Artificial sequence; identical to SEQ ID NO: 5767
  synthetic

SEQ ID NO: 30565 - DNA, 203 bp, Artificial sequence; identical to SEQ ID NO: 5768
  synthetic

SEQ ID NO: 30566 - DNA, 203 bp, Artificial sequence; identical to SEQ ID NO: 5769
  synthetic

SEQ ID NO: 30567 - DNA, 203 bp, Artificial sequence; identical to SEQ ID NO: 5770
  synthetic

SEQ ID NO: 30568 - DNA, 203 bp, Artificial sequence; identical to SEQ ID NO: 5771
  synthetic

SEQ ID NO: 30569 - DNA, 203 bp, Artificial sequence; identical to SEQ ID NO: 5772
  synthetic

SEQ ID NO: 30570 - DNA, 203 bp, Artificial sequence; identical to SEQ ID NO: 5773
  synthetic

SEQ ID NO: 30571 - DNA, 203 bp, Artificial sequence; identical to SEQ ID NO: 5774
  synthetic

SEQ ID NO: 30572 - DNA, 203 bp, Artificial sequence; identical to SEQ ID NO: 5775
  synthetic

SEQ ID NO: 30573 - DNA, 203 bp, Artificial sequence; identical to SEQ ID NO: 5776
  synthetic

SEQ ID NO: 30574 - DNA, 203 bp, Artificial sequence; identical to SEQ ID NO: 5777
  synthetic

SEQ ID NO: 30575 - DNA, 203 bp, Artificial sequence; identical to SEQ ID NO: 5778
  synthetic

SEQ ID NO: 30576 - DNA, 203 bp, Artificial sequence; identical to SEQ ID NO: 5779
  synthetic

SEQ ID NO: 30577 - DNA, 203 bp, Artificial sequence; identical to SEQ ID NO: 5780
  synthetic

SEQ ID NO: 30578 - DNA, 203 bp, Artificial sequence; identical to SEQ ID NO: 5781
  synthetic

SEQ ID NO: 30579 - DNA, 203 bp, Artificial sequence; identical to SEQ ID NO: 5782
  synthetic

SEQ ID NO: 30580 - DNA, 203 bp, Artificial sequence; identical to SEQ ID NO: 5813
  synthetic

SEQ ID NO: 30581 - DNA, 203 bp, Artificial sequence; identical to SEQ ID NO: 5814
  synthetic

SEQ ID NO: 30582 - DNA, 203 bp, Artificial sequence; identical to SEQ ID NO: 5815
  synthetic

SEQ ID NO: 30583 - DNA, 203 bp, Artificial sequence; identical to SEQ ID NO: 5816
  synthetic

SEQ ID NO: 30584 - DNA, 203 bp, Artificial sequence; identical to SEQ ID NO: 5819
  synthetic

SEQ ID NO: 30585 - DNA, 203 bp, Artificial sequence; identical to SEQ ID NO: 5824
  synthetic

SEQ ID NO: 30586 - DNA, 203 bp, Artificial sequence; identical to SEQ ID NO: 5825
  synthetic

SEQ ID NO: 30587 - DNA, 203 bp, Artificial sequence; identical to SEQ ID NO: 5826
  synthetic

SEQ ID NO: 30588 - DNA, 203 bp, Artificial sequence; identical to SEQ ID NO: 5828
  synthetic

SEQ ID NO: 30589 - DNA, 203 bp, Artificial sequence; identical to SEQ ID NO: 5829
  synthetic

SEQ ID NO: 30590 - DNA, 203 bp, Artificial sequence; identical to SEQ ID NO: 5830
  synthetic

SEQ ID NO: 30591 - DNA, 203 bp, Artificial sequence; identical to SEQ ID NO: 5831
  synthetic

SEQ ID NO: 30592 - DNA, 203 bp, Artificial sequence; identical to SEQ ID NO: 5832
  synthetic

SEQ ID NO: 30593 - DNA, 203 bp, Artificial sequence; identical to SEQ ID NO: 5833
  synthetic

SEQ ID NO: 30594 - DNA, 203 bp, Artificial sequence; identical to SEQ ID NO: 5834
  synthetic

SEQ ID NO: 30595 - DNA, 203 bp, Artificial sequence; identical to SEQ ID NO: 5843
  synthetic

SEQ ID NO: 30596 - DNA, 203 bp, Artificial sequence; identical to SEQ ID NO: 5844
  synthetic

SEQ ID NO: 30597 - DNA, 203 bp, Artificial sequence; identical to SEQ ID NO: 5845
  synthetic

SEQ ID NO: 30598 - DNA, 203 bp, Artificial sequence; identical to SEQ ID NO: 5846
  synthetic

SEQ ID NO: 30599 - DNA, 203 bp, Artificial sequence; identical to SEQ ID NO: 5848
  synthetic

SEQ ID NO: 30600 - DNA, 203 bp, Artificial sequence; identical to SEQ ID NO: 5849
  synthetic

SEQ ID NO: 30601 - DNA, 203 bp, Artificial sequence; identical to SEQ ID NO: 5850
  synthetic

SEQ ID NO: 30602 - DNA, 203 bp, Artificial sequence; identical to SEQ ID NO: 5851
  synthetic

SEQ ID NO: 30603 - DNA, 203 bp, Artificial sequence; identical to SEQ ID NO: 5852
  synthetic

SEQ ID NO: 30604 - DNA, 203 bp, Artificial sequence; identical to SEQ ID NO: 5853
  synthetic

SEQ ID NO: 30605 - DNA, 203 bp, Artificial sequence; identical to SEQ ID NO: 5854
  synthetic

SEQ ID NO: 30606 - DNA, 203 bp, Artificial sequence; identical to SEQ ID NO: 5855
  synthetic

SEQ ID NO: 30607 - DNA, 203 bp, Artificial sequence; identical to SEQ ID NO: 5861
  synthetic

SEQ ID NO: 30608 - DNA, 203 bp, Artificial sequence; identical to SEQ ID NO: 5862
  synthetic

SEQ ID NO: 30609 - DNA, 203 bp, Artificial sequence; identical to SEQ ID NO: 5863
  synthetic

SEQ ID NO: 30610 - DNA, 203 bp, Artificial sequence; identical to SEQ ID NO: 5864
  synthetic

SEQ ID NO: 30611 - DNA, 203 bp, Artificial sequence; identical to SEQ ID NO: 5865
  synthetic

SEQ ID NO: 30612 - DNA, 203 bp, Artificial sequence; identical to SEQ ID NO: 5866
  synthetic

SEQ ID NO: 30613 - DNA, 203 bp, Artificial sequence; identical to SEQ ID NO: 5867
  synthetic

SEQ ID NO: 30614 - DNA, 203 bp, Artificial sequence; identical to SEQ ID NO: 5868
  synthetic

SEQ ID NO: 30615 - DNA, 203 bp, Artificial sequence; identical to SEQ ID NO: 5869
  synthetic

SEQ ID NO: 30616 - DNA, 203 bp, Artificial sequence; identical to SEQ ID NO: 5877
  synthetic

SEQ ID NO: 30617 - DNA, 203 bp, Artificial sequence; identical to SEQ ID NO: 5878
  synthetic

SEQ ID NO: 30618 - DNA, 203 bp, Artificial sequence; identical to SEQ ID NO: 5879
  synthetic

SEQ ID NO: 30619 - DNA, 203 bp, Artificial sequence; identical to SEQ ID NO: 5883
  synthetic

SEQ ID NO: 30620 - DNA, 203 bp, Artificial sequence; identical to SEQ ID NO: 5918
  synthetic

SEQ ID NO: 30621 - DNA, 203 bp, Artificial sequence; identical to SEQ ID NO: 5920
  synthetic

SEQ ID NO: 30622 - DNA, 203 bp, Artificial sequence; identical to SEQ ID NO: 5935
  synthetic

SEQ ID NO: 30623 - DNA, 203 bp, Artificial sequence; identical to SEQ ID NO: 5936
  synthetic

SEQ ID NO: 30624 - DNA, 203 bp, Artificial sequence; identical to SEQ ID NO: 5937
  synthetic

SEQ ID NO: 30625 - DNA, 203 bp, Artificial sequence; identical to SEQ ID NO: 5938
  synthetic

SEQ ID NO: 30626 - DNA, 203 bp, Artificial sequence; identical to SEQ ID NO: 5939
  synthetic

SEQ ID NO: 30627 - DNA, 203 bp, Artificial sequence; identical to SEQ ID NO: 5940
  synthetic

SEQ ID NO: 30628 - DNA, 203 bp, Artificial sequence; identical to SEQ ID NO: 5941
  synthetic

SEQ ID NO: 30629 - DNA, 203 bp, Artificial sequence; identical to SEQ ID NO: 5979
  synthetic

SEQ ID NO: 30630 - DNA, 203 bp, Artificial sequence; identical to SEQ ID NO: 5980
  synthetic

SEQ ID NO: 30631 - DNA, 203 bp, Artificial sequence; identical to SEQ ID NO: 5981
  synthetic

SEQ ID NO: 30632 - DNA, 203 bp, Artificial sequence; identical to SEQ ID NO: 5982
  synthetic

SEQ ID NO: 30633 - DNA, 203 bp, Artificial sequence; identical to SEQ ID NO: 5983
  synthetic

SEQ ID NO: 30634 - DNA, 203 bp, Artificial sequence; identical to SEQ ID NO: 5984
  synthetic

SEQ ID NO: 30635 - DNA, 203 bp, Artificial sequence; identical to SEQ ID NO: 5985
  synthetic

SEQ ID NO: 30636 - DNA, 203 bp, Artificial sequence; identical to SEQ ID NO: 5986
  synthetic

SEQ ID NO: 30637 - DNA, 203 bp, Artificial sequence; identical to SEQ ID NO: 5987
  synthetic

SEQ ID NO: 30638 - DNA, 203 bp, Artificial sequence; identical to SEQ ID NO: 5988
  synthetic

SEQ ID NO: 30639 - DNA, 203 bp, Artificial sequence; identical to SEQ ID NO: 5989
  synthetic

SEQ ID NO: 30640 - DNA, 203 bp, Artificial sequence; identical to SEQ ID NO: 5990
  synthetic

SEQ ID NO: 30641 - DNA, 203 bp, Artificial sequence; identical to SEQ ID NO: 6007
  synthetic

SEQ ID NO: 30642 - DNA, 203 bp, Artificial sequence; identical to SEQ ID NO: 6058
  synthetic

SEQ ID NO: 30643 - DNA, 203 bp, Artificial sequence; identical to SEQ ID NO: 6059
  synthetic

SEQ ID NO: 30644 - DNA, 203 bp, Artificial sequence; identical to SEQ ID NO: 6060
  synthetic

SEQ ID NO: 30645 - DNA, 203 bp, Artificial sequence; identical to SEQ ID NO: 6079
  synthetic

SEQ ID NO: 30646 - DNA, 203 bp, Artificial sequence; identical to SEQ ID NO: 6080
  synthetic

SEQ ID NO: 30647 - DNA, 203 bp, Artificial sequence; identical to SEQ ID NO: 6081
  synthetic

SEQ ID NO: 30648 - DNA, 203 bp, Artificial sequence; identical to SEQ ID NO: 6082
  synthetic

SEQ ID NO: 30649 - DNA, 203 bp, Artificial sequence; identical to SEQ ID NO: 6095
  synthetic

SEQ ID NO: 30650 - DNA, 203 bp, Artificial sequence; identical to SEQ ID NO: 6096
  synthetic

SEQ ID NO: 30651 - DNA, 203 bp, Artificial sequence; identical to SEQ ID NO: 6097
  synthetic

SEQ ID NO: 30652 - DNA, 203 bp, Artificial sequence; identical to SEQ ID NO: 6098
  synthetic

SEQ ID NO: 30653 - DNA, 203 bp, Artificial sequence; identical to SEQ ID NO: 6099
  synthetic

SEQ ID NO: 30654 - DNA, 203 bp, Artificial sequence; identical to SEQ ID NO: 6100
  synthetic

SEQ ID NO: 30655 - DNA, 203 bp, Artificial sequence; identical to SEQ ID NO: 6101
  synthetic

SEQ ID NO: 30656 - DNA, 203 bp, Artificial sequence; identical to SEQ ID NO: 6106
  synthetic

SEQ ID NO: 30657 - DNA, 203 bp, Artificial sequence; identical to SEQ ID NO: 6108
  synthetic

SEQ ID NO: 30658 - DNA, 203 bp, Artificial sequence; identical to SEQ ID NO: 6126
  synthetic

SEQ ID NO: 30659 - DNA, 203 bp, Artificial sequence; identical to SEQ ID NO: 6134
  synthetic

SEQ ID NO: 30660 - DNA, 203 bp, Artificial sequence; identical to SEQ ID NO: 6135
  synthetic

SEQ ID NO: 30661 - DNA, 203 bp, Artificial sequence; identical to SEQ ID NO: 6136
  synthetic

SEQ ID NO: 30662 - DNA, 203 bp, Artificial sequence; identical to SEQ ID NO: 6137
  synthetic

SEQ ID NO: 30663 - DNA, 203 bp, Artificial sequence; identical to SEQ ID NO: 6138
  synthetic

SEQ ID NO: 30664 - DNA, 203 bp, Artificial sequence; identical to SEQ ID NO: 6139
  synthetic

SEQ ID NO: 30665 - DNA, 203 bp, Artificial sequence; identical to SEQ ID NO: 6140
  synthetic

SEQ ID NO: 30666 - DNA, 203 bp, Artificial sequence; identical to SEQ ID NO: 6141
  synthetic

SEQ ID NO: 30667 - DNA, 203 bp, Artificial sequence; identical to SEQ ID NO: 6142
  synthetic

SEQ ID NO: 30668 - DNA, 203 bp, Artificial sequence; identical to SEQ ID NO: 6143
  synthetic

SEQ ID NO: 30669 - DNA, 203 bp, Artificial sequence; identical to SEQ ID NO: 6144
  synthetic

SEQ ID NO: 30670 - DNA, 203 bp, Artificial sequence; identical to SEQ ID NO: 6190
  synthetic

SEQ ID NO: 30671 - DNA, 203 bp, Artificial sequence; identical to SEQ ID NO: 6191
  synthetic

SEQ ID NO: 30672 - DNA, 203 bp, Artificial sequence; identical to SEQ ID NO: 6192
  synthetic

SEQ ID NO: 30673 - DNA, 203 bp, Artificial sequence; identical to SEQ ID NO: 6193
  synthetic

SEQ ID NO: 30674 - DNA, 203 bp, Artificial sequence; identical to SEQ ID NO: 6194
  synthetic

SEQ ID NO: 30675 - DNA, 203 bp, Artificial sequence; identical to SEQ ID NO: 6195
  synthetic

SEQ ID NO: 30676 - DNA, 203 bp, Artificial sequence; identical to SEQ ID NO: 6196
  synthetic

SEQ ID NO: 30677 - DNA, 203 bp, Artificial sequence; identical to SEQ ID NO: 6197
  synthetic

SEQ ID NO: 30678 - DNA, 203 bp, Artificial sequence; identical to SEQ ID NO: 6198
  synthetic

SEQ ID NO: 30679 - DNA, 203 bp, Artificial sequence; identical to SEQ ID NO: 6199
  synthetic

SEQ ID NO: 30680 - DNA, 203 bp, Artificial sequence; identical to SEQ ID NO: 6200
  synthetic

SEQ ID NO: 30681 - DNA, 203 bp, Artificial sequence; identical to SEQ ID NO: 6201
  synthetic

SEQ ID NO: 30682 - DNA, 203 bp, Artificial sequence; identical to SEQ ID NO: 6202
  synthetic

SEQ ID NO: 30683 - DNA, 203 bp, Artificial sequence; identical to SEQ ID NO: 6226
  synthetic

SEQ ID NO: 30684 - DNA, 203 bp, Artificial sequence; identical to SEQ ID NO: 6287
  synthetic

SEQ ID NO: 30685 - DNA, 203 bp, Artificial sequence; identical to SEQ ID NO: 6301
  synthetic

SEQ ID NO: 30686 - DNA, 203 bp, Artificial sequence; identical to SEQ ID NO: 6303
  synthetic

SEQ ID NO: 30687 - DNA, 203 bp, Artificial sequence; identical to SEQ ID NO: 6305
  synthetic

SEQ ID NO: 30688 - DNA, 203 bp, Artificial sequence; identical to SEQ ID NO: 6306
  synthetic

SEQ ID NO: 30689 - DNA, 203 bp, Artificial sequence; identical to SEQ ID NO: 6307
  synthetic

SEQ ID NO: 30690 - DNA, 203 bp, Artificial sequence; identical to SEQ ID NO: 6308
  synthetic

SEQ ID NO: 30691 - DNA, 203 bp, Artificial sequence; identical to SEQ ID NO: 6309
  synthetic

SEQ ID NO: 30692 - DNA, 203 bp, Artificial sequence; identical to SEQ ID NO: 6310
  synthetic

SEQ ID NO: 30693 - DNA, 203 bp, Artificial sequence; identical to SEQ ID NO: 6311
  synthetic

SEQ ID NO: 30694 - DNA, 203 bp, Artificial sequence; identical to SEQ ID NO: 6362
  synthetic

SEQ ID NO: 30695 - DNA, 203 bp, Artificial sequence; identical to SEQ ID NO: 6364
  synthetic

SEQ ID NO: 30696 - DNA, 203 bp, Artificial sequence; identical to SEQ ID NO: 6365
  synthetic

SEQ ID NO: 30697 - DNA, 203 bp, Artificial sequence; identical to SEQ ID NO: 6366
  synthetic

SEQ ID NO: 30698 - DNA, 203 bp, Artificial sequence; identical to SEQ ID NO: 6367
  synthetic

SEQ ID NO: 30699 - DNA, 203 bp, Artificial sequence; identical to SEQ ID NO: 6368
  synthetic

SEQ ID NO: 30700 - DNA, 203 bp, Artificial sequence; identical to SEQ ID NO: 6369
  synthetic

SEQ ID NO: 30701 - DNA, 203 bp, Artificial sequence; identical to SEQ ID NO: 6370
  synthetic

SEQ ID NO: 30702 - DNA, 203 bp, Artificial sequence; identical to SEQ ID NO: 6371
  synthetic

SEQ ID NO: 30703 - DNA, 203 bp, Artificial sequence; identical to SEQ ID NO: 6372
  synthetic

SEQ ID NO: 30704 - DNA, 203 bp, Artificial sequence; identical to SEQ ID NO: 6373
  synthetic

SEQ ID NO: 30705 - DNA, 203 bp, Artificial sequence; identical to SEQ ID NO: 6374
  synthetic

SEQ ID NO: 30706 - DNA, 203 bp, Artificial sequence; identical to SEQ ID NO: 6375
  synthetic

SEQ ID NO: 30707 - DNA, 203 bp, Artificial sequence; identical to SEQ ID NO: 6376
  synthetic

SEQ ID NO: 30708 - DNA, 203 bp, Artificial sequence; identical to SEQ ID NO: 6377
  synthetic

SEQ ID NO: 30709 - DNA, 203 bp, Artificial sequence; identical to SEQ ID NO: 6378
  synthetic

SEQ ID NO: 30710 - DNA, 203 bp, Artificial sequence; identical to SEQ ID NO: 6379
  synthetic

SEQ ID NO: 30711 - DNA, 203 bp, Artificial sequence; identical to SEQ ID NO: 6380
  synthetic

SEQ ID NO: 30712 - DNA, 203 bp, Artificial sequence; identical to SEQ ID NO: 6381
  synthetic

SEQ ID NO: 30713 - DNA, 203 bp, Artificial sequence; identical to SEQ ID NO: 6382
  synthetic

SEQ ID NO: 30714 - DNA, 203 bp, Artificial sequence; identical to SEQ ID NO: 6383
  synthetic

SEQ ID NO: 30715 - DNA, 203 bp, Artificial sequence; identical to SEQ ID NO: 6385
  synthetic

SEQ ID NO: 30716 - DNA, 203 bp, Artificial sequence; identical to SEQ ID NO: 6386
  synthetic

SEQ ID NO: 30717 - DNA, 203 bp, Artificial sequence; identical to SEQ ID NO: 6387
  synthetic

SEQ ID NO: 30718 - DNA, 203 bp, Artificial sequence; identical to SEQ ID NO: 6388
  synthetic

SEQ ID NO: 30719 - DNA, 203 bp, Artificial sequence; identical to SEQ ID NO: 6389
  synthetic

SEQ ID NO: 30720 - DNA, 203 bp, Artificial sequence; identical to SEQ ID NO: 6390
  synthetic

SEQ ID NO: 30721 - DNA, 203 bp, Artificial sequence; identical to SEQ ID NO: 6391
  synthetic

SEQ ID NO: 30722 - DNA, 203 bp, Artificial sequence; identical to SEQ ID NO: 6392
  synthetic

SEQ ID NO: 30723 - DNA, 203 bp, Artificial sequence; identical to SEQ ID NO: 6393
  synthetic

SEQ ID NO: 30724 - DNA, 203 bp, Artificial sequence; identical to SEQ ID NO: 6394
  synthetic

SEQ ID NO: 30725 - DNA, 203 bp, Artificial sequence; identical to SEQ ID NO: 6395
  synthetic

SEQ ID NO: 30726 - DNA, 203 bp, Artificial sequence; identical to SEQ ID NO: 6396
  synthetic

SEQ ID NO: 30727 - DNA, 203 bp, Artificial sequence; identical to SEQ ID NO: 6397
  synthetic

SEQ ID NO: 30728 - DNA, 203 bp, Artificial sequence; identical to SEQ ID NO: 6398
  synthetic

SEQ ID NO: 30729 - DNA, 203 bp, Artificial sequence; identical to SEQ ID NO: 6399
  synthetic

SEQ ID NO: 30730 - DNA, 203 bp, Artificial sequence; identical to SEQ ID NO: 6400
  synthetic

SEQ ID NO: 30731 - DNA, 203 bp, Artificial sequence; identical to SEQ ID NO: 6401
  synthetic

SEQ ID NO: 30732 - DNA, 203 bp, Artificial sequence; identical to SEQ ID NO: 6402
  synthetic

SEQ ID NO: 30733 - DNA, 203 bp, Artificial sequence; identical to SEQ ID NO: 6403
  synthetic

SEQ ID NO: 30734 - DNA, 203 bp, Artificial sequence; identical to SEQ ID NO: 6428
  synthetic

SEQ ID NO: 30735 - DNA, 203 bp, Artificial sequence; identical to SEQ ID NO: 6438
  synthetic

SEQ ID NO: 30736 - DNA, 203 bp, Artificial sequence; identical to SEQ ID NO: 6439
  synthetic

SEQ ID NO: 30737 - DNA, 203 bp, Artificial sequence; identical to SEQ ID NO: 6440
  synthetic

SEQ ID NO: 30738 - DNA, 203 bp, Artificial sequence; identical to SEQ ID NO: 6441
  synthetic

SEQ ID NO: 30739 - DNA, 203 bp, Artificial sequence; identical to SEQ ID NO: 6442
  synthetic

SEQ ID NO: 30740 - DNA, 203 bp, Artificial sequence; identical to SEQ ID NO: 6443
  synthetic

SEQ ID NO: 30741 - DNA, 203 bp, Artificial sequence; identical to SEQ ID NO: 6444
  synthetic

SEQ ID NO: 30742 - DNA, 203 bp, Artificial sequence; identical to SEQ ID NO: 6445
  synthetic

SEQ ID NO: 30743 - DNA, 203 bp, Artificial sequence; identical to SEQ ID NO: 6446
  synthetic

SEQ ID NO: 30744 - DNA, 203 bp, Artificial sequence; identical to SEQ ID NO: 6447
  synthetic

SEQ ID NO: 30745 - DNA, 203 bp, Artificial sequence; identical to SEQ ID NO: 6448
  synthetic

SEQ ID NO: 30746 - DNA, 203 bp, Artificial sequence; identical to SEQ ID NO: 6449
  synthetic

SEQ ID NO: 30747 - DNA, 203 bp, Artificial sequence; identical to SEQ ID NO: 6450
  synthetic

SEQ ID NO: 30748 - DNA, 203 bp, Artificial sequence; identical to SEQ ID NO: 6451
  synthetic

SEQ ID NO: 30749 - DNA, 203 bp, Artificial sequence; identical to SEQ ID NO: 6452
  synthetic

SEQ ID NO: 30750 - DNA, 203 bp, Artificial sequence; identical to SEQ ID NO: 6453
  synthetic

SEQ ID NO: 30751 - DNA, 203 bp, Artificial sequence; identical to SEQ ID NO: 6454
  synthetic

SEQ ID NO: 30752 - DNA, 203 bp, Artificial sequence; identical to SEQ ID NO: 6455
  synthetic

SEQ ID NO: 30753 - DNA, 203 bp, Artificial sequence; identical to SEQ ID NO: 6456
  synthetic

SEQ ID NO: 30754 - DNA, 203 bp, Artificial sequence; identical to SEQ ID NO: 6457
  synthetic

SEQ ID NO: 30755 - DNA, 203 bp, Artificial sequence; identical to SEQ ID NO: 6458
  synthetic

SEQ ID NO: 30756 - DNA, 203 bp, Artificial sequence; identical to SEQ ID NO: 6459
  synthetic

SEQ ID NO: 30757 - DNA, 203 bp, Artificial sequence; identical to SEQ ID NO: 6460
  synthetic

SEQ ID NO: 30758 - DNA, 203 bp, Artificial sequence; identical to SEQ ID NO: 6461
  synthetic

SEQ ID NO: 30759 - DNA, 203 bp, Artificial sequence; identical to SEQ ID NO: 6462
  synthetic

SEQ ID NO: 30760 - DNA, 203 bp, Artificial sequence; identical to SEQ ID NO: 6463
  synthetic

SEQ ID NO: 30761 - DNA, 203 bp, Artificial sequence; identical to SEQ ID NO: 6464
  synthetic

SEQ ID NO: 30762 - DNA, 203 bp, Artificial sequence; identical to SEQ ID NO: 6465
  synthetic

SEQ ID NO: 30763 - DNA, 203 bp, Artificial sequence; identical to SEQ ID NO: 6466
  synthetic

SEQ ID NO: 30764 - DNA, 203 bp, Artificial sequence; identical to SEQ ID NO: 6467
  synthetic

SEQ ID NO: 30765 - DNA, 203 bp, Artificial sequence; identical to SEQ ID NO: 6468
  synthetic

SEQ ID NO: 30766 - DNA, 203 bp, Artificial sequence; identical to SEQ ID NO: 6469
  synthetic

SEQ ID NO: 30767 - DNA, 203 bp, Artificial sequence; identical to SEQ ID NO: 6470
  synthetic

SEQ ID NO: 30768 - DNA, 203 bp, Artificial sequence; identical to SEQ ID NO: 6471
  synthetic

SEQ ID NO: 30769 - DNA, 203 bp, Artificial sequence; identical to SEQ ID NO: 6472
  synthetic

SEQ ID NO: 30770 - DNA, 203 bp, Artificial sequence; identical to SEQ ID NO: 6473
  synthetic

SEQ ID NO: 30771 - DNA, 203 bp, Artificial sequence; identical to SEQ ID NO: 6474
  synthetic

SEQ ID NO: 30772 - DNA, 203 bp, Artificial sequence; identical to SEQ ID NO: 6475
  synthetic

SEQ ID NO: 30773 - DNA, 203 bp, Artificial sequence; identical to SEQ ID NO: 6476
  synthetic

SEQ ID NO: 30774 - DNA, 203 bp, Artificial sequence; identical to SEQ ID NO: 6477
  synthetic

SEQ ID NO: 30775 - DNA, 203 bp, Artificial sequence; identical to SEQ ID NO: 6478
  synthetic

SEQ ID NO: 30776 - DNA, 203 bp, Artificial sequence; identical to SEQ ID NO: 6479
  synthetic

SEQ ID NO: 30777 - DNA, 203 bp, Artificial sequence; identical to SEQ ID NO: 6480
  synthetic

SEQ ID NO: 30778 - DNA, 203 bp, Artificial sequence; identical to SEQ ID NO: 6481
  synthetic

SEQ ID NO: 30779 - DNA, 203 bp, Artificial sequence; identical to SEQ ID NO: 6482
  synthetic

SEQ ID NO: 30780 - DNA, 203 bp, Artificial sequence; identical to SEQ ID NO: 6483
  synthetic

SEQ ID NO: 30781 - DNA, 203 bp, Artificial sequence; identical to SEQ ID NO: 6484
  synthetic

SEQ ID NO: 30782 - DNA, 203 bp, Artificial sequence; identical to SEQ ID NO: 6485
  synthetic

SEQ ID NO: 30783 - DNA, 203 bp, Artificial sequence; identical to SEQ ID NO: 6488
  synthetic

SEQ ID NO: 30784 - DNA, 203 bp, Artificial sequence; identical to SEQ ID NO: 6510
  synthetic

SEQ ID NO: 30785 - DNA, 203 bp, Artificial sequence; identical to SEQ ID NO: 6514
  synthetic

SEQ ID NO: 30786 - DNA, 203 bp, Artificial sequence; identical to SEQ ID NO: 6515
  synthetic

SEQ ID NO: 30787 - DNA, 203 bp, Artificial sequence; identical to SEQ ID NO: 6516
  synthetic

SEQ ID NO: 30788 - DNA, 203 bp, Artificial sequence; identical to SEQ ID NO: 6517
  synthetic

SEQ ID NO: 30789 - DNA, 203 bp, Artificial sequence; identical to SEQ ID NO: 6518
  synthetic

SEQ ID NO: 30790 - DNA, 203 bp, Artificial sequence; identical to SEQ ID NO: 6519
  synthetic

SEQ ID NO: 30791 - DNA, 203 bp, Artificial sequence; identical to SEQ ID NO: 6520
  synthetic

SEQ ID NO: 30792 - DNA, 203 bp, Artificial sequence; identical to SEQ ID NO: 6521
  synthetic

SEQ ID NO: 30793 - DNA, 203 bp, Artificial sequence; identical to SEQ ID NO: 6522
  synthetic

SEQ ID NO: 30794 - DNA, 203 bp, Artificial sequence; identical to SEQ ID NO: 6525
  synthetic

SEQ ID NO: 30795 - DNA, 203 bp, Artificial sequence; identical to SEQ ID NO: 6526
  synthetic

SEQ ID NO: 30796 - DNA, 203 bp, Artificial sequence; identical to SEQ ID NO: 6527
  synthetic

SEQ ID NO: 30797 - DNA, 203 bp, Artificial sequence; identical to SEQ ID NO: 6528
  synthetic

SEQ ID NO: 30798 - DNA, 203 bp, Artificial sequence; identical to SEQ ID NO: 6543
  synthetic

SEQ ID NO: 30799 - DNA, 203 bp, Artificial sequence; identical to SEQ ID NO: 6544
  synthetic

SEQ ID NO: 30800 - DNA, 203 bp, Artificial sequence; identical to SEQ ID NO: 6546
  synthetic

SEQ ID NO: 30801 - DNA, 203 bp, Artificial sequence; identical to SEQ ID NO: 6547
  synthetic

SEQ ID NO: 30802 - DNA, 203 bp, Artificial sequence; identical to SEQ ID NO: 6548
  synthetic

SEQ ID NO: 30803 - DNA, 203 bp, Artificial sequence; identical to SEQ ID NO: 6549
  synthetic

SEQ ID NO: 30804 - DNA, 203 bp, Artificial sequence; identical to SEQ ID NO: 6550
  synthetic

SEQ ID NO: 30805 - DNA, 203 bp, Artificial sequence; identical to SEQ ID NO: 6551
  synthetic

SEQ ID NO: 30806 - DNA, 203 bp, Artificial sequence; identical to SEQ ID NO: 6552
  synthetic

SEQ ID NO: 30807 - DNA, 203 bp, Artificial sequence; identical to SEQ ID NO: 6553
  synthetic

SEQ ID NO: 30808 - DNA, 203 bp, Artificial sequence; identical to SEQ ID NO: 6554
  synthetic

SEQ ID NO: 30809 - DNA, 203 bp, Artificial sequence; identical to SEQ ID NO: 6555
  synthetic

SEQ ID NO: 30810 - DNA, 203 bp, Artificial sequence; identical to SEQ ID NO: 6562
  synthetic

SEQ ID NO: 30811 - DNA, 203 bp, Artificial sequence; identical to SEQ ID NO: 6563
  synthetic

SEQ ID NO: 30812 - DNA, 203 bp, Artificial sequence; identical to SEQ ID NO: 6564
  synthetic

SEQ ID NO: 30813 - DNA, 203 bp, Artificial sequence; identical to SEQ ID NO: 6565
  synthetic

SEQ ID NO: 30814 - DNA, 203 bp, Artificial sequence; identical to SEQ ID NO: 6566
  synthetic

SEQ ID NO: 30815 - DNA, 203 bp, Artificial sequence; identical to SEQ ID NO: 6567
  synthetic

SEQ ID NO: 30816 - DNA, 203 bp, Artificial sequence; identical to SEQ ID NO: 6568
  synthetic

SEQ ID NO: 30817 - DNA, 203 bp, Artificial sequence; identical to SEQ ID NO: 6569
  synthetic

SEQ ID NO: 30818 - DNA, 203 bp, Artificial sequence; identical to SEQ ID NO: 6570
  synthetic

SEQ ID NO: 30819 - DNA, 203 bp, Artificial sequence; identical to SEQ ID NO: 6571
  synthetic

SEQ ID NO: 30820 - DNA, 203 bp, Artificial sequence; identical to SEQ ID NO: 6574
  synthetic

SEQ ID NO: 30821 - DNA, 203 bp, Artificial sequence; identical to SEQ ID NO: 6575
  synthetic

SEQ ID NO: 30822 - DNA, 203 bp, Artificial sequence; identical to SEQ ID NO: 6576
  synthetic

SEQ ID NO: 30823 - DNA, 203 bp, Artificial sequence; identical to SEQ ID NO: 6577
  synthetic

SEQ ID NO: 30824 - DNA, 203 bp, Artificial sequence; identical to SEQ ID NO: 6578
  synthetic

SEQ ID NO: 30825 - DNA, 203 bp, Artificial sequence; identical to SEQ ID NO: 6579
  synthetic

SEQ ID NO: 30826 - DNA, 203 bp, Artificial sequence; identical to SEQ ID NO: 6580
  synthetic

SEQ ID NO: 30827 - DNA, 203 bp, Artificial sequence; identical to SEQ ID NO: 6581
  synthetic

SEQ ID NO: 30828 - DNA, 203 bp, Artificial sequence; identical to SEQ ID NO: 6582
  synthetic

SEQ ID NO: 30829 - DNA, 203 bp, Artificial sequence; identical to SEQ ID NO: 6583
  synthetic

SEQ ID NO: 30830 - DNA, 203 bp, Artificial sequence; identical to SEQ ID NO: 6584
  synthetic

SEQ ID NO: 30831 - DNA, 203 bp, Artificial sequence; identical to SEQ ID NO: 6585
  synthetic

SEQ ID NO: 30832 - DNA, 203 bp, Artificial sequence; identical to SEQ ID NO: 6586
  synthetic

SEQ ID NO: 30833 - DNA, 203 bp, Artificial sequence; identical to SEQ ID NO: 6606
  synthetic

SEQ ID NO: 30834 - DNA, 203 bp, Artificial sequence; identical to SEQ ID NO: 6607
  synthetic

SEQ ID NO: 30835 - DNA, 203 bp, Artificial sequence; identical to SEQ ID NO: 6608
  synthetic

SEQ ID NO: 30836 - DNA, 203 bp, Artificial sequence; identical to SEQ ID NO: 6609
  synthetic

SEQ ID NO: 30837 - DNA, 203 bp, Artificial sequence; identical to SEQ ID NO: 6610
  synthetic

SEQ ID NO: 30838 - DNA, 203 bp, Artificial sequence; identical to SEQ ID NO: 6611
  synthetic

SEQ ID NO: 30839 - DNA, 203 bp, Artificial sequence; identical to SEQ ID NO: 6612
  synthetic

SEQ ID NO: 30840 - DNA, 203 bp, Artificial sequence; identical to SEQ ID NO: 6613
  synthetic

SEQ ID NO: 30841 - DNA, 203 bp, Artificial sequence; identical to SEQ ID NO: 6614
  synthetic

SEQ ID NO: 30842 - DNA, 203 bp, Artificial sequence; identical to SEQ ID NO: 6615
  synthetic

SEQ ID NO: 30843 - DNA, 203 bp, Artificial sequence; identical to SEQ ID NO: 6616
  synthetic

SEQ ID NO: 30844 - DNA, 203 bp, Artificial sequence; identical to SEQ ID NO: 6617
  synthetic

SEQ ID NO: 30845 - DNA, 203 bp, Artificial sequence; identical to SEQ ID NO: 6618
  synthetic

SEQ ID NO: 30846 - DNA, 203 bp, Artificial sequence; identical to SEQ ID NO: 6674
  synthetic

SEQ ID NO: 30847 - DNA, 203 bp, Artificial sequence; identical to SEQ ID NO: 6682
  synthetic

SEQ ID NO: 30848 - DNA, 203 bp, Artificial sequence; identical to SEQ ID NO: 6690
  synthetic

SEQ ID NO: 30849 - DNA, 203 bp, Artificial sequence; identical to SEQ ID NO: 6691
  synthetic

SEQ ID NO: 30850 - DNA, 203 bp, Artificial sequence; identical to SEQ ID NO: 6692
  synthetic

SEQ ID NO: 30851 - DNA, 203 bp, Artificial sequence; identical to SEQ ID NO: 6693
  synthetic

SEQ ID NO: 30852 - DNA, 203 bp, Artificial sequence; identical to SEQ ID NO: 6694
  synthetic

SEQ ID NO: 30853 - DNA, 203 bp, Artificial sequence; identical to SEQ ID NO: 6695
  synthetic

SEQ ID NO: 30854 - DNA, 203 bp, Artificial sequence; identical to SEQ ID NO: 6696
  synthetic

SEQ ID NO: 30855 - DNA, 203 bp, Artificial sequence; identical to SEQ ID NO: 6697
  synthetic

SEQ ID NO: 30856 - DNA, 203 bp, Artificial sequence; identical to SEQ ID NO: 6698
  synthetic

SEQ ID NO: 30857 - DNA, 203 bp, Artificial sequence; identical to SEQ ID NO: 6699
  synthetic

SEQ ID NO: 30858 - DNA, 203 bp, Artificial sequence; identical to SEQ ID NO: 6700
  synthetic

SEQ ID NO: 30859 - DNA, 203 bp, Artificial sequence; identical to SEQ ID NO: 6701
  synthetic

SEQ ID NO: 30860 - DNA, 203 bp, Artificial sequence; identical to SEQ ID NO: 6702
  synthetic

SEQ ID NO: 30861 - DNA, 203 bp, Artificial sequence; identical to SEQ ID NO: 6703
  synthetic

SEQ ID NO: 30862 - DNA, 203 bp, Artificial sequence; identical to SEQ ID NO: 6705
  synthetic

SEQ ID NO: 30863 - DNA, 203 bp, Artificial sequence; identical to SEQ ID NO: 6710
  synthetic

SEQ ID NO: 30864 - DNA, 203 bp, Artificial sequence; identical to SEQ ID NO: 6711
  synthetic

SEQ ID NO: 30865 - DNA, 203 bp, Artificial sequence; identical to SEQ ID NO: 6729
  synthetic

SEQ ID NO: 30866 - DNA, 203 bp, Artificial sequence; identical to SEQ ID NO: 6732
  synthetic

SEQ ID NO: 30867 - DNA, 203 bp, Artificial sequence; identical to SEQ ID NO: 6733
  synthetic

SEQ ID NO: 30868 - DNA, 203 bp, Artificial sequence; identical to SEQ ID NO: 6734
  synthetic

SEQ ID NO: 30869 - DNA, 203 bp, Artificial sequence; identical to SEQ ID NO: 6735
  synthetic

SEQ ID NO: 30870 - DNA, 203 bp, Artificial sequence; identical to SEQ ID NO: 6736
  synthetic

SEQ ID NO: 30871 - DNA, 203 bp, Artificial sequence; identical to SEQ ID NO: 6737
  synthetic

SEQ ID NO: 30872 - DNA, 203 bp, Artificial sequence; identical to SEQ ID NO: 6738
  synthetic

SEQ ID NO: 30873 - DNA, 203 bp, Artificial sequence; identical to SEQ ID NO: 6739
  synthetic

SEQ ID NO: 30874 - DNA, 203 bp, Artificial sequence; identical to SEQ ID NO: 6740
  synthetic

SEQ ID NO: 30875 - DNA, 203 bp, Artificial sequence; identical to SEQ ID NO: 6741
  synthetic

SEQ ID NO: 30876 - DNA, 203 bp, Artificial sequence; identical to SEQ ID NO: 6742
  synthetic

SEQ ID NO: 30877 - DNA, 203 bp, Artificial sequence; identical to SEQ ID NO: 6743
  synthetic

SEQ ID NO: 30878 - DNA, 203 bp, Artificial sequence; identical to SEQ ID NO: 6744
  synthetic

SEQ ID NO: 30879 - DNA, 203 bp, Artificial sequence; identical to SEQ ID NO: 6745
  synthetic

SEQ ID NO: 30880 - DNA, 203 bp, Artificial sequence; identical to SEQ ID NO: 6746
  synthetic

SEQ ID NO: 30881 - DNA, 203 bp, Artificial sequence; identical to SEQ ID NO: 6747
  synthetic

SEQ ID NO: 30882 - DNA, 203 bp, Artificial sequence; identical to SEQ ID NO: 6748
  synthetic

SEQ ID NO: 30883 - DNA, 203 bp, Artificial sequence; identical to SEQ ID NO: 6749
  synthetic

SEQ ID NO: 30884 - DNA, 203 bp, Artificial sequence; identical to SEQ ID NO: 6750
  synthetic

SEQ ID NO: 30885 - DNA, 203 bp, Artificial sequence; identical to SEQ ID NO: 6751
  synthetic

SEQ ID NO: 30886 - DNA, 203 bp, Artificial sequence; identical to SEQ ID NO: 6754
  synthetic

SEQ ID NO: 30887 - DNA, 203 bp, Artificial sequence; identical to SEQ ID NO: 6755
  synthetic

SEQ ID NO: 30888 - DNA, 203 bp, Artificial sequence; identical to SEQ ID NO: 6757
  synthetic

SEQ ID NO: 30889 - DNA, 203 bp, Artificial sequence; identical to SEQ ID NO: 6758
  synthetic

SEQ ID NO: 30890 - DNA, 203 bp, Artificial sequence; identical to SEQ ID NO: 6759
  synthetic

SEQ ID NO: 30891 - DNA, 203 bp, Artificial sequence; identical to SEQ ID NO: 6776
  synthetic

SEQ ID NO: 30892 - DNA, 203 bp, Artificial sequence; identical to SEQ ID NO: 6779
  synthetic

SEQ ID NO: 30893 - DNA, 203 bp, Artificial sequence; identical to SEQ ID NO: 6782
  synthetic

SEQ ID NO: 30894 - DNA, 203 bp, Artificial sequence; identical to SEQ ID NO: 6799
  synthetic

SEQ ID NO: 30895 - DNA, 203 bp, Artificial sequence; identical to SEQ ID NO: 6808
  synthetic

SEQ ID NO: 30896 - DNA, 203 bp, Artificial sequence; identical to SEQ ID NO: 6809
  synthetic

SEQ ID NO: 30897 - DNA, 203 bp, Artificial sequence; identical to SEQ ID NO: 6810
  synthetic

SEQ ID NO: 30898 - DNA, 203 bp, Artificial sequence; identical to SEQ ID NO: 6811
  synthetic

SEQ ID NO: 30899 - DNA, 203 bp, Artificial sequence; identical to SEQ ID NO: 6812
  synthetic

SEQ ID NO: 30900 - DNA, 203 bp, Artificial sequence; identical to SEQ ID NO: 6824
  synthetic

SEQ ID NO: 30901 - DNA, 203 bp, Artificial sequence; identical to SEQ ID NO: 6826
  synthetic

SEQ ID NO: 30902 - DNA, 203 bp, Artificial sequence; identical to SEQ ID NO: 6827
  synthetic

SEQ ID NO: 30903 - DNA, 203 bp, Artificial sequence; identical to SEQ ID NO: 6828
  synthetic

SEQ ID NO: 30904 - DNA, 203 bp, Artificial sequence; identical to SEQ ID NO: 6829
  synthetic

SEQ ID NO: 30905 - DNA, 203 bp, Artificial sequence; identical to SEQ ID NO: 6830
  synthetic

SEQ ID NO: 30906 - DNA, 203 bp, Artificial sequence; identical to SEQ ID NO: 6831
  synthetic

SEQ ID NO: 30907 - DNA, 203 bp, Artificial sequence; identical to SEQ ID NO: 6832
  synthetic

SEQ ID NO: 30908 - DNA, 203 bp, Artificial sequence; identical to SEQ ID NO: 6833
  synthetic

SEQ ID NO: 30909 - DNA, 203 bp, Artificial sequence; identical to SEQ ID NO: 6834
  synthetic

SEQ ID NO: 30910 - DNA, 203 bp, Artificial sequence; identical to SEQ ID NO: 6835
  synthetic

SEQ ID NO: 30911 - DNA, 203 bp, Artificial sequence; identical to SEQ ID NO: 6836
  synthetic

SEQ ID NO: 30912 - DNA, 203 bp, Artificial sequence; identical to SEQ ID NO: 6837
  synthetic

SEQ ID NO: 30913 - DNA, 203 bp, Artificial sequence; identical to SEQ ID NO: 6838
  synthetic

SEQ ID NO: 30914 - DNA, 203 bp, Artificial sequence; identical to SEQ ID NO: 6839
  synthetic

SEQ ID NO: 30915 - DNA, 203 bp, Artificial sequence; identical to SEQ ID NO: 6840
  synthetic

SEQ ID NO: 30916 - DNA, 203 bp, Artificial sequence; identical to SEQ ID NO: 6841
  synthetic

SEQ ID NO: 30917 - DNA, 203 bp, Artificial sequence; identical to SEQ ID NO: 6842
  synthetic

SEQ ID NO: 30918 - DNA, 203 bp, Artificial sequence; identical to SEQ ID NO: 6843
  synthetic

SEQ ID NO: 30919 - DNA, 203 bp, Artificial sequence; identical to SEQ ID NO: 6844
  synthetic

SEQ ID NO: 30920 - DNA, 203 bp, Artificial sequence; identical to SEQ ID NO: 6845
  synthetic

SEQ ID NO: 30921 - DNA, 203 bp, Artificial sequence; identical to SEQ ID NO: 6846
  synthetic

SEQ ID NO: 30922 - DNA, 203 bp, Artificial sequence; identical to SEQ ID NO: 6847
  synthetic

SEQ ID NO: 30923 - DNA, 203 bp, Artificial sequence; identical to SEQ ID NO: 6848
  synthetic

SEQ ID NO: 30924 - DNA, 203 bp, Artificial sequence; identical to SEQ ID NO: 6849
  synthetic

SEQ ID NO: 30925 - DNA, 203 bp, Artificial sequence; identical to SEQ ID NO: 6850
  synthetic

SEQ ID NO: 30926 - DNA, 203 bp, Artificial sequence; identical to SEQ ID NO: 6851
  synthetic

SEQ ID NO: 30927 - DNA, 203 bp, Artificial sequence; identical to SEQ ID NO: 6852
  synthetic

SEQ ID NO: 30928 - DNA, 203 bp, Artificial sequence; identical to SEQ ID NO: 6853
  synthetic

SEQ ID NO: 30929 - DNA, 203 bp, Artificial sequence; identical to SEQ ID NO: 6854
  synthetic

SEQ ID NO: 30930 - DNA, 203 bp, Artificial sequence; identical to SEQ ID NO: 6855
  synthetic

SEQ ID NO: 30931 - DNA, 203 bp, Artificial sequence; identical to SEQ ID NO: 6856
  synthetic

SEQ ID NO: 30932 - DNA, 203 bp, Artificial sequence; identical to SEQ ID NO: 6865
  synthetic

SEQ ID NO: 30933 - DNA, 203 bp, Artificial sequence; identical to SEQ ID NO: 6866
  synthetic

SEQ ID NO: 30934 - DNA, 203 bp, Artificial sequence; identical to SEQ ID NO: 6867
  synthetic

SEQ ID NO: 30935 - DNA, 203 bp, Artificial sequence; identical to SEQ ID NO: 6868
  synthetic

SEQ ID NO: 30936 - DNA, 203 bp, Artificial sequence; identical to SEQ ID NO: 6869
  synthetic

SEQ ID NO: 30937 - DNA, 203 bp, Artificial sequence; identical to SEQ ID NO: 6875
  synthetic

SEQ ID NO: 30938 - DNA, 203 bp, Artificial sequence; identical to SEQ ID NO: 6877
  synthetic

SEQ ID NO: 30939 - DNA, 203 bp, Artificial sequence; identical to SEQ ID NO: 6883
  synthetic

SEQ ID NO: 30940 - DNA, 203 bp, Artificial sequence; identical to SEQ ID NO: 6884
  synthetic

SEQ ID NO: 30941 - DNA, 203 bp, Artificial sequence; identical to SEQ ID NO: 6910
  synthetic

SEQ ID NO: 30942 - DNA, 203 bp, Artificial sequence; identical to SEQ ID NO: 6911
  synthetic

SEQ ID NO: 30943 - DNA, 203 bp, Artificial sequence; identical to SEQ ID NO: 6912
  synthetic

SEQ ID NO: 30944 - DNA, 203 bp, Artificial sequence; identical to SEQ ID NO: 6913
  synthetic

SEQ ID NO: 30945 - DNA, 203 bp, Artificial sequence; identical to SEQ ID NO: 6914
  synthetic

SEQ ID NO: 30946 - DNA, 203 bp, Artificial sequence; identical to SEQ ID NO: 6915
  synthetic

SEQ ID NO: 30947 - DNA, 203 bp, Artificial sequence; identical to SEQ ID NO: 6916
  synthetic

SEQ ID NO: 30948 - DNA, 203 bp, Artificial sequence; identical to SEQ ID NO: 6917
  synthetic

SEQ ID NO: 30949 - DNA, 203 bp, Artificial sequence; identical to SEQ ID NO: 6918
  synthetic

SEQ ID NO: 30950 - DNA, 203 bp, Artificial sequence; identical to SEQ ID NO: 6919
  synthetic

SEQ ID NO: 30951 - DNA, 203 bp, Artificial sequence; identical to SEQ ID NO: 6920
  synthetic

SEQ ID NO: 30952 - DNA, 203 bp, Artificial sequence; identical to SEQ ID NO: 6921
  synthetic

SEQ ID NO: 30953 - DNA, 203 bp, Artificial sequence; identical to SEQ ID NO: 6922
  synthetic

SEQ ID NO: 30954 - DNA, 203 bp, Artificial sequence; identical to SEQ ID NO: 6923
  synthetic

SEQ ID NO: 30955 - DNA, 203 bp, Artificial sequence; identical to SEQ ID NO: 6931
  synthetic

SEQ ID NO: 30956 - DNA, 203 bp, Artificial sequence; identical to SEQ ID NO: 6936
  synthetic

SEQ ID NO: 30957 - DNA, 203 bp, Artificial sequence; identical to SEQ ID NO: 6937
  synthetic

SEQ ID NO: 30958 - DNA, 203 bp, Artificial sequence; identical to SEQ ID NO: 6938
  synthetic

SEQ ID NO: 30959 - DNA, 203 bp, Artificial sequence; identical to SEQ ID NO: 6939
  synthetic

SEQ ID NO: 30960 - DNA, 203 bp, Artificial sequence; identical to SEQ ID NO: 6940
  synthetic

SEQ ID NO: 30961 - DNA, 203 bp, Artificial sequence; identical to SEQ ID NO: 6946
  synthetic

SEQ ID NO: 30962 - DNA, 203 bp, Artificial sequence; identical to SEQ ID NO: 6947
  synthetic

SEQ ID NO: 30963 - DNA, 203 bp, Artificial sequence; identical to SEQ ID NO: 6960
  synthetic

SEQ ID NO: 30964 - DNA, 203 bp, Artificial sequence; identical to SEQ ID NO: 6964
  synthetic

SEQ ID NO: 30965 - DNA, 203 bp, Artificial sequence; identical to SEQ ID NO: 6976
  synthetic

SEQ ID NO: 30966 - DNA, 203 bp, Artificial sequence; identical to SEQ ID NO: 6978
  synthetic

SEQ ID NO: 30967 - DNA, 203 bp, Artificial sequence; identical to SEQ ID NO: 6979
  synthetic

SEQ ID NO: 30968 - DNA, 203 bp, Artificial sequence; identical to SEQ ID NO: 6980
  synthetic

SEQ ID NO: 30969 - DNA, 203 bp, Artificial sequence; identical to SEQ ID NO: 6981
  synthetic

SEQ ID NO: 30970 - DNA, 203 bp, Artificial sequence; identical to SEQ ID NO: 6982
  synthetic

SEQ ID NO: 30971 - DNA, 203 bp, Artificial sequence; identical to SEQ ID NO: 6983
  synthetic

SEQ ID NO: 30972 - DNA, 203 bp, Artificial sequence; identical to SEQ ID NO: 6984
  synthetic

SEQ ID NO: 30973 - DNA, 203 bp, Artificial sequence; identical to SEQ ID NO: 6985
  synthetic

SEQ ID NO: 30974 - DNA, 203 bp, Artificial sequence; identical to SEQ ID NO: 6986
  synthetic

SEQ ID NO: 30975 - DNA, 203 bp, Artificial sequence; identical to SEQ ID NO: 6987
  synthetic

SEQ ID NO: 30976 - DNA, 203 bp, Artificial sequence; identical to SEQ ID NO: 6988
  synthetic

SEQ ID NO: 30977 - DNA, 203 bp, Artificial sequence; identical to SEQ ID NO: 6989
  synthetic

SEQ ID NO: 30978 - DNA, 203 bp, Artificial sequence; identical to SEQ ID NO: 6990
  synthetic

SEQ ID NO: 30979 - DNA, 203 bp, Artificial sequence; identical to SEQ ID NO: 6991
  synthetic

SEQ ID NO: 30980 - DNA, 203 bp, Artificial sequence; identical to SEQ ID NO: 6992
  synthetic

SEQ ID NO: 30981 - DNA, 203 bp, Artificial sequence; identical to SEQ ID NO: 6993
  synthetic

SEQ ID NO: 30982 - DNA, 203 bp, Artificial sequence; identical to SEQ ID NO: 6994
  synthetic

SEQ ID NO: 30983 - DNA, 203 bp, Artificial sequence; identical to SEQ ID NO: 6995
  synthetic

SEQ ID NO: 30984 - DNA, 203 bp, Artificial sequence; identical to SEQ ID NO: 7000
  synthetic

SEQ ID NO: 30985 - DNA, 203 bp, Artificial sequence; identical to SEQ ID NO: 7001
  synthetic

SEQ ID NO: 30986 - DNA, 203 bp, Artificial sequence; identical to SEQ ID NO: 7002
  synthetic

SEQ ID NO: 30987 - DNA, 203 bp, Artificial sequence; identical to SEQ ID NO: 7003
  synthetic

SEQ ID NO: 30988 - DNA, 203 bp, Artificial sequence; identical to SEQ ID NO: 7004
  synthetic

SEQ ID NO: 30989 - DNA, 203 bp, Artificial sequence; identical to SEQ ID NO: 7005
  synthetic

SEQ ID NO: 30990 - DNA, 203 bp, Artificial sequence; identical to SEQ ID NO: 7006
  synthetic

SEQ ID NO: 30991 - DNA, 203 bp, Artificial sequence; identical to SEQ ID NO: 7007
  synthetic

SEQ ID NO: 30992 - DNA, 203 bp, Artificial sequence; identical to SEQ ID NO: 7008
  synthetic

SEQ ID NO: 30993 - DNA, 203 bp, Artificial sequence; identical to SEQ ID NO: 7009
  synthetic

SEQ ID NO: 30994 - DNA, 203 bp, Artificial sequence; identical to SEQ ID NO: 7010
  synthetic

SEQ ID NO: 30995 - DNA, 203 bp, Artificial sequence; identical to SEQ ID NO: 7011
  synthetic

SEQ ID NO: 30996 - DNA, 203 bp, Artificial sequence; identical to SEQ ID NO: 7012
  synthetic

SEQ ID NO: 30997 - DNA, 203 bp, Artificial sequence; identical to SEQ ID NO: 7013
  synthetic

SEQ ID NO: 30998 - DNA, 203 bp, Artificial sequence; identical to SEQ ID NO: 7014
  synthetic

SEQ ID NO: 30999 - DNA, 203 bp, Artificial sequence; identical to SEQ ID NO: 7015
  synthetic

SEQ ID NO: 31000 - DNA, 203 bp, Artificial sequence; identical to SEQ ID NO: 7016
  synthetic

SEQ ID NO: 31001 - DNA, 203 bp, Artificial sequence; identical to SEQ ID NO: 7017
  synthetic

SEQ ID NO: 31002 - DNA, 203 bp, Artificial sequence; identical to SEQ ID NO: 7018
  synthetic

SEQ ID NO: 31003 - DNA, 203 bp, Artificial sequence; identical to SEQ ID NO: 7019
  synthetic

SEQ ID NO: 31004 - DNA, 203 bp, Artificial sequence; identical to SEQ ID NO: 7021
  synthetic

SEQ ID NO: 31005 - DNA, 203 bp, Artificial sequence; identical to SEQ ID NO: 7022
  synthetic

SEQ ID NO: 31006 - DNA, 203 bp, Artificial sequence; identical to SEQ ID NO: 7023
  synthetic

SEQ ID NO: 31007 - DNA, 203 bp, Artificial sequence; identical to SEQ ID NO: 7024
  synthetic

SEQ ID NO: 31008 - DNA, 203 bp, Artificial sequence; identical to SEQ ID NO: 7025
  synthetic

SEQ ID NO: 31009 - DNA, 203 bp, Artificial sequence; identical to SEQ ID NO: 7026
  synthetic

SEQ ID NO: 31010 - DNA, 203 bp, Artificial sequence; identical to SEQ ID NO: 7027
  synthetic

SEQ ID NO: 31011 - DNA, 203 bp, Artificial sequence; identical to SEQ ID NO: 7028
  synthetic

SEQ ID NO: 31012 - DNA, 203 bp, Artificial sequence; identical to SEQ ID NO: 7029
  synthetic

SEQ ID NO: 31013 - DNA, 203 bp, Artificial sequence; identical to SEQ ID NO: 7030
  synthetic

SEQ ID NO: 31014 - DNA, 203 bp, Artificial sequence; identical to SEQ ID NO: 7031
  synthetic

SEQ ID NO: 31015 - DNA, 203 bp, Artificial sequence; identical to SEQ ID NO: 7032
  synthetic

SEQ ID NO: 31016 - DNA, 203 bp, Artificial sequence; identical to SEQ ID NO: 7033
  synthetic

SEQ ID NO: 31017 - DNA, 203 bp, Artificial sequence; identical to SEQ ID NO: 7034
  synthetic

SEQ ID NO: 31018 - DNA, 203 bp, Artificial sequence; identical to SEQ ID NO: 7035
  synthetic

SEQ ID NO: 31019 - DNA, 203 bp, Artificial sequence; identical to SEQ ID NO: 7036
  synthetic

SEQ ID NO: 31020 - DNA, 203 bp, Artificial sequence; identical to SEQ ID NO: 7037
  synthetic

SEQ ID NO: 31021 - DNA, 203 bp, Artificial sequence; identical to SEQ ID NO: 7038
  synthetic

SEQ ID NO: 31022 - DNA, 203 bp, Artificial sequence; identical to SEQ ID NO: 7039
  synthetic

SEQ ID NO: 31023 - DNA, 203 bp, Artificial sequence; identical to SEQ ID NO: 7040
  synthetic

SEQ ID NO: 31024 - DNA, 203 bp, Artificial sequence; identical to SEQ ID NO: 7041
  synthetic

SEQ ID NO: 31025 - DNA, 203 bp, Artificial sequence; identical to SEQ ID NO: 7042
  synthetic

SEQ ID NO: 31026 - DNA, 203 bp, Artificial sequence; identical to SEQ ID NO: 7043
  synthetic

SEQ ID NO: 31027 - DNA, 203 bp, Artificial sequence; identical to SEQ ID NO: 7044
  synthetic

SEQ ID NO: 31028 - DNA, 203 bp, Artificial sequence; identical to SEQ ID NO: 7045
  synthetic

SEQ ID NO: 31029 - DNA, 203 bp, Artificial sequence; identical to SEQ ID NO: 7046
  synthetic

SEQ ID NO: 31030 - DNA, 203 bp, Artificial sequence; identical to SEQ ID NO: 7050
  synthetic

SEQ ID NO: 31031 - DNA, 203 bp, Artificial sequence; identical to SEQ ID NO: 7051
  synthetic

SEQ ID NO: 31032 - DNA, 203 bp, Artificial sequence; identical to SEQ ID NO: 7052
  synthetic

SEQ ID NO: 31033 - DNA, 203 bp, Artificial sequence; identical to SEQ ID NO: 7053
  synthetic

SEQ ID NO: 31034 - DNA, 203 bp, Artificial sequence; identical to SEQ ID NO: 7054
  synthetic

SEQ ID NO: 31035 - DNA, 203 bp, Artificial sequence; identical to SEQ ID NO: 7055
  synthetic

SEQ ID NO: 31036 - DNA, 203 bp, Artificial sequence; identical to SEQ ID NO: 7056
  synthetic

SEQ ID NO: 31037 - DNA, 203 bp, Artificial sequence; identical to SEQ ID NO: 7057
  synthetic

SEQ ID NO: 31038 - DNA, 203 bp, Artificial sequence; identical to SEQ ID NO: 7058
  synthetic

SEQ ID NO: 31039 - DNA, 203 bp, Artificial sequence; identical to SEQ ID NO: 7059
  synthetic

SEQ ID NO: 31040 - DNA, 203 bp, Artificial sequence; identical to SEQ ID NO: 7060
  synthetic

SEQ ID NO: 31041 - DNA, 203 bp, Artificial sequence; identical to SEQ ID NO: 7061
  synthetic

SEQ ID NO: 31042 - DNA, 203 bp, Artificial sequence; identical to SEQ ID NO: 7062
  synthetic

SEQ ID NO: 31043 - DNA, 203 bp, Artificial sequence; identical to SEQ ID NO: 7063
  synthetic

SEQ ID NO: 31044 - DNA, 203 bp, Artificial sequence; identical to SEQ ID NO: 7064
  synthetic

SEQ ID NO: 31045 - DNA, 203 bp, Artificial sequence; identical to SEQ ID NO: 7080
  synthetic

SEQ ID NO: 31046 - DNA, 203 bp, Artificial sequence; identical to SEQ ID NO: 7081
  synthetic

SEQ ID NO: 31047 - DNA, 203 bp, Artificial sequence; identical to SEQ ID NO: 7082
  synthetic

SEQ ID NO: 31048 - DNA, 203 bp, Artificial sequence; identical to SEQ ID NO: 7083
  synthetic

SEQ ID NO: 31049 - DNA, 203 bp, Artificial sequence; identical to SEQ ID NO: 7084
  synthetic

SEQ ID NO: 31050 - DNA, 203 bp, Artificial sequence; identical to SEQ ID NO: 7085
  synthetic

SEQ ID NO: 31051 - DNA, 203 bp, Artificial sequence; identical to SEQ ID NO: 7086
  synthetic

SEQ ID NO: 31052 - DNA, 203 bp, Artificial sequence; identical to SEQ ID NO: 7087
  synthetic

SEQ ID NO: 31053 - DNA, 203 bp, Artificial sequence; identical to SEQ ID NO: 7113
  synthetic

SEQ ID NO: 31054 - DNA, 203 bp, Artificial sequence; identical to SEQ ID NO: 7114
  synthetic

SEQ ID NO: 31055 - DNA, 203 bp, Artificial sequence; identical to SEQ ID NO: 7115
  synthetic

SEQ ID NO: 31056 - DNA, 203 bp, Artificial sequence; identical to SEQ ID NO: 7116
  synthetic

SEQ ID NO: 31057 - DNA, 203 bp, Artificial sequence; identical to SEQ ID NO: 7117
  synthetic

SEQ ID NO: 31058 - DNA, 203 bp, Artificial sequence; identical to SEQ ID NO: 7118
  synthetic

SEQ ID NO: 31059 - DNA, 203 bp, Artificial sequence; identical to SEQ ID NO: 7119
  synthetic

SEQ ID NO: 31060 - DNA, 203 bp, Artificial sequence; identical to SEQ ID NO: 7120
  synthetic

SEQ ID NO: 31061 - DNA, 203 bp, Artificial sequence; identical to SEQ ID NO: 7121
  synthetic

SEQ ID NO: 31062 - DNA, 203 bp, Artificial sequence; identical to SEQ ID NO: 7122
  synthetic

SEQ ID NO: 31063 - DNA, 203 bp, Artificial sequence; identical to SEQ ID NO: 7123
  synthetic

SEQ ID NO: 31064 - DNA, 203 bp, Artificial sequence; identical to SEQ ID NO: 7124
  synthetic

SEQ ID NO: 31065 - DNA, 203 bp, Artificial sequence; identical to SEQ ID NO: 7136
  synthetic

SEQ ID NO: 31066 - DNA, 203 bp, Artificial sequence; identical to SEQ ID NO: 7137
  synthetic

SEQ ID NO: 31067 - DNA, 203 bp, Artificial sequence; identical to SEQ ID NO: 7138
  synthetic

SEQ ID NO: 31068 - DNA, 203 bp, Artificial sequence; identical to SEQ ID NO: 7139
  synthetic

SEQ ID NO: 31069 - DNA, 203 bp, Artificial sequence; identical to SEQ ID NO: 7140
  synthetic

SEQ ID NO: 31070 - DNA, 203 bp, Artificial sequence; identical to SEQ ID NO: 7141
  synthetic

SEQ ID NO: 31071 - DNA, 203 bp, Artificial sequence; identical to SEQ ID NO: 7142
  synthetic

SEQ ID NO: 31072 - DNA, 203 bp, Artificial sequence; identical to SEQ ID NO: 7143
  synthetic

SEQ ID NO: 31073 - DNA, 203 bp, Artificial sequence; identical to SEQ ID NO: 7144
  synthetic

SEQ ID NO: 31074 - DNA, 203 bp, Artificial sequence; identical to SEQ ID NO: 7145
  synthetic

SEQ ID NO: 31075 - DNA, 203 bp, Artificial sequence; identical to SEQ ID NO: 7149
  synthetic

SEQ ID NO: 31076 - DNA, 203 bp, Artificial sequence; identical to SEQ ID NO: 7193
  synthetic

SEQ ID NO: 31077 - DNA, 203 bp, Artificial sequence; identical to SEQ ID NO: 7211
  synthetic

SEQ ID NO: 31078 - DNA, 203 bp, Artificial sequence; identical to SEQ ID NO: 7212
  synthetic

SEQ ID NO: 31079 - DNA, 203 bp, Artificial sequence; identical to SEQ ID NO: 7213
  synthetic

SEQ ID NO: 31080 - DNA, 203 bp, Artificial sequence; identical to SEQ ID NO: 7214
  synthetic

SEQ ID NO: 31081 - DNA, 203 bp, Artificial sequence; identical to SEQ ID NO: 7215
  synthetic

SEQ ID NO: 31082 - DNA, 203 bp, Artificial sequence; identical to SEQ ID NO: 7216
  synthetic

SEQ ID NO: 31083 - DNA, 203 bp, Artificial sequence; identical to SEQ ID NO: 7217
  synthetic

SEQ ID NO: 31084 - DNA, 203 bp, Artificial sequence; identical to SEQ ID NO: 7218
  synthetic

SEQ ID NO: 31085 - DNA, 203 bp, Artificial sequence; identical to SEQ ID NO: 7219
  synthetic

SEQ ID NO: 31086 - DNA, 203 bp, Artificial sequence; identical to SEQ ID NO: 7220
  synthetic

SEQ ID NO: 31087 - DNA, 203 bp, Artificial sequence; identical to SEQ ID NO: 7221
  synthetic

SEQ ID NO: 31088 - DNA, 203 bp, Artificial sequence; identical to SEQ ID NO: 7222
  synthetic

SEQ ID NO: 31089 - DNA, 203 bp, Artificial sequence; identical to SEQ ID NO: 7223
  synthetic

SEQ ID NO: 31090 - DNA, 203 bp, Artificial sequence; identical to SEQ ID NO: 7224
  synthetic

SEQ ID NO: 31091 - DNA, 203 bp, Artificial sequence; identical to SEQ ID NO: 7225
  synthetic

SEQ ID NO: 31092 - DNA, 203 bp, Artificial sequence; identical to SEQ ID NO: 7226
  synthetic

SEQ ID NO: 31093 - DNA, 203 bp, Artificial sequence; identical to SEQ ID NO: 7227
  synthetic

SEQ ID NO: 31094 - DNA, 203 bp, Artificial sequence; identical to SEQ ID NO: 7228
  synthetic

SEQ ID NO: 31095 - DNA, 203 bp, Artificial sequence; identical to SEQ ID NO: 7229
  synthetic

SEQ ID NO: 31096 - DNA, 203 bp, Artificial sequence; identical to SEQ ID NO: 7230
  synthetic

SEQ ID NO: 31097 - DNA, 203 bp, Artificial sequence; identical to SEQ ID NO: 7231
  synthetic

SEQ ID NO: 31098 - DNA, 203 bp, Artificial sequence; identical to SEQ ID NO: 7232
  synthetic

SEQ ID NO: 31099 - DNA, 203 bp, Artificial sequence; identical to SEQ ID NO: 7233
  synthetic

SEQ ID NO: 31100 - DNA, 203 bp, Artificial sequence; identical to SEQ ID NO: 7234
  synthetic

SEQ ID NO: 31101 - DNA, 203 bp, Artificial sequence; identical to SEQ ID NO: 7235
  synthetic

SEQ ID NO: 31102 - DNA, 203 bp, Artificial sequence; identical to SEQ ID NO: 7236
  synthetic

SEQ ID NO: 31103 - DNA, 203 bp, Artificial sequence; identical to SEQ ID NO: 7237
  synthetic

SEQ ID NO: 31104 - DNA, 203 bp, Artificial sequence; identical to SEQ ID NO: 7238
  synthetic

SEQ ID NO: 31105 - DNA, 203 bp, Artificial sequence; identical to SEQ ID NO: 7255
  synthetic

SEQ ID NO: 31106 - DNA, 203 bp, Artificial sequence; identical to SEQ ID NO: 7256
  synthetic

SEQ ID NO: 31107 - DNA, 203 bp, Artificial sequence; identical to SEQ ID NO: 7257
  synthetic

SEQ ID NO: 31108 - DNA, 203 bp, Artificial sequence; identical to SEQ ID NO: 7258
  synthetic

SEQ ID NO: 31109 - DNA, 203 bp, Artificial sequence; identical to SEQ ID NO: 7260
  synthetic

SEQ ID NO: 31110 - DNA, 203 bp, Artificial sequence; identical to SEQ ID NO: 7261
  synthetic

SEQ ID NO: 31111 - DNA, 203 bp, Artificial sequence; identical to SEQ ID NO: 7262
  synthetic

SEQ ID NO: 31112 - DNA, 203 bp, Artificial sequence; identical to SEQ ID NO: 7263
  synthetic

SEQ ID NO: 31113 - DNA, 203 bp, Artificial sequence; identical to SEQ ID NO: 7264
  synthetic

SEQ ID NO: 31114 - DNA, 203 bp, Artificial sequence; identical to SEQ ID NO: 7286
  synthetic

SEQ ID NO: 31115 - DNA, 203 bp, Artificial sequence; identical to SEQ ID NO: 7287
  synthetic

SEQ ID NO: 31116 - DNA, 203 bp, Artificial sequence; identical to SEQ ID NO: 7288
  synthetic

SEQ ID NO: 31117 - DNA, 203 bp, Artificial sequence; identical to SEQ ID NO: 7289
  synthetic

SEQ ID NO: 31118 - DNA, 203 bp, Artificial sequence; identical to SEQ ID NO: 7290
  synthetic

SEQ ID NO: 31119 - DNA, 203 bp, Artificial sequence; identical to SEQ ID NO: 7291
  synthetic

SEQ ID NO: 31120 - DNA, 203 bp, Artificial sequence; identical to SEQ ID NO: 7293
  synthetic

SEQ ID NO: 31121 - DNA, 203 bp, Artificial sequence; identical to SEQ ID NO: 7294
  synthetic

SEQ ID NO: 31122 - DNA, 203 bp, Artificial sequence; identical to SEQ ID NO: 7295
  synthetic

SEQ ID NO: 31123 - DNA, 203 bp, Artificial sequence; identical to SEQ ID NO: 7296
  synthetic

SEQ ID NO: 31124 - DNA, 203 bp, Artificial sequence; identical to SEQ ID NO: 7297
  synthetic

SEQ ID NO: 31125 - DNA, 203 bp, Artificial sequence; identical to SEQ ID NO: 7298
  synthetic

SEQ ID NO: 31126 - DNA, 203 bp, Artificial sequence; identical to SEQ ID NO: 7300
  synthetic

SEQ ID NO: 31127 - DNA, 203 bp, Artificial sequence; identical to SEQ ID NO: 7301
  synthetic

SEQ ID NO: 31128 - DNA, 203 bp, Artificial sequence; identical to SEQ ID NO: 7302
  synthetic

SEQ ID NO: 31129 - DNA, 203 bp, Artificial sequence; identical to SEQ ID NO: 7303
  synthetic

SEQ ID NO: 31130 - DNA, 203 bp, Artificial sequence; identical to SEQ ID NO: 7304
  synthetic

SEQ ID NO: 31131 - DNA, 203 bp, Artificial sequence; identical to SEQ ID NO: 7305
  synthetic

SEQ ID NO: 31132 - DNA, 203 bp, Artificial sequence; identical to SEQ ID NO: 7306
  synthetic

SEQ ID NO: 31133 - DNA, 203 bp, Artificial sequence; identical to SEQ ID NO: 7307
  synthetic

SEQ ID NO: 31134 - DNA, 203 bp, Artificial sequence; identical to SEQ ID NO: 7308
  synthetic

SEQ ID NO: 31135 - DNA, 203 bp, Artificial sequence; identical to SEQ ID NO: 7309
  synthetic

SEQ ID NO: 31136 - DNA, 203 bp, Artificial sequence; identical to SEQ ID NO: 7310
  synthetic

SEQ ID NO: 31137 - DNA, 203 bp, Artificial sequence; identical to SEQ ID NO: 7311
  synthetic

SEQ ID NO: 31138 - DNA, 203 bp, Artificial sequence; identical to SEQ ID NO: 7312
  synthetic

SEQ ID NO: 31139 - DNA, 203 bp, Artificial sequence; identical to SEQ ID NO: 7313
  synthetic

SEQ ID NO: 31140 - DNA, 203 bp, Artificial sequence; identical to SEQ ID NO: 7314
  synthetic

SEQ ID NO: 31141 - DNA, 203 bp, Artificial sequence; identical to SEQ ID NO: 7315
  synthetic

SEQ ID NO: 31142 - DNA, 203 bp, Artificial sequence; identical to SEQ ID NO: 7316
  synthetic

SEQ ID NO: 31143 - DNA, 203 bp, Artificial sequence; identical to SEQ ID NO: 7317
  synthetic

SEQ ID NO: 31144 - DNA, 203 bp, Artificial sequence; identical to SEQ ID NO: 7318
  synthetic

SEQ ID NO: 31145 - DNA, 203 bp, Artificial sequence; identical to SEQ ID NO: 7319
  synthetic

SEQ ID NO: 31146 - DNA, 203 bp, Artificial sequence; identical to SEQ ID NO: 7320
  synthetic

SEQ ID NO: 31147 - DNA, 203 bp, Artificial sequence; identical to SEQ ID NO: 7321
  synthetic

SEQ ID NO: 31148 - DNA, 203 bp, Artificial sequence; identical to SEQ ID NO: 7322
  synthetic

SEQ ID NO: 31149 - DNA, 203 bp, Artificial sequence; identical to SEQ ID NO: 7323
  synthetic

SEQ ID NO: 31150 - DNA, 203 bp, Artificial sequence; identical to SEQ ID NO: 7324
  synthetic

SEQ ID NO: 31151 - DNA, 203 bp, Artificial sequence; identical to SEQ ID NO: 7325
  synthetic

SEQ ID NO: 31152 - DNA, 203 bp, Artificial sequence; identical to SEQ ID NO: 7326
  synthetic

SEQ ID NO: 31153 - DNA, 203 bp, Artificial sequence; identical to SEQ ID NO: 7327
  synthetic

SEQ ID NO: 31154 - DNA, 203 bp, Artificial sequence; identical to SEQ ID NO: 7329
  synthetic

SEQ ID NO: 31155 - DNA, 203 bp, Artificial sequence; identical to SEQ ID NO: 7336
  synthetic

SEQ ID NO: 31156 - DNA, 203 bp, Artificial sequence; identical to SEQ ID NO: 7345
  synthetic

SEQ ID NO: 31157 - DNA, 203 bp, Artificial sequence; identical to SEQ ID NO: 7350
  synthetic

SEQ ID NO: 31158 - DNA, 203 bp, Artificial sequence; identical to SEQ ID NO: 7351
  synthetic

SEQ ID NO: 31159 - DNA, 203 bp, Artificial sequence; identical to SEQ ID NO: 7352
  synthetic

SEQ ID NO: 31160 - DNA, 203 bp, Artificial sequence; identical to SEQ ID NO: 7353
  synthetic

SEQ ID NO: 31161 - DNA, 203 bp, Artificial sequence; identical to SEQ ID NO: 7354
  synthetic

SEQ ID NO: 31162 - DNA, 203 bp, Artificial sequence; identical to SEQ ID NO: 7356
  synthetic

SEQ ID NO: 31163 - DNA, 203 bp, Artificial sequence; identical to SEQ ID NO: 7357
  synthetic

SEQ ID NO: 31164 - DNA, 203 bp, Artificial sequence; identical to SEQ ID NO: 7358
  synthetic

SEQ ID NO: 31165 - DNA, 203 bp, Artificial sequence; identical to SEQ ID NO: 7359
  synthetic

SEQ ID NO: 31166 - DNA, 203 bp, Artificial sequence; identical to SEQ ID NO: 7360
  synthetic

SEQ ID NO: 31167 - DNA, 203 bp, Artificial sequence; identical to SEQ ID NO: 7361
  synthetic

SEQ ID NO: 31168 - DNA, 203 bp, Artificial sequence; identical to SEQ ID NO: 7362
  synthetic

SEQ ID NO: 31169 - DNA, 203 bp, Artificial sequence; identical to SEQ ID NO: 7363
  synthetic

SEQ ID NO: 31170 - DNA, 203 bp, Artificial sequence; identical to SEQ ID NO: 7366
  synthetic

SEQ ID NO: 31171 - DNA, 203 bp, Artificial sequence; identical to SEQ ID NO: 7367
  synthetic

SEQ ID NO: 31172 - DNA, 203 bp, Artificial sequence; identical to SEQ ID NO: 7375
  synthetic

SEQ ID NO: 31173 - DNA, 203 bp, Artificial sequence; identical to SEQ ID NO: 7376
  synthetic

SEQ ID NO: 31174 - DNA, 203 bp, Artificial sequence; identical to SEQ ID NO: 7377
  synthetic

SEQ ID NO: 31175 - DNA, 203 bp, Artificial sequence; identical to SEQ ID NO: 7378
  synthetic

SEQ ID NO: 31176 - DNA, 203 bp, Artificial sequence; identical to SEQ ID NO: 7379
  synthetic

SEQ ID NO: 31177 - DNA, 203 bp, Artificial sequence; identical to SEQ ID NO: 7380
  synthetic

SEQ ID NO: 31178 - DNA, 203 bp, Artificial sequence; identical to SEQ ID NO: 7381
  synthetic

SEQ ID NO: 31179 - DNA, 203 bp, Artificial sequence; identical to SEQ ID NO: 7382
  synthetic

SEQ ID NO: 31180 - DNA, 203 bp, Artificial sequence; identical to SEQ ID NO: 7387
  synthetic

SEQ ID NO: 31181 - DNA, 203 bp, Artificial sequence; identical to SEQ ID NO: 7388
  synthetic

SEQ ID NO: 31182 - DNA, 203 bp, Artificial sequence; identical to SEQ ID NO: 7389
  synthetic

SEQ ID NO: 31183 - DNA, 203 bp, Artificial sequence; identical to SEQ ID NO: 7390
  synthetic

SEQ ID NO: 31184 - DNA, 203 bp, Artificial sequence; identical to SEQ ID NO: 7391
  synthetic

SEQ ID NO: 31185 - DNA, 203 bp, Artificial sequence; identical to SEQ ID NO: 7392
  synthetic

SEQ ID NO: 31186 - DNA, 203 bp, Artificial sequence; identical to SEQ ID NO: 7393
  synthetic

SEQ ID NO: 31187 - DNA, 203 bp, Artificial sequence; identical to SEQ ID NO: 7394
  synthetic

SEQ ID NO: 31188 - DNA, 203 bp, Artificial sequence; identical to SEQ ID NO: 7395
  synthetic

SEQ ID NO: 31189 - DNA, 203 bp, Artificial sequence; identical to SEQ ID NO: 7396
  synthetic

SEQ ID NO: 31190 - DNA, 203 bp, Artificial sequence; identical to SEQ ID NO: 7400
  synthetic

SEQ ID NO: 31191 - DNA, 203 bp, Artificial sequence; identical to SEQ ID NO: 7416
  synthetic

SEQ ID NO: 31192 - DNA, 203 bp, Artificial sequence; identical to SEQ ID NO: 7418
  synthetic

SEQ ID NO: 31193 - DNA, 203 bp, Artificial sequence; identical to SEQ ID NO: 7466
  synthetic

SEQ ID NO: 31194 - DNA, 203 bp, Artificial sequence; identical to SEQ ID NO: 7470
  synthetic

SEQ ID NO: 31195 - DNA, 203 bp, Artificial sequence; identical to SEQ ID NO: 7473
  synthetic

SEQ ID NO: 31196 - DNA, 203 bp, Artificial sequence; identical to SEQ ID NO: 7498
  synthetic

SEQ ID NO: 31197 - DNA, 203 bp, Artificial sequence; identical to SEQ ID NO: 7499
  synthetic

SEQ ID NO: 31198 - DNA, 203 bp, Artificial sequence; identical to SEQ ID NO: 7506
  synthetic

SEQ ID NO: 31199 - DNA, 203 bp, Artificial sequence; identical to SEQ ID NO: 7508
  synthetic

SEQ ID NO: 31200 - DNA, 203 bp, Artificial sequence; identical to SEQ ID NO: 7532
  synthetic

SEQ ID NO: 31201 - DNA, 203 bp, Artificial sequence; identical to SEQ ID NO: 7569
  synthetic

SEQ ID NO: 31202 - DNA, 203 bp, Artificial sequence; identical to SEQ ID NO: 7612
  synthetic

SEQ ID NO: 31203 - DNA, 203 bp, Artificial sequence; identical to SEQ ID NO: 7647
  synthetic

SEQ ID NO: 31204 - DNA, 203 bp, Artificial sequence; identical to SEQ ID NO: 7648
  synthetic

SEQ ID NO: 31205 - DNA, 203 bp, Artificial sequence; identical to SEQ ID NO: 7649
  synthetic

SEQ ID NO: 31206 - DNA, 203 bp, Artificial sequence; identical to SEQ ID NO: 7652
  synthetic

SEQ ID NO: 31207 - DNA, 203 bp, Artificial sequence; identical to SEQ ID NO: 7666
  synthetic

SEQ ID NO: 31208 - DNA, 203 bp, Artificial sequence; identical to SEQ ID NO: 7689
  synthetic

SEQ ID NO: 31209 - DNA, 203 bp, Artificial sequence; identical to SEQ ID NO: 7692
  synthetic

SEQ ID NO: 31210 - DNA, 203 bp, Artificial sequence; identical to SEQ ID NO: 7693
  synthetic

SEQ ID NO: 31211 - DNA, 203 bp, Artificial sequence; identical to SEQ ID NO: 7704
  synthetic

SEQ ID NO: 31212 - DNA, 203 bp, Artificial sequence; identical to SEQ ID NO: 7713
  synthetic

SEQ ID NO: 31213 - DNA, 203 bp, Artificial sequence; identical to SEQ ID NO: 7715
  synthetic

SEQ ID NO: 31214 - DNA, 203 bp, Artificial sequence; identical to SEQ ID NO: 7716
  synthetic

SEQ ID NO: 31215 - DNA, 203 bp, Artificial sequence; identical to SEQ ID NO: 7717
  synthetic

SEQ ID NO: 31216 - DNA, 203 bp, Artificial sequence; identical to SEQ ID NO: 7718
  synthetic

SEQ ID NO: 31217 - DNA, 203 bp, Artificial sequence; identical to SEQ ID NO: 7719
  synthetic

SEQ ID NO: 31218 - DNA, 203 bp, Artificial sequence; identical to SEQ ID NO: 7720
  synthetic

SEQ ID NO: 31219 - DNA, 203 bp, Artificial sequence; identical to SEQ ID NO: 7721
  synthetic

SEQ ID NO: 31220 - DNA, 203 bp, Artificial sequence; identical to SEQ ID NO: 7722
  synthetic

SEQ ID NO: 31221 - DNA, 203 bp, Artificial sequence; identical to SEQ ID NO: 7723
  synthetic

SEQ ID NO: 31222 - DNA, 203 bp, Artificial sequence; identical to SEQ ID NO: 7724
  synthetic

SEQ ID NO: 31223 - DNA, 203 bp, Artificial sequence; identical to SEQ ID NO: 7725
  synthetic

SEQ ID NO: 31224 - DNA, 203 bp, Artificial sequence; identical to SEQ ID NO: 7726
  synthetic

SEQ ID NO: 31225 - DNA, 203 bp, Artificial sequence; identical to SEQ ID NO: 7727
  synthetic

SEQ ID NO: 31226 - DNA, 203 bp, Artificial sequence; identical to SEQ ID NO: 7728
  synthetic

SEQ ID NO: 31227 - DNA, 203 bp, Artificial sequence; identical to SEQ ID NO: 7729
  synthetic

SEQ ID NO: 31228 - DNA, 203 bp, Artificial sequence; identical to SEQ ID NO: 7730
  synthetic

SEQ ID NO: 31229 - DNA, 203 bp, Artificial sequence; identical to SEQ ID NO: 7731
  synthetic

SEQ ID NO: 31230 - DNA, 203 bp, Artificial sequence; identical to SEQ ID NO: 7732
  synthetic

SEQ ID NO: 31231 - DNA, 203 bp, Artificial sequence; identical to SEQ ID NO: 7733
  synthetic

SEQ ID NO: 31232 - DNA, 203 bp, Artificial sequence; identical to SEQ ID NO: 7734
  synthetic

SEQ ID NO: 31233 - DNA, 203 bp, Artificial sequence; identical to SEQ ID NO: 7735
  synthetic

SEQ ID NO: 31234 - DNA, 203 bp, Artificial sequence; identical to SEQ ID NO: 7736
  synthetic

SEQ ID NO: 31235 - DNA, 203 bp, Artificial sequence; identical to SEQ ID NO: 7737
  synthetic

SEQ ID NO: 31236 - DNA, 203 bp, Artificial sequence; identical to SEQ ID NO: 7738
  synthetic

SEQ ID NO: 31237 - DNA, 203 bp, Artificial sequence; identical to SEQ ID NO: 7739
  synthetic

SEQ ID NO: 31238 - DNA, 203 bp, Artificial sequence; identical to SEQ ID NO: 7740
  synthetic

SEQ ID NO: 31239 - DNA, 203 bp, Artificial sequence; identical to SEQ ID NO: 7742
  synthetic

SEQ ID NO: 31240 - DNA, 203 bp, Artificial sequence; identical to SEQ ID NO: 7743
  synthetic

SEQ ID NO: 31241 - DNA, 203 bp, Artificial sequence; identical to SEQ ID NO: 7744
  synthetic

SEQ ID NO: 31242 - DNA, 203 bp, Artificial sequence; identical to SEQ ID NO: 7745
  synthetic

SEQ ID NO: 31243 - DNA, 203 bp, Artificial sequence; identical to SEQ ID NO: 7746
  synthetic

SEQ ID NO: 31244 - DNA, 203 bp, Artificial sequence; identical to SEQ ID NO: 7747
  synthetic

SEQ ID NO: 31245 - DNA, 203 bp, Artificial sequence; identical to SEQ ID NO: 7748
  synthetic

SEQ ID NO: 31246 - DNA, 203 bp, Artificial sequence; identical to SEQ ID NO: 7749
  synthetic

SEQ ID NO: 31247 - DNA, 203 bp, Artificial sequence; identical to SEQ ID NO: 7750
  synthetic

SEQ ID NO: 31248 - DNA, 203 bp, Artificial sequence; identical to SEQ ID NO: 7751
  synthetic

SEQ ID NO: 31249 - DNA, 203 bp, Artificial sequence; identical to SEQ ID NO: 7752
  synthetic

SEQ ID NO: 31250 - DNA, 203 bp, Artificial sequence; identical to SEQ ID NO: 7753
  synthetic

SEQ ID NO: 31251 - DNA, 203 bp, Artificial sequence; identical to SEQ ID NO: 7754
  synthetic

SEQ ID NO: 31252 - DNA, 203 bp, Artificial sequence; identical to SEQ ID NO: 7755
  synthetic

SEQ ID NO: 31253 - DNA, 203 bp, Artificial sequence; identical to SEQ ID NO: 7756
  synthetic

SEQ ID NO: 31254 - DNA, 203 bp, Artificial sequence; identical to SEQ ID NO: 7757
  synthetic

SEQ ID NO: 31255 - DNA, 203 bp, Artificial sequence; identical to SEQ ID NO: 7758
  synthetic

SEQ ID NO: 31256 - DNA, 203 bp, Artificial sequence; identical to SEQ ID NO: 7759
  synthetic

SEQ ID NO: 31257 - DNA, 203 bp, Artificial sequence; identical to SEQ ID NO: 7760
  synthetic

SEQ ID NO: 31258 - DNA, 203 bp, Artificial sequence; identical to SEQ ID NO: 7762
  synthetic

SEQ ID NO: 31259 - DNA, 203 bp, Artificial sequence; identical to SEQ ID NO: 7763
  synthetic

SEQ ID NO: 31260 - DNA, 203 bp, Artificial sequence; identical to SEQ ID NO: 7764
  synthetic

SEQ ID NO: 31261 - DNA, 203 bp, Artificial sequence; identical to SEQ ID NO: 7765
  synthetic

SEQ ID NO: 31262 - DNA, 203 bp, Artificial sequence; identical to SEQ ID NO: 7766
  synthetic

SEQ ID NO: 31263 - DNA, 203 bp, Artificial sequence; identical to SEQ ID NO: 7767
  synthetic

SEQ ID NO: 31264 - DNA, 203 bp, Artificial sequence; identical to SEQ ID NO: 7768
  synthetic

SEQ ID NO: 31265 - DNA, 203 bp, Artificial sequence; identical to SEQ ID NO: 7769
  synthetic

SEQ ID NO: 31266 - DNA, 203 bp, Artificial sequence; identical to SEQ ID NO: 7770
  synthetic

SEQ ID NO: 31267 - DNA, 203 bp, Artificial sequence; identical to SEQ ID NO: 7771
  synthetic

SEQ ID NO: 31268 - DNA, 203 bp, Artificial sequence; identical to SEQ ID NO: 7772
  synthetic

SEQ ID NO: 31269 - DNA, 203 bp, Artificial sequence; identical to SEQ ID NO: 7773
  synthetic

SEQ ID NO: 31270 - DNA, 203 bp, Artificial sequence; identical to SEQ ID NO: 7774
  synthetic

SEQ ID NO: 31271 - DNA, 203 bp, Artificial sequence; identical to SEQ ID NO: 7775
  synthetic

SEQ ID NO: 31272 - DNA, 203 bp, Artificial sequence; identical to SEQ ID NO: 7776
  synthetic

SEQ ID NO: 31273 - DNA, 203 bp, Artificial sequence; identical to SEQ ID NO: 7777
  synthetic

SEQ ID NO: 31274 - DNA, 203 bp, Artificial sequence; identical to SEQ ID NO: 7778
  synthetic

SEQ ID NO: 31275 - DNA, 203 bp, Artificial sequence; identical to SEQ ID NO: 7779
  synthetic

SEQ ID NO: 31276 - DNA, 203 bp, Artificial sequence; identical to SEQ ID NO: 7780
  synthetic

SEQ ID NO: 31277 - DNA, 203 bp, Artificial sequence; identical to SEQ ID NO: 7781
  synthetic

SEQ ID NO: 31278 - DNA, 203 bp, Artificial sequence; identical to SEQ ID NO: 7785
  synthetic

SEQ ID NO: 31279 - DNA, 203 bp, Artificial sequence; identical to SEQ ID NO: 7786
  synthetic

SEQ ID NO: 31280 - DNA, 203 bp, Artificial sequence; identical to SEQ ID NO: 7787
  synthetic

SEQ ID NO: 31281 - DNA, 203 bp, Artificial sequence; identical to SEQ ID NO: 7788
  synthetic

SEQ ID NO: 31282 - DNA, 203 bp, Artificial sequence; identical to SEQ ID NO: 7789
  synthetic

SEQ ID NO: 31283 - DNA, 203 bp, Artificial sequence; identical to SEQ ID NO: 7790
  synthetic

SEQ ID NO: 31284 - DNA, 203 bp, Artificial sequence; identical to SEQ ID NO: 7791
  synthetic

SEQ ID NO: 31285 - DNA, 203 bp, Artificial sequence; identical to SEQ ID NO: 7792
  synthetic

SEQ ID NO: 31286 - DNA, 203 bp, Artificial sequence; identical to SEQ ID NO: 7793
  synthetic

SEQ ID NO: 31287 - DNA, 203 bp, Artificial sequence; identical to SEQ ID NO: 7794
  synthetic

SEQ ID NO: 31288 - DNA, 203 bp, Artificial sequence; identical to SEQ ID NO: 7795
  synthetic

SEQ ID NO: 31289 - DNA, 203 bp, Artificial sequence; identical to SEQ ID NO: 7796
  synthetic

SEQ ID NO: 31290 - DNA, 203 bp, Artificial sequence; identical to SEQ ID NO: 7797
  synthetic

SEQ ID NO: 31291 - DNA, 203 bp, Artificial sequence; identical to SEQ ID NO: 7798
  synthetic

SEQ ID NO: 31292 - DNA, 203 bp, Artificial sequence; identical to SEQ ID NO: 7799
  synthetic

SEQ ID NO: 31293 - DNA, 203 bp, Artificial sequence; identical to SEQ ID NO: 7800
  synthetic

SEQ ID NO: 31294 - DNA, 203 bp, Artificial sequence; identical to SEQ ID NO: 7801
  synthetic

SEQ ID NO: 31295 - DNA, 203 bp, Artificial sequence; identical to SEQ ID NO: 7802
  synthetic

SEQ ID NO: 31296 - DNA, 203 bp, Artificial sequence; identical to SEQ ID NO: 7803
  synthetic

SEQ ID NO: 31297 - DNA, 203 bp, Artificial sequence; identical to SEQ ID NO: 7804
  synthetic

SEQ ID NO: 31298 - DNA, 203 bp, Artificial sequence; identical to SEQ ID NO: 7805
  synthetic

SEQ ID NO: 31299 - DNA, 203 bp, Artificial sequence; identical to SEQ ID NO: 7806
  synthetic

SEQ ID NO: 31300 - DNA, 203 bp, Artificial sequence; identical to SEQ ID NO: 7807
  synthetic

SEQ ID NO: 31301 - DNA, 203 bp, Artificial sequence; identical to SEQ ID NO: 7808
  synthetic

SEQ ID NO: 31302 - DNA, 203 bp, Artificial sequence; identical to SEQ ID NO: 7810
  synthetic

SEQ ID NO: 31303 - DNA, 203 bp, Artificial sequence; identical to SEQ ID NO: 7811
  synthetic

SEQ ID NO: 31304 - DNA, 203 bp, Artificial sequence; identical to SEQ ID NO: 7812
  synthetic

SEQ ID NO: 31305 - DNA, 203 bp, Artificial sequence; identical to SEQ ID NO: 7813
  synthetic

SEQ ID NO: 31306 - DNA, 203 bp, Artificial sequence; identical to SEQ ID NO: 7814
  synthetic

SEQ ID NO: 31307 - DNA, 203 bp, Artificial sequence; identical to SEQ ID NO: 7815
  synthetic

SEQ ID NO: 31308 - DNA, 203 bp, Artificial sequence; identical to SEQ ID NO: 7816
  synthetic

SEQ ID NO: 31309 - DNA, 203 bp, Artificial sequence; identical to SEQ ID NO: 7817
  synthetic

SEQ ID NO: 31310 - DNA, 203 bp, Artificial sequence; identical to SEQ ID NO: 7818
  synthetic

SEQ ID NO: 31311 - DNA, 203 bp, Artificial sequence; identical to SEQ ID NO: 7819
  synthetic

SEQ ID NO: 31312 - DNA, 203 bp, Artificial sequence; identical to SEQ ID NO: 7831
  synthetic

SEQ ID NO: 31313 - DNA, 203 bp, Artificial sequence; identical to SEQ ID NO: 7832
  synthetic

SEQ ID NO: 31314 - DNA, 203 bp, Artificial sequence; identical to SEQ ID NO: 7833
  synthetic

SEQ ID NO: 31315 - DNA, 203 bp, Artificial sequence; identical to SEQ ID NO: 7834
  synthetic

SEQ ID NO: 31316 - DNA, 203 bp, Artificial sequence; identical to SEQ ID NO: 7835
  synthetic

SEQ ID NO: 31317 - DNA, 203 bp, Artificial sequence; identical to SEQ ID NO: 7836
  synthetic

SEQ ID NO: 31318 - DNA, 203 bp, Artificial sequence; identical to SEQ ID NO: 7837
  synthetic

SEQ ID NO: 31319 - DNA, 203 bp, Artificial sequence; identical to SEQ ID NO: 7838
  synthetic

SEQ ID NO: 31320 - DNA, 203 bp, Artificial sequence; identical to SEQ ID NO: 7839
  synthetic

SEQ ID NO: 31321 - DNA, 203 bp, Artificial sequence; identical to SEQ ID NO: 7840
  synthetic

SEQ ID NO: 31322 - DNA, 203 bp, Artificial sequence; identical to SEQ ID NO: 7841
  synthetic

SEQ ID NO: 31323 - DNA, 203 bp, Artificial sequence; identical to SEQ ID NO: 7842
  synthetic

SEQ ID NO: 31324 - DNA, 203 bp, Artificial sequence; identical to SEQ ID NO: 7843
  synthetic

SEQ ID NO: 31325 - DNA, 203 bp, Artificial sequence; identical to SEQ ID NO: 7844
  synthetic

SEQ ID NO: 31326 - DNA, 203 bp, Artificial sequence; identical to SEQ ID NO: 7845
  synthetic

SEQ ID NO: 31327 - DNA, 203 bp, Artificial sequence; identical to SEQ ID NO: 7846
  synthetic

SEQ ID NO: 31328 - DNA, 203 bp, Artificial sequence; identical to SEQ ID NO: 7847
  synthetic

SEQ ID NO: 31329 - DNA, 203 bp, Artificial sequence; identical to SEQ ID NO: 7848
  synthetic

SEQ ID NO: 31330 - DNA, 203 bp, Artificial sequence; identical to SEQ ID NO: 7849
  synthetic

SEQ ID NO: 31331 - DNA, 203 bp, Artificial sequence; identical to SEQ ID NO: 7850
  synthetic

SEQ ID NO: 31332 - DNA, 203 bp, Artificial sequence; identical to SEQ ID NO: 7851
  synthetic

SEQ ID NO: 31333 - DNA, 203 bp, Artificial sequence; identical to SEQ ID NO: 7852
  synthetic

SEQ ID NO: 31334 - DNA, 203 bp, Artificial sequence; identical to SEQ ID NO: 7853
  synthetic

SEQ ID NO: 31335 - DNA, 203 bp, Artificial sequence; identical to SEQ ID NO: 7854
  synthetic

SEQ ID NO: 31336 - DNA, 203 bp, Artificial sequence; identical to SEQ ID NO: 7855
  synthetic

SEQ ID NO: 31337 - DNA, 203 bp, Artificial sequence; identical to SEQ ID NO: 7857
  synthetic

SEQ ID NO: 31338 - DNA, 203 bp, Artificial sequence; identical to SEQ ID NO: 7861
  synthetic

SEQ ID NO: 31339 - DNA, 203 bp, Artificial sequence; identical to SEQ ID NO: 7862
  synthetic

SEQ ID NO: 31340 - DNA, 203 bp, Artificial sequence; identical to SEQ ID NO: 7863
  synthetic

SEQ ID NO: 31341 - DNA, 203 bp, Artificial sequence; identical to SEQ ID NO: 7864
  synthetic

SEQ ID NO: 31342 - DNA, 203 bp, Artificial sequence; identical to SEQ ID NO: 7865
  synthetic

SEQ ID NO: 31343 - DNA, 203 bp, Artificial sequence; identical to SEQ ID NO: 7866
  synthetic

SEQ ID NO: 31344 - DNA, 203 bp, Artificial sequence; identical to SEQ ID NO: 7867
  synthetic

SEQ ID NO: 31345 - DNA, 203 bp, Artificial sequence; identical to SEQ ID NO: 7868
  synthetic

SEQ ID NO: 31346 - DNA, 203 bp, Artificial sequence; identical to SEQ ID NO: 7869
  synthetic

SEQ ID NO: 31347 - DNA, 203 bp, Artificial sequence; identical to SEQ ID NO: 7870
  synthetic

SEQ ID NO: 31348 - DNA, 203 bp, Artificial sequence; identical to SEQ ID NO: 7871
  synthetic

SEQ ID NO: 31349 - DNA, 203 bp, Artificial sequence; identical to SEQ ID NO: 7872
  synthetic

SEQ ID NO: 31350 - DNA, 203 bp, Artificial sequence; identical to SEQ ID NO: 7873
  synthetic

SEQ ID NO: 31351 - DNA, 203 bp, Artificial sequence; identical to SEQ ID NO: 7885
  synthetic

SEQ ID NO: 31352 - DNA, 203 bp, Artificial sequence; identical to SEQ ID NO: 7908
  synthetic

SEQ ID NO: 31353 - DNA, 203 bp, Artificial sequence; identical to SEQ ID NO: 7942
  synthetic

SEQ ID NO: 31354 - DNA, 203 bp, Artificial sequence; identical to SEQ ID NO: 7943
  synthetic

SEQ ID NO: 31355 - DNA, 203 bp, Artificial sequence; identical to SEQ ID NO: 7944
  synthetic

SEQ ID NO: 31356 - DNA, 203 bp, Artificial sequence; identical to SEQ ID NO: 7945
  synthetic

SEQ ID NO: 31357 - DNA, 203 bp, Artificial sequence; identical to SEQ ID NO: 7946
  synthetic

SEQ ID NO: 31358 - DNA, 203 bp, Artificial sequence; identical to SEQ ID NO: 7947
  synthetic

SEQ ID NO: 31359 - DNA, 203 bp, Artificial sequence; identical to SEQ ID NO: 7948
  synthetic

SEQ ID NO: 31360 - DNA, 203 bp, Artificial sequence; identical to SEQ ID NO: 7949
  synthetic

SEQ ID NO: 31361 - DNA, 203 bp, Artificial sequence; identical to SEQ ID NO: 7950
  synthetic

SEQ ID NO: 31362 - DNA, 203 bp, Artificial sequence; identical to SEQ ID NO: 7951
  synthetic

SEQ ID NO: 31363 - DNA, 203 bp, Artificial sequence; identical to SEQ ID NO: 7952
  synthetic

SEQ ID NO: 31364 - DNA, 203 bp, Artificial sequence; identical to SEQ ID NO: 7953
  synthetic

SEQ ID NO: 31365 - DNA, 203 bp, Artificial sequence; identical to SEQ ID NO: 7954
  synthetic

SEQ ID NO: 31366 - DNA, 203 bp, Artificial sequence; identical to SEQ ID NO: 7955
  synthetic

SEQ ID NO: 31367 - DNA, 203 bp, Artificial sequence; identical to SEQ ID NO: 7980
  synthetic

SEQ ID NO: 31368 - DNA, 203 bp, Artificial sequence; identical to SEQ ID NO: 7982
  synthetic

SEQ ID NO: 31369 - DNA, 203 bp, Artificial sequence; identical to SEQ ID NO: 7983
  synthetic

SEQ ID NO: 31370 - DNA, 203 bp, Artificial sequence; identical to SEQ ID NO: 7984
  synthetic

SEQ ID NO: 31371 - DNA, 203 bp, Artificial sequence; identical to SEQ ID NO: 7985
  synthetic

SEQ ID NO: 31372 - DNA, 203 bp, Artificial sequence; identical to SEQ ID NO: 7986
  synthetic

SEQ ID NO: 31373 - DNA, 203 bp, Artificial sequence; identical to SEQ ID NO: 7987
  synthetic

SEQ ID NO: 31374 - DNA, 203 bp, Artificial sequence; identical to SEQ ID NO: 7988
  synthetic

SEQ ID NO: 31375 - DNA, 203 bp, Artificial sequence; identical to SEQ ID NO: 7989
  synthetic

SEQ ID NO: 31376 - DNA, 203 bp, Artificial sequence; identical to SEQ ID NO: 7990
  synthetic

SEQ ID NO: 31377 - DNA, 203 bp, Artificial sequence; identical to SEQ ID NO: 7991
  synthetic

SEQ ID NO: 31378 - DNA, 203 bp, Artificial sequence; identical to SEQ ID NO: 7992
  synthetic

SEQ ID NO: 31379 - DNA, 203 bp, Artificial sequence; identical to SEQ ID NO: 7993
  synthetic

SEQ ID NO: 31380 - DNA, 203 bp, Artificial sequence; identical to SEQ ID NO: 7994
  synthetic

SEQ ID NO: 31381 - DNA, 203 bp, Artificial sequence; identical to SEQ ID NO: 7995
  synthetic

SEQ ID NO: 31382 - DNA, 203 bp, Artificial sequence; identical to SEQ ID NO: 7996
  synthetic

SEQ ID NO: 31383 - DNA, 203 bp, Artificial sequence; identical to SEQ ID NO: 8002
  synthetic

SEQ ID NO: 31384 - DNA, 203 bp, Artificial sequence; identical to SEQ ID NO: 8036
  synthetic

SEQ ID NO: 31385 - DNA, 203 bp, Artificial sequence; identical to SEQ ID NO: 8040
  synthetic

SEQ ID NO: 31386 - DNA, 203 bp, Artificial sequence; identical to SEQ ID NO: 8044
  synthetic

SEQ ID NO: 31387 - DNA, 203 bp, Artificial sequence; identical to SEQ ID NO: 8047
  synthetic

SEQ ID NO: 31388 - DNA, 203 bp, Artificial sequence; identical to SEQ ID NO: 8049
  synthetic

SEQ ID NO: 31389 - DNA, 203 bp, Artificial sequence; identical to SEQ ID NO: 8050
  synthetic

SEQ ID NO: 31390 - DNA, 203 bp, Artificial sequence; identical to SEQ ID NO: 8054
  synthetic

SEQ ID NO: 31391 - DNA, 203 bp, Artificial sequence; identical to SEQ ID NO: 8056
  synthetic

SEQ ID NO: 31392 - DNA, 203 bp, Artificial sequence; identical to SEQ ID NO: 8057
  synthetic

SEQ ID NO: 31393 - DNA, 203 bp, Artificial sequence; identical to SEQ ID NO: 8058
  synthetic

SEQ ID NO: 31394 - DNA, 203 bp, Artificial sequence; identical to SEQ ID NO: 8063
  synthetic

SEQ ID NO: 31395 - DNA, 203 bp, Artificial sequence; identical to SEQ ID NO: 8064
  synthetic

SEQ ID NO: 31396 - DNA, 203 bp, Artificial sequence; identical to SEQ ID NO: 8065
  synthetic

SEQ ID NO: 31397 - DNA, 203 bp, Artificial sequence; identical to SEQ ID NO: 8066
  synthetic

SEQ ID NO: 31398 - DNA, 203 bp, Artificial sequence; identical to SEQ ID NO: 8067
  synthetic

SEQ ID NO: 31399 - DNA, 203 bp, Artificial sequence; identical to SEQ ID NO: 8068
  synthetic

SEQ ID NO: 31400 - DNA, 203 bp, Artificial sequence; identical to SEQ ID NO: 8069
  synthetic

SEQ ID NO: 31401 - DNA, 203 bp, Artificial sequence; identical to SEQ ID NO: 8070
  synthetic

SEQ ID NO: 31402 - DNA, 203 bp, Artificial sequence; identical to SEQ ID NO: 8071
  synthetic

SEQ ID NO: 31403 - DNA, 203 bp, Artificial sequence; identical to SEQ ID NO: 8072
  synthetic

SEQ ID NO: 31404 - DNA, 203 bp, Artificial sequence; identical to SEQ ID NO: 8073
  synthetic

SEQ ID NO: 31405 - DNA, 203 bp, Artificial sequence; identical to SEQ ID NO: 8074
  synthetic

SEQ ID NO: 31406 - DNA, 203 bp, Artificial sequence; identical to SEQ ID NO: 8075
  synthetic

SEQ ID NO: 31407 - DNA, 203 bp, Artificial sequence; identical to SEQ ID NO: 8076
  synthetic

SEQ ID NO: 31408 - DNA, 203 bp, Artificial sequence; identical to SEQ ID NO: 8077
  synthetic

SEQ ID NO: 31409 - DNA, 203 bp, Artificial sequence; identical to SEQ ID NO: 8078
  synthetic

SEQ ID NO: 31410 - DNA, 203 bp, Artificial sequence; identical to SEQ ID NO: 8079
  synthetic

SEQ ID NO: 31411 - DNA, 203 bp, Artificial sequence; identical to SEQ ID NO: 8080
  synthetic

SEQ ID NO: 31412 - DNA, 203 bp, Artificial sequence; identical to SEQ ID NO: 8081
  synthetic

SEQ ID NO: 31413 - DNA, 203 bp, Artificial sequence; identical to SEQ ID NO: 8085
  synthetic

SEQ ID NO: 31414 - DNA, 203 bp, Artificial sequence; identical to SEQ ID NO: 8089
  synthetic

SEQ ID NO: 31415 - DNA, 203 bp, Artificial sequence; identical to SEQ ID NO: 8095
  synthetic

SEQ ID NO: 31416 - DNA, 203 bp, Artificial sequence; identical to SEQ ID NO: 8101
  synthetic

SEQ ID NO: 31417 - DNA, 203 bp, Artificial sequence; identical to SEQ ID NO: 8123
  synthetic

SEQ ID NO: 31418 - DNA, 203 bp, Artificial sequence; identical to SEQ ID NO: 8151
  synthetic

SEQ ID NO: 31419 - DNA, 203 bp, Artificial sequence; identical to SEQ ID NO: 8156
  synthetic

SEQ ID NO: 31420 - DNA, 203 bp, Artificial sequence; identical to SEQ ID NO: 8199
  synthetic

SEQ ID NO: 31421 - DNA, 203 bp, Artificial sequence; identical to SEQ ID NO: 8200
  synthetic

SEQ ID NO: 31422 - DNA, 203 bp, Artificial sequence; identical to SEQ ID NO: 8201
  synthetic

SEQ ID NO: 31423 - DNA, 203 bp, Artificial sequence; identical to SEQ ID NO: 8202
  synthetic

SEQ ID NO: 31424 - DNA, 203 bp, Artificial sequence; identical to SEQ ID NO: 8203
  synthetic

SEQ ID NO: 31425 - DNA, 203 bp, Artificial sequence; identical to SEQ ID NO: 8204
  synthetic

SEQ ID NO: 31426 - DNA, 203 bp, Artificial sequence; identical to SEQ ID NO: 8205
  synthetic

SEQ ID NO: 31427 - DNA, 203 bp, Artificial sequence; identical to SEQ ID NO: 8206
  synthetic

SEQ ID NO: 31428 - DNA, 203 bp, Artificial sequence; identical to SEQ ID NO: 8207
  synthetic

SEQ ID NO: 31429 - DNA, 203 bp, Artificial sequence; identical to SEQ ID NO: 8208
  synthetic

SEQ ID NO: 31430 - DNA, 203 bp, Artificial sequence; identical to SEQ ID NO: 8209
  synthetic

SEQ ID NO: 31431 - DNA, 203 bp, Artificial sequence; identical to SEQ ID NO: 8210
  synthetic

SEQ ID NO: 31432 - DNA, 203 bp, Artificial sequence; identical to SEQ ID NO: 8213
  synthetic

SEQ ID NO: 31433 - DNA, 203 bp, Artificial sequence; identical to SEQ ID NO: 8214
  synthetic

SEQ ID NO: 31434 - DNA, 203 bp, Artificial sequence; identical to SEQ ID NO: 8215
  synthetic

SEQ ID NO: 31435 - DNA, 203 bp, Artificial sequence; identical to SEQ ID NO: 8216
  synthetic

SEQ ID NO: 31436 - DNA, 203 bp, Artificial sequence; identical to SEQ ID NO: 8217
  synthetic

SEQ ID NO: 31437 - DNA, 203 bp, Artificial sequence; identical to SEQ ID NO: 8218
  synthetic

SEQ ID NO: 31438 - DNA, 203 bp, Artificial sequence; identical to SEQ ID NO: 8219
  synthetic

SEQ ID NO: 31439 - DNA, 203 bp, Artificial sequence; identical to SEQ ID NO: 8220
  synthetic

SEQ ID NO: 31440 - DNA, 203 bp, Artificial sequence; identical to SEQ ID NO: 8221
  synthetic

SEQ ID NO: 31441 - DNA, 203 bp, Artificial sequence; identical to SEQ ID NO: 8222
  synthetic

SEQ ID NO: 31442 - DNA, 203 bp, Artificial sequence; identical to SEQ ID NO: 8223
  synthetic

SEQ ID NO: 31443 - DNA, 203 bp, Artificial sequence; identical to SEQ ID NO: 8224
  synthetic

SEQ ID NO: 31444 - DNA, 203 bp, Artificial sequence; identical to SEQ ID NO: 8225
  synthetic

SEQ ID NO: 31445 - DNA, 203 bp, Artificial sequence; identical to SEQ ID NO: 8226
  synthetic

SEQ ID NO: 31446 - DNA, 203 bp, Artificial sequence; identical to SEQ ID NO: 8241
  synthetic

SEQ ID NO: 31447 - DNA, 203 bp, Artificial sequence; identical to SEQ ID NO: 8242
  synthetic

SEQ ID NO: 31448 - DNA, 203 bp, Artificial sequence; identical to SEQ ID NO: 8243
  synthetic

SEQ ID NO: 31449 - DNA, 203 bp, Artificial sequence; identical to SEQ ID NO: 8244
  synthetic

SEQ ID NO: 31450 - DNA, 203 bp, Artificial sequence; identical to SEQ ID NO: 8245
  synthetic

SEQ ID NO: 31451 - DNA, 203 bp, Artificial sequence; identical to SEQ ID NO: 8246
  synthetic

SEQ ID NO: 31452 - DNA, 203 bp, Artificial sequence; identical to SEQ ID NO: 8247
  synthetic

SEQ ID NO: 31453 - DNA, 203 bp, Artificial sequence; identical to SEQ ID NO: 8248
  synthetic

SEQ ID NO: 31454 - DNA, 203 bp, Artificial sequence; identical to SEQ ID NO: 8249
  synthetic

SEQ ID NO: 31455 - DNA, 203 bp, Artificial sequence; identical to SEQ ID NO: 8250
  synthetic

SEQ ID NO: 31456 - DNA, 203 bp, Artificial sequence; identical to SEQ ID NO: 8275
  synthetic

SEQ ID NO: 31457 - DNA, 203 bp, Artificial sequence; identical to SEQ ID NO: 8276
  synthetic

SEQ ID NO: 31458 - DNA, 203 bp, Artificial sequence; identical to SEQ ID NO: 8277
  synthetic

SEQ ID NO: 31459 - DNA, 203 bp, Artificial sequence; identical to SEQ ID NO: 8278
  synthetic

SEQ ID NO: 31460 - DNA, 203 bp, Artificial sequence; identical to SEQ ID NO: 8279
  synthetic

SEQ ID NO: 31461 - DNA, 203 bp, Artificial sequence; identical to SEQ ID NO: 8280
  synthetic

SEQ ID NO: 31462 - DNA, 203 bp, Artificial sequence; identical to SEQ ID NO: 8281
  synthetic

SEQ ID NO: 31463 - DNA, 203 bp, Artificial sequence; identical to SEQ ID NO: 8282
  synthetic

SEQ ID NO: 31464 - DNA, 203 bp, Artificial sequence; identical to SEQ ID NO: 8283
  synthetic

SEQ ID NO: 31465 - DNA, 203 bp, Artificial sequence; identical to SEQ ID NO: 8284
  synthetic

SEQ ID NO: 31466 - DNA, 203 bp, Artificial sequence; identical to SEQ ID NO: 8285
  synthetic

SEQ ID NO: 31467 - DNA, 203 bp, Artificial sequence; identical to SEQ ID NO: 8286
  synthetic

SEQ ID NO: 31468 - DNA, 203 bp, Artificial sequence; identical to SEQ ID NO: 8287
  synthetic

SEQ ID NO: 31469 - DNA, 203 bp, Artificial sequence; identical to SEQ ID NO: 8288
  synthetic

SEQ ID NO: 31470 - DNA, 203 bp, Artificial sequence; identical to SEQ ID NO: 8289
  synthetic

SEQ ID NO: 31471 - DNA, 203 bp, Artificial sequence; identical to SEQ ID NO: 8290
  synthetic

SEQ ID NO: 31472 - DNA, 203 bp, Artificial sequence; identical to SEQ ID NO: 8291
  synthetic

SEQ ID NO: 31473 - DNA, 203 bp, Artificial sequence; identical to SEQ ID NO: 8292
  synthetic

SEQ ID NO: 31474 - DNA, 203 bp, Artificial sequence; identical to SEQ ID NO: 8293
  synthetic

SEQ ID NO: 31475 - DNA, 203 bp, Artificial sequence; identical to SEQ ID NO: 8294
  synthetic

SEQ ID NO: 31476 - DNA, 203 bp, Artificial sequence; identical to SEQ ID NO: 8295
  synthetic

SEQ ID NO: 31477 - DNA, 203 bp, Artificial sequence; identical to SEQ ID NO: 8296
  synthetic

SEQ ID NO: 31478 - DNA, 203 bp, Artificial sequence; identical to SEQ ID NO: 8297
  synthetic

SEQ ID NO: 31479 - DNA, 203 bp, Artificial sequence; identical to SEQ ID NO: 8306
  synthetic

SEQ ID NO: 31480 - DNA, 203 bp, Artificial sequence; identical to SEQ ID NO: 8308
  synthetic

SEQ ID NO: 31481 - DNA, 203 bp, Artificial sequence; identical to SEQ ID NO: 8310
  synthetic

SEQ ID NO: 31482 - DNA, 203 bp, Artificial sequence; identical to SEQ ID NO: 8330
  synthetic

SEQ ID NO: 31483 - DNA, 203 bp, Artificial sequence; identical to SEQ ID NO: 8333
  synthetic

SEQ ID NO: 31484 - DNA, 203 bp, Artificial sequence; identical to SEQ ID NO: 8336
  synthetic

SEQ ID NO: 31485 - DNA, 203 bp, Artificial sequence; identical to SEQ ID NO: 8362
  synthetic

SEQ ID NO: 31486 - DNA, 203 bp, Artificial sequence; identical to SEQ ID NO: 8376
  synthetic

SEQ ID NO: 31487 - DNA, 203 bp, Artificial sequence; identical to SEQ ID NO: 8403
  synthetic

SEQ ID NO: 31488 - DNA, 203 bp, Artificial sequence; identical to SEQ ID NO: 8406
  synthetic

SEQ ID NO: 31489 - DNA, 203 bp, Artificial sequence; identical to SEQ ID NO: 8407
  synthetic

SEQ ID NO: 31490 - DNA, 203 bp, Artificial sequence; identical to SEQ ID NO: 8408
  synthetic

SEQ ID NO: 31491 - DNA, 203 bp, Artificial sequence; identical to SEQ ID NO: 8409
  synthetic

SEQ ID NO: 31492 - DNA, 203 bp, Artificial sequence; identical to SEQ ID NO: 8410
  synthetic

SEQ ID NO: 31493 - DNA, 203 bp, Artificial sequence; identical to SEQ ID NO: 8411
  synthetic

SEQ ID NO: 31494 - DNA, 203 bp, Artificial sequence; identical to SEQ ID NO: 8412
  synthetic

SEQ ID NO: 31495 - DNA, 203 bp, Artificial sequence; identical to SEQ ID NO: 8413
  synthetic

SEQ ID NO: 31496 - DNA, 203 bp, Artificial sequence; identical to SEQ ID NO: 8414
  synthetic

SEQ ID NO: 31497 - DNA, 203 bp, Artificial sequence; identical to SEQ ID NO: 8415
  synthetic

SEQ ID NO: 31498 - DNA, 203 bp, Artificial sequence; identical to SEQ ID NO: 8416
  synthetic

SEQ ID NO: 31499 - DNA, 203 bp, Artificial sequence; identical to SEQ ID NO: 8417
  synthetic

SEQ ID NO: 31500 - DNA, 203 bp, Artificial sequence; identical to SEQ ID NO: 8418
  synthetic

SEQ ID NO: 31501 - DNA, 203 bp, Artificial sequence; identical to SEQ ID NO: 8419
  synthetic

SEQ ID NO: 31502 - DNA, 203 bp, Artificial sequence; identical to SEQ ID NO: 8420
  synthetic

SEQ ID NO: 31503 - DNA, 203 bp, Artificial sequence; identical to SEQ ID NO: 8421
  synthetic

SEQ ID NO: 31504 - DNA, 203 bp, Artificial sequence; identical to SEQ ID NO: 8432
  synthetic

SEQ ID NO: 31505 - DNA, 203 bp, Artificial sequence; identical to SEQ ID NO: 8452
  synthetic

SEQ ID NO: 31506 - DNA, 203 bp, Artificial sequence; identical to SEQ ID NO: 8466
  synthetic

SEQ ID NO: 31507 - DNA, 203 bp, Artificial sequence; identical to SEQ ID NO: 8468
  synthetic

SEQ ID NO: 31508 - DNA, 203 bp, Artificial sequence; identical to SEQ ID NO: 8469
  synthetic

SEQ ID NO: 31509 - DNA, 203 bp, Artificial sequence; identical to SEQ ID NO: 8470
  synthetic

SEQ ID NO: 31510 - DNA, 203 bp, Artificial sequence; identical to SEQ ID NO: 8471
  synthetic

SEQ ID NO: 31511 - DNA, 203 bp, Artificial sequence; identical to SEQ ID NO: 8472
  synthetic

SEQ ID NO: 31512 - DNA, 203 bp, Artificial sequence; identical to SEQ ID NO: 8473
  synthetic

SEQ ID NO: 31513 - DNA, 203 bp, Artificial sequence; identical to SEQ ID NO: 8474
  synthetic

SEQ ID NO: 31514 - DNA, 203 bp, Artificial sequence; identical to SEQ ID NO: 8475
  synthetic

SEQ ID NO: 31515 - DNA, 203 bp, Artificial sequence; identical to SEQ ID NO: 8476
  synthetic

SEQ ID NO: 31516 - DNA, 203 bp, Artificial sequence; identical to SEQ ID NO: 8477
  synthetic

SEQ ID NO: 31517 - DNA, 203 bp, Artificial sequence; identical to SEQ ID NO: 8478
  synthetic

SEQ ID NO: 31518 - DNA, 203 bp, Artificial sequence; identical to SEQ ID NO: 8479
  synthetic

SEQ ID NO: 31519 - DNA, 203 bp, Artificial sequence; identical to SEQ ID NO: 8505
  synthetic

SEQ ID NO: 31520 - DNA, 203 bp, Artificial sequence; identical to SEQ ID NO: 8506
  synthetic

SEQ ID NO: 31521 - DNA, 203 bp, Artificial sequence; identical to SEQ ID NO: 8507
  synthetic

SEQ ID NO: 31522 - DNA, 203 bp, Artificial sequence; identical to SEQ ID NO: 8508
  synthetic

SEQ ID NO: 31523 - DNA, 203 bp, Artificial sequence; identical to SEQ ID NO: 8509
  synthetic

SEQ ID NO: 31524 - DNA, 203 bp, Artificial sequence; identical to SEQ ID NO: 8510
  synthetic

SEQ ID NO: 31525 - DNA, 203 bp, Artificial sequence; identical to SEQ ID NO: 8511
  synthetic

SEQ ID NO: 31526 - DNA, 203 bp, Artificial sequence; identical to SEQ ID NO: 8512
  synthetic

SEQ ID NO: 31527 - DNA, 203 bp, Artificial sequence; identical to SEQ ID NO: 8516
  synthetic

SEQ ID NO: 31528 - DNA, 203 bp, Artificial sequence; identical to SEQ ID NO: 8517
  synthetic

SEQ ID NO: 31529 - DNA, 203 bp, Artificial sequence; identical to SEQ ID NO: 8518
  synthetic

SEQ ID NO: 31530 - DNA, 203 bp, Artificial sequence; identical to SEQ ID NO: 8519
  synthetic

SEQ ID NO: 31531 - DNA, 203 bp, Artificial sequence; identical to SEQ ID NO: 8520
  synthetic

SEQ ID NO: 31532 - DNA, 203 bp, Artificial sequence; identical to SEQ ID NO: 8521
  synthetic

SEQ ID NO: 31533 - DNA, 203 bp, Artificial sequence; identical to SEQ ID NO: 8522
  synthetic

SEQ ID NO: 31534 - DNA, 203 bp, Artificial sequence; identical to SEQ ID NO: 8523
  synthetic

SEQ ID NO: 31535 - DNA, 203 bp, Artificial sequence; identical to SEQ ID NO: 8524
  synthetic

SEQ ID NO: 31536 - DNA, 203 bp, Artificial sequence; identical to SEQ ID NO: 8525
  synthetic

SEQ ID NO: 31537 - DNA, 203 bp, Artificial sequence; identical to SEQ ID NO: 8544
  synthetic

SEQ ID NO: 31538 - DNA, 203 bp, Artificial sequence; identical to SEQ ID NO: 8559
  synthetic

SEQ ID NO: 31539 - DNA, 203 bp, Artificial sequence; identical to SEQ ID NO: 8579
  synthetic

SEQ ID NO: 31540 - DNA, 203 bp, Artificial sequence; identical to SEQ ID NO: 8588
  synthetic

SEQ ID NO: 31541 - DNA, 203 bp, Artificial sequence; identical to SEQ ID NO: 8606
  synthetic

SEQ ID NO: 31542 - DNA, 203 bp, Artificial sequence; identical to SEQ ID NO: 8627
  synthetic

SEQ ID NO: 31543 - DNA, 203 bp, Artificial sequence; identical to SEQ ID NO: 8630
  synthetic

SEQ ID NO: 31544 - DNA, 203 bp, Artificial sequence; identical to SEQ ID NO: 8643
  synthetic

SEQ ID NO: 31545 - DNA, 203 bp, Artificial sequence; identical to SEQ ID NO: 8675
  synthetic

SEQ ID NO: 31546 - DNA, 203 bp, Artificial sequence; identical to SEQ ID NO: 8676
  synthetic

SEQ ID NO: 31547 - DNA, 203 bp, Artificial sequence; identical to SEQ ID NO: 8677
  synthetic

SEQ ID NO: 31548 - DNA, 203 bp, Artificial sequence; identical to SEQ ID NO: 8678
  synthetic

SEQ ID NO: 31549 - DNA, 203 bp, Artificial sequence; identical to SEQ ID NO: 8679
  synthetic

SEQ ID NO: 31550 - DNA, 203 bp, Artificial sequence; identical to SEQ ID NO: 8680
  synthetic

SEQ ID NO: 31551 - DNA, 203 bp, Artificial sequence; identical to SEQ ID NO: 8681
  synthetic

SEQ ID NO: 31552 - DNA, 203 bp, Artificial sequence; identical to SEQ ID NO: 8682
  synthetic

SEQ ID NO: 31553 - DNA, 203 bp, Artificial sequence; identical to SEQ ID NO: 8683
  synthetic

SEQ ID NO: 31554 - DNA, 203 bp, Artificial sequence; identical to SEQ ID NO: 8684
  synthetic

SEQ ID NO: 31555 - DNA, 203 bp, Artificial sequence; identical to SEQ ID NO: 8685
  synthetic

SEQ ID NO: 31556 - DNA, 203 bp, Artificial sequence; identical to SEQ ID NO: 8686
  synthetic

SEQ ID NO: 31557 - DNA, 203 bp, Artificial sequence; identical to SEQ ID NO: 8714
  synthetic

SEQ ID NO: 31558 - DNA, 203 bp, Artificial sequence; identical to SEQ ID NO: 8715
  synthetic

SEQ ID NO: 31559 - DNA, 203 bp, Artificial sequence; identical to SEQ ID NO: 8716
  synthetic

SEQ ID NO: 31560 - DNA, 203 bp, Artificial sequence; identical to SEQ ID NO: 8717
  synthetic

SEQ ID NO: 31561 - DNA, 203 bp, Artificial sequence; identical to SEQ ID NO: 8718
  synthetic

SEQ ID NO: 31562 - DNA, 203 bp, Artificial sequence; identical to SEQ ID NO: 8719
  synthetic

SEQ ID NO: 31563 - DNA, 203 bp, Artificial sequence; identical to SEQ ID NO: 8720
  synthetic

SEQ ID NO: 31564 - DNA, 203 bp, Artificial sequence; identical to SEQ ID NO: 8721
  synthetic

SEQ ID NO: 31565 - DNA, 203 bp, Artificial sequence; identical to SEQ ID NO: 8722
  synthetic

SEQ ID NO: 31566 - DNA, 203 bp, Artificial sequence; identical to SEQ ID NO: 8723
  synthetic

SEQ ID NO: 31567 - DNA, 203 bp, Artificial sequence; identical to SEQ ID NO: 8724
  synthetic

SEQ ID NO: 31568 - DNA, 203 bp, Artificial sequence; identical to SEQ ID NO: 8725
  synthetic

SEQ ID NO: 31569 - DNA, 203 bp, Artificial sequence; identical to SEQ ID NO: 8726
  synthetic

SEQ ID NO: 31570 - DNA, 203 bp, Artificial sequence; identical to SEQ ID NO: 8727
  synthetic

SEQ ID NO: 31571 - DNA, 203 bp, Artificial sequence; identical to SEQ ID NO: 8728
  synthetic

SEQ ID NO: 31572 - DNA, 203 bp, Artificial sequence; identical to SEQ ID NO: 8729
  synthetic

SEQ ID NO: 31573 - DNA, 203 bp, Artificial sequence; identical to SEQ ID NO: 8730
  synthetic

SEQ ID NO: 31574 - DNA, 203 bp, Artificial sequence; identical to SEQ ID NO: 8731
  synthetic

SEQ ID NO: 31575 - DNA, 203 bp, Artificial sequence; identical to SEQ ID NO: 8732
  synthetic

SEQ ID NO: 31576 - DNA, 203 bp, Artificial sequence; identical to SEQ ID NO: 8733
  synthetic

SEQ ID NO: 31577 - DNA, 203 bp, Artificial sequence; identical to SEQ ID NO: 8734
  synthetic

SEQ ID NO: 31578 - DNA, 203 bp, Artificial sequence; identical to SEQ ID NO: 8735
  synthetic

SEQ ID NO: 31579 - DNA, 203 bp, Artificial sequence; identical to SEQ ID NO: 8736
  synthetic

SEQ ID NO: 31580 - DNA, 203 bp, Artificial sequence; identical to SEQ ID NO: 8737
  synthetic

SEQ ID NO: 31581 - DNA, 203 bp, Artificial sequence; identical to SEQ ID NO: 8738
  synthetic

SEQ ID NO: 31582 - DNA, 203 bp, Artificial sequence; identical to SEQ ID NO: 8739
  synthetic

SEQ ID NO: 31583 - DNA, 203 bp, Artificial sequence; identical to SEQ ID NO: 8742
  synthetic

SEQ ID NO: 31584 - DNA, 203 bp, Artificial sequence; identical to SEQ ID NO: 8743
  synthetic

SEQ ID NO: 31585 - DNA, 203 bp, Artificial sequence; identical to SEQ ID NO: 8744
  synthetic

SEQ ID NO: 31586 - DNA, 203 bp, Artificial sequence; identical to SEQ ID NO: 8745
  synthetic

SEQ ID NO: 31587 - DNA, 203 bp, Artificial sequence; identical to SEQ ID NO: 8746
  synthetic

SEQ ID NO: 31588 - DNA, 203 bp, Artificial sequence; identical to SEQ ID NO: 8747
  synthetic

SEQ ID NO: 31589 - DNA, 203 bp, Artificial sequence; identical to SEQ ID NO: 8748
  synthetic

SEQ ID NO: 31590 - DNA, 203 bp, Artificial sequence; identical to SEQ ID NO: 8749
  synthetic

SEQ ID NO: 31591 - DNA, 203 bp, Artificial sequence; identical to SEQ ID NO: 8750
  synthetic

SEQ ID NO: 31592 - DNA, 203 bp, Artificial sequence; identical to SEQ ID NO: 8751
  synthetic

SEQ ID NO: 31593 - DNA, 203 bp, Artificial sequence; identical to SEQ ID NO: 8752
  synthetic

SEQ ID NO: 31594 - DNA, 203 bp, Artificial sequence; identical to SEQ ID NO: 8753
  synthetic

SEQ ID NO: 31595 - DNA, 203 bp, Artificial sequence; identical to SEQ ID NO: 8754
  synthetic

SEQ ID NO: 31596 - DNA, 203 bp, Artificial sequence; identical to SEQ ID NO: 8755
  synthetic

SEQ ID NO: 31597 - DNA, 203 bp, Artificial sequence; identical to SEQ ID NO: 8756
  synthetic

SEQ ID NO: 31598 - DNA, 203 bp, Artificial sequence; identical to SEQ ID NO: 8757
  synthetic

SEQ ID NO: 31599 - DNA, 203 bp, Artificial sequence; identical to SEQ ID NO: 8758
  synthetic

SEQ ID NO: 31600 - DNA, 203 bp, Artificial sequence; identical to SEQ ID NO: 8769
  synthetic

SEQ ID NO: 31601 - DNA, 203 bp, Artificial sequence; identical to SEQ ID NO: 8788
  synthetic

SEQ ID NO: 31602 - DNA, 203 bp, Artificial sequence; identical to SEQ ID NO: 8789
  synthetic

SEQ ID NO: 31603 - DNA, 203 bp, Artificial sequence; identical to SEQ ID NO: 8790
  synthetic

SEQ ID NO: 31604 - DNA, 203 bp, Artificial sequence; identical to SEQ ID NO: 8791
  synthetic

SEQ ID NO: 31605 - DNA, 203 bp, Artificial sequence; identical to SEQ ID NO: 8792
  synthetic

SEQ ID NO: 31606 - DNA, 203 bp, Artificial sequence; identical to SEQ ID NO: 8793
  synthetic

SEQ ID NO: 31607 - DNA, 203 bp, Artificial sequence; identical to SEQ ID NO: 8797
  synthetic

SEQ ID NO: 31608 - DNA, 203 bp, Artificial sequence; identical to SEQ ID NO: 8798
  synthetic

SEQ ID NO: 31609 - DNA, 203 bp, Artificial sequence; identical to SEQ ID NO: 8799
  synthetic

SEQ ID NO: 31610 - DNA, 203 bp, Artificial sequence; identical to SEQ ID NO: 8800
  synthetic

SEQ ID NO: 31611 - DNA, 203 bp, Artificial sequence; identical to SEQ ID NO: 8801
  synthetic

SEQ ID NO: 31612 - DNA, 203 bp, Artificial sequence; identical to SEQ ID NO: 8802
  synthetic

SEQ ID NO: 31613 - DNA, 203 bp, Artificial sequence; identical to SEQ ID NO: 8803
  synthetic

SEQ ID NO: 31614 - DNA, 203 bp, Artificial sequence; identical to SEQ ID NO: 8804
  synthetic

SEQ ID NO: 31615 - DNA, 203 bp, Artificial sequence; identical to SEQ ID NO: 8805
  synthetic

SEQ ID NO: 31616 - DNA, 203 bp, Artificial sequence; identical to SEQ ID NO: 8806
  synthetic

SEQ ID NO: 31617 - DNA, 203 bp, Artificial sequence; identical to SEQ ID NO: 8807
  synthetic

SEQ ID NO: 31618 - DNA, 203 bp, Artificial sequence; identical to SEQ ID NO: 8816
  synthetic

SEQ ID NO: 31619 - DNA, 203 bp, Artificial sequence; identical to SEQ ID NO: 8834
  synthetic

SEQ ID NO: 31620 - DNA, 203 bp, Artificial sequence; identical to SEQ ID NO: 8859
  synthetic

SEQ ID NO: 31621 - DNA, 203 bp, Artificial sequence; identical to SEQ ID NO: 8860
  synthetic

SEQ ID NO: 31622 - DNA, 203 bp, Artificial sequence; identical to SEQ ID NO: 8861
  synthetic

SEQ ID NO: 31623 - DNA, 203 bp, Artificial sequence; identical to SEQ ID NO: 8862
  synthetic

SEQ ID NO: 31624 - DNA, 203 bp, Artificial sequence; identical to SEQ ID NO: 8863
  synthetic

SEQ ID NO: 31625 - DNA, 203 bp, Artificial sequence; identical to SEQ ID NO: 8864
  synthetic

SEQ ID NO: 31626 - DNA, 203 bp, Artificial sequence; identical to SEQ ID NO: 8865
  synthetic

SEQ ID NO: 31627 - DNA, 203 bp, Artificial sequence; identical to SEQ ID NO: 8866
  synthetic

SEQ ID NO: 31628 - DNA, 203 bp, Artificial sequence; identical to SEQ ID NO: 8867
  synthetic

SEQ ID NO: 31629 - DNA, 203 bp, Artificial sequence; identical to SEQ ID NO: 8868
  synthetic

SEQ ID NO: 31630 - DNA, 203 bp, Artificial sequence; identical to SEQ ID NO: 8869
  synthetic

SEQ ID NO: 31631 - DNA, 203 bp, Artificial sequence; identical to SEQ ID NO: 8870
  synthetic

SEQ ID NO: 31632 - DNA, 203 bp, Artificial sequence; identical to SEQ ID NO: 8871
  synthetic

SEQ ID NO: 31633 - DNA, 203 bp, Artificial sequence; identical to SEQ ID NO: 8872
  synthetic

SEQ ID NO: 31634 - DNA, 203 bp, Artificial sequence; identical to SEQ ID NO: 8873
  synthetic

SEQ ID NO: 31635 - DNA, 203 bp, Artificial sequence; identical to SEQ ID NO: 8874
  synthetic

SEQ ID NO: 31636 - DNA, 203 bp, Artificial sequence; identical to SEQ ID NO: 8875
  synthetic

SEQ ID NO: 31637 - DNA, 203 bp, Artificial sequence; identical to SEQ ID NO: 8876
  synthetic

SEQ ID NO: 31638 - DNA, 203 bp, Artificial sequence; identical to SEQ ID NO: 8877
  synthetic

SEQ ID NO: 31639 - DNA, 203 bp, Artificial sequence; identical to SEQ ID NO: 8878
  synthetic

SEQ ID NO: 31640 - DNA, 203 bp, Artificial sequence; identical to SEQ ID NO: 8879
  synthetic

SEQ ID NO: 31641 - DNA, 203 bp, Artificial sequence; identical to SEQ ID NO: 8880
  synthetic

SEQ ID NO: 31642 - DNA, 203 bp, Artificial sequence; identical to SEQ ID NO: 8881
  synthetic

SEQ ID NO: 31643 - DNA, 203 bp, Artificial sequence; identical to SEQ ID NO: 8882
  synthetic

SEQ ID NO: 31644 - DNA, 203 bp, Artificial sequence; identical to SEQ ID NO: 8883
  synthetic

SEQ ID NO: 31645 - DNA, 203 bp, Artificial sequence; identical to SEQ ID NO: 8893
  synthetic

SEQ ID NO: 31646 - DNA, 203 bp, Artificial sequence; identical to SEQ ID NO: 8894
  synthetic

SEQ ID NO: 31647 - DNA, 203 bp, Artificial sequence; identical to SEQ ID NO: 8901
  synthetic

SEQ ID NO: 31648 - DNA, 203 bp, Artificial sequence; identical to SEQ ID NO: 8903
  synthetic

SEQ ID NO: 31649 - DNA, 203 bp, Artificial sequence; identical to SEQ ID NO: 8912
  synthetic

SEQ ID NO: 31650 - DNA, 203 bp, Artificial sequence; identical to SEQ ID NO: 8914
  synthetic

SEQ ID NO: 31651 - DNA, 203 bp, Artificial sequence; identical to SEQ ID NO: 8923
  synthetic

SEQ ID NO: 31652 - DNA, 203 bp, Artificial sequence; identical to SEQ ID NO: 8925
  synthetic

SEQ ID NO: 31653 - DNA, 203 bp, Artificial sequence; identical to SEQ ID NO: 149
  synthetic

SEQ ID NO: 31654 - DNA, 203 bp, Artificial sequence; identical to SEQ ID NO: 150
  synthetic

SEQ ID NO: 31655 - DNA, 203 bp, Artificial sequence; identical to SEQ ID NO: 160
  synthetic

SEQ ID NO: 31656 - DNA, 203 bp, Artificial sequence; identical to SEQ ID NO: 166
  synthetic

SEQ ID NO: 31657 - DNA, 203 bp, Artificial sequence; identical to SEQ ID NO: 169
  synthetic

SEQ ID NO: 31658 - DNA, 203 bp, Artificial sequence; identical to SEQ ID NO: 172
  synthetic

SEQ ID NO: 31659 - DNA, 203 bp, Artificial sequence; identical to SEQ ID NO: 177
  synthetic

SEQ ID NO: 31660 - DNA, 203 bp, Artificial sequence; identical to SEQ ID NO: 181
  synthetic

SEQ ID NO: 31661 - DNA, 203 bp, Artificial sequence; identical to SEQ ID NO: 182
  synthetic

SEQ ID NO: 31662 - DNA, 203 bp, Artificial sequence; identical to SEQ ID NO: 191
  synthetic

SEQ ID NO: 31663 - DNA, 203 bp, Artificial sequence; identical to SEQ ID NO: 198
  synthetic

SEQ ID NO: 31664 - DNA, 203 bp, Artificial sequence; identical to SEQ ID NO: 199
  synthetic

SEQ ID NO: 31665 - DNA, 203 bp, Artificial sequence; identical to SEQ ID NO: 200
  synthetic

SEQ ID NO: 31666 - DNA, 203 bp, Artificial sequence; identical to SEQ ID NO: 202
  synthetic

SEQ ID NO: 31667 - DNA, 203 bp, Artificial sequence; identical to SEQ ID NO: 203
  synthetic

SEQ ID NO: 31668 - DNA, 203 bp, Artificial sequence; identical to SEQ ID NO: 204
  synthetic

SEQ ID NO: 31669 - DNA, 203 bp, Artificial sequence; identical to SEQ ID NO: 207
  synthetic

SEQ ID NO: 31670 - DNA, 203 bp, Artificial sequence; identical to SEQ ID NO: 209
  synthetic

SEQ ID NO: 31671 - DNA, 203 bp, Artificial sequence; identical to SEQ ID NO: 212
  synthetic

SEQ ID NO: 31672 - DNA, 203 bp, Artificial sequence; identical to SEQ ID NO: 214
  synthetic

SEQ ID NO: 31673 - DNA, 203 bp, Artificial sequence; identical to SEQ ID NO: 220
  synthetic

SEQ ID NO: 31674 - DNA, 203 bp, Artificial sequence; identical to SEQ ID NO: 221
  synthetic

SEQ ID NO: 31675 - DNA, 203 bp, Artificial sequence; identical to SEQ ID NO: 222
  synthetic

SEQ ID NO: 31676 - DNA, 203 bp, Artificial sequence; identical to SEQ ID NO: 224
  synthetic

SEQ ID NO: 31677 - DNA, 203 bp, Artificial sequence; identical to SEQ ID NO: 236
  synthetic

SEQ ID NO: 31678 - DNA, 203 bp, Artificial sequence; identical to SEQ ID NO: 246
  synthetic

SEQ ID NO: 31679 - DNA, 203 bp, Artificial sequence; identical to SEQ ID NO: 247
  synthetic

SEQ ID NO: 31680 - DNA, 203 bp, Artificial sequence; identical to SEQ ID NO: 248
  synthetic

SEQ ID NO: 31681 - DNA, 203 bp, Artificial sequence; identical to SEQ ID NO: 266
  synthetic

SEQ ID NO: 31682 - DNA, 203 bp, Artificial sequence; identical to SEQ ID NO: 276
  synthetic

SEQ ID NO: 31683 - DNA, 203 bp, Artificial sequence; identical to SEQ ID NO: 279
  synthetic

SEQ ID NO: 31684 - DNA, 203 bp, Artificial sequence; identical to SEQ ID NO: 288
  synthetic

SEQ ID NO: 31685 - DNA, 203 bp, Artificial sequence; identical to SEQ ID NO: 303
  synthetic

SEQ ID NO: 31686 - DNA, 203 bp, Artificial sequence; identical to SEQ ID NO: 312
  synthetic

SEQ ID NO: 31687 - DNA, 203 bp, Artificial sequence; identical to SEQ ID NO: 313
  synthetic

SEQ ID NO: 31688 - DNA, 203 bp, Artificial sequence; identical to SEQ ID NO: 314
  synthetic

SEQ ID NO: 31689 - DNA, 203 bp, Artificial sequence; identical to SEQ ID NO: 334
  synthetic

SEQ ID NO: 31690 - DNA, 203 bp, Artificial sequence; identical to SEQ ID NO: 338
  synthetic

SEQ ID NO: 31691 - DNA, 203 bp, Artificial sequence; identical to SEQ ID NO: 344
  synthetic

SEQ ID NO: 31692 - DNA, 203 bp, Artificial sequence; identical to SEQ ID NO: 8989
  synthetic

SEQ ID NO: 31693 - DNA, 203 bp, Artificial sequence; identical to SEQ ID NO: 8990
  synthetic

SEQ ID NO: 31694 - DNA, 203 bp, Artificial sequence; identical to SEQ ID NO: 8992
  synthetic

SEQ ID NO: 31695 - DNA, 203 bp, Artificial sequence; identical to SEQ ID NO: 8995
  synthetic

SEQ ID NO: 31696 - DNA, 203 bp, Artificial sequence; identical to SEQ ID NO: 9001
  synthetic

SEQ ID NO: 31697 - DNA, 203 bp, Artificial sequence; identical to SEQ ID NO: 9002
  synthetic

SEQ ID NO: 31698 - DNA, 203 bp, Artificial sequence; identical to SEQ ID NO: 9019
  synthetic

SEQ ID NO: 31699 - DNA, 203 bp, Artificial sequence; identical to SEQ ID NO: 9037
  synthetic

SEQ ID NO: 31700 - DNA, 203 bp, Artificial sequence; identical to SEQ ID NO: 9057
  synthetic

SEQ ID NO: 31701 - DNA, 203 bp, Artificial sequence; identical to SEQ ID NO: 9058
  synthetic

SEQ ID NO: 31702 - DNA, 203 bp, Artificial sequence; identical to SEQ ID NO: 9059
  synthetic

SEQ ID NO: 31703 - DNA, 203 bp, Artificial sequence; identical to SEQ ID NO: 9061
  synthetic

SEQ ID NO: 31704 - DNA, 203 bp, Artificial sequence; identical to SEQ ID NO: 9062
  synthetic

SEQ ID NO: 31705 - DNA, 203 bp, Artificial sequence; identical to SEQ ID NO: 9063
  synthetic

SEQ ID NO: 31706 - DNA, 203 bp, Artificial sequence; identical to SEQ ID NO: 9064
  synthetic

SEQ ID NO: 31707 - DNA, 203 bp, Artificial sequence; identical to SEQ ID NO: 9065
  synthetic

SEQ ID NO: 31708 - DNA, 203 bp, Artificial sequence; identical to SEQ ID NO: 9066
  synthetic

SEQ ID NO: 31709 - DNA, 203 bp, Artificial sequence; identical to SEQ ID NO: 9067
  synthetic

SEQ ID NO: 31710 - DNA, 203 bp, Artificial sequence; identical to SEQ ID NO: 9068
  synthetic

SEQ ID NO: 31711 - DNA, 203 bp, Artificial sequence; identical to SEQ ID NO: 9069
  synthetic

SEQ ID NO: 31712 - DNA, 203 bp, Artificial sequence; identical to SEQ ID NO: 9073
  synthetic

SEQ ID NO: 31713 - DNA, 203 bp, Artificial sequence; identical to SEQ ID NO: 9083
  synthetic

SEQ ID NO: 31714 - DNA, 203 bp, Artificial sequence; identical to SEQ ID NO: 9092
  synthetic

SEQ ID NO: 31715 - DNA, 203 bp, Artificial sequence; identical to SEQ ID NO: 9108
  synthetic

SEQ ID NO: 31716 - DNA, 203 bp, Artificial sequence; identical to SEQ ID NO: 9112
  synthetic

SEQ ID NO: 31717 - DNA, 203 bp, Artificial sequence; identical to SEQ ID NO: 9115
  synthetic

SEQ ID NO: 31718 - DNA, 203 bp, Artificial sequence; identical to SEQ ID NO: 9116
  synthetic

SEQ ID NO: 31719 - DNA, 203 bp, Artificial sequence; identical to SEQ ID NO: 9119
  synthetic

SEQ ID NO: 31720 - DNA, 203 bp, Artificial sequence; identical to SEQ ID NO: 9120
  synthetic

SEQ ID NO: 31721 - DNA, 203 bp, Artificial sequence; identical to SEQ ID NO: 9121
  synthetic

SEQ ID NO: 31722 - DNA, 203 bp, Artificial sequence; identical to SEQ ID NO: 9122
  synthetic

SEQ ID NO: 31723 - DNA, 203 bp, Artificial sequence; identical to SEQ ID NO: 9124
  synthetic

SEQ ID NO: 31724 - DNA, 203 bp, Artificial sequence; identical to SEQ ID NO: 9129
  synthetic

SEQ ID NO: 31725 - DNA, 203 bp, Artificial sequence; identical to SEQ ID NO: 9131
  synthetic

SEQ ID NO: 31726 - DNA, 203 bp, Artificial sequence; identical to SEQ ID NO: 9132
  synthetic

SEQ ID NO: 31727 - DNA, 203 bp, Artificial sequence; identical to SEQ ID NO: 9133
  synthetic

SEQ ID NO: 31728 - DNA, 203 bp, Artificial sequence; identical to SEQ ID NO: 9134
  synthetic

SEQ ID NO: 31729 - DNA, 203 bp, Artificial sequence; identical to SEQ ID NO: 9135
  synthetic

SEQ ID NO: 31730 - DNA, 203 bp, Artificial sequence; identical to SEQ ID NO: 9136
  synthetic

SEQ ID NO: 31731 - DNA, 203 bp, Artificial sequence; identical to SEQ ID NO: 9138
  synthetic

SEQ ID NO: 31732 - DNA, 203 bp, Artificial sequence; identical to SEQ ID NO: 9141
  synthetic

SEQ ID NO: 31733 - DNA, 203 bp, Artificial sequence; identical to SEQ ID NO: 9145
  synthetic

SEQ ID NO: 31734 - DNA, 203 bp, Artificial sequence; identical to SEQ ID NO: 9148
  synthetic

SEQ ID NO: 31735 - DNA, 203 bp, Artificial sequence; identical to SEQ ID NO: 9149
  synthetic

SEQ ID NO: 31736 - DNA, 203 bp, Artificial sequence; identical to SEQ ID NO: 9152
  synthetic

SEQ ID NO: 31737 - DNA, 203 bp, Artificial sequence; identical to SEQ ID NO: 9154
  synthetic

SEQ ID NO: 31738 - DNA, 203 bp, Artificial sequence; identical to SEQ ID NO: 9156
  synthetic

SEQ ID NO: 31739 - DNA, 203 bp, Artificial sequence; identical to SEQ ID NO: 9163
  synthetic

SEQ ID NO: 31740 - DNA, 203 bp, Artificial sequence; identical to SEQ ID NO: 9166
  synthetic

SEQ ID NO: 31741 - DNA, 203 bp, Artificial sequence; identical to SEQ ID NO: 9168
  synthetic

SEQ ID NO: 31742 - DNA, 203 bp, Artificial sequence; identical to SEQ ID NO: 9169
  synthetic

SEQ ID NO: 31743 - DNA, 203 bp, Artificial sequence; identical to SEQ ID NO: 9170
  synthetic

SEQ ID NO: 31744 - DNA, 203 bp, Artificial sequence; identical to SEQ ID NO: 9171
  synthetic

SEQ ID NO: 31745 - DNA, 203 bp, Artificial sequence; identical to SEQ ID NO: 9172
  synthetic

SEQ ID NO: 31746 - DNA, 203 bp, Artificial sequence; identical to SEQ ID NO: 9173
  synthetic

SEQ ID NO: 31747 - DNA, 203 bp, Artificial sequence; identical to SEQ ID NO: 9179
  synthetic

SEQ ID NO: 31748 - DNA, 203 bp, Artificial sequence; identical to SEQ ID NO: 9182
  synthetic

SEQ ID NO: 31749 - DNA, 203 bp, Artificial sequence; identical to SEQ ID NO: 9186
  synthetic

SEQ ID NO: 31750 - DNA, 203 bp, Artificial sequence; identical to SEQ ID NO: 9188
  synthetic

SEQ ID NO: 31751 - DNA, 203 bp, Artificial sequence; identical to SEQ ID NO: 9190
  synthetic

SEQ ID NO: 31752 - DNA, 203 bp, Artificial sequence; identical to SEQ ID NO: 9191
  synthetic

SEQ ID NO: 31753 - DNA, 203 bp, Artificial sequence; identical to SEQ ID NO: 9192
  synthetic

SEQ ID NO: 31754 - DNA, 203 bp, Artificial sequence; identical to SEQ ID NO: 9196
  synthetic

SEQ ID NO: 31755 - DNA, 203 bp, Artificial sequence; identical to SEQ ID NO: 9198
  synthetic

SEQ ID NO: 31756 - DNA, 203 bp, Artificial sequence; identical to SEQ ID NO: 9200
  synthetic

SEQ ID NO: 31757 - DNA, 203 bp, Artificial sequence; identical to SEQ ID NO: 9205
  synthetic

SEQ ID NO: 31758 - DNA, 203 bp, Artificial sequence; identical to SEQ ID NO: 9209
  synthetic

SEQ ID NO: 31759 - DNA, 203 bp, Artificial sequence; identical to SEQ ID NO: 9216
  synthetic

SEQ ID NO: 31760 - DNA, 203 bp, Artificial sequence; identical to SEQ ID NO: 9217
  synthetic

SEQ ID NO: 31761 - DNA, 203 bp, Artificial sequence; identical to SEQ ID NO: 9219
  synthetic

SEQ ID NO: 31762 - DNA, 203 bp, Artificial sequence; identical to SEQ ID NO: 9221
  synthetic

SEQ ID NO: 31763 - DNA, 203 bp, Artificial sequence; identical to SEQ ID NO: 9225
  synthetic

SEQ ID NO: 31764 - DNA, 203 bp, Artificial sequence; identical to SEQ ID NO: 9226
  synthetic

SEQ ID NO: 31765 - DNA, 203 bp, Artificial sequence; identical to SEQ ID NO: 9229
  synthetic

SEQ ID NO: 31766 - DNA, 203 bp, Artificial sequence; identical to SEQ ID NO: 9232
  synthetic

SEQ ID NO: 31767 - DNA, 203 bp, Artificial sequence; identical to SEQ ID NO: 9233
  synthetic

SEQ ID NO: 31768 - DNA, 203 bp, Artificial sequence; identical to SEQ ID NO: 9240
  synthetic

SEQ ID NO: 31769 - DNA, 203 bp, Artificial sequence; identical to SEQ ID NO: 9241
  synthetic

SEQ ID NO: 31770 - DNA, 203 bp, Artificial sequence; identical to SEQ ID NO: 9246
  synthetic

SEQ ID NO: 31771 - DNA, 203 bp, Artificial sequence; identical to SEQ ID NO: 9248
  synthetic

SEQ ID NO: 31772 - DNA, 203 bp, Artificial sequence; identical to SEQ ID NO: 9249
  synthetic

SEQ ID NO: 31773 - DNA, 203 bp, Artificial sequence; identical to SEQ ID NO: 9250
  synthetic

SEQ ID NO: 31774 - DNA, 203 bp, Artificial sequence; identical to SEQ ID NO: 9253
  synthetic

SEQ ID NO: 31775 - DNA, 203 bp, Artificial sequence; identical to SEQ ID NO: 9254
  synthetic

SEQ ID NO: 31776 - DNA, 203 bp, Artificial sequence; identical to SEQ ID NO: 9256
  synthetic

SEQ ID NO: 31777 - DNA, 203 bp, Artificial sequence; identical to SEQ ID NO: 9259
  synthetic

SEQ ID NO: 31778 - DNA, 203 bp, Artificial sequence; identical to SEQ ID NO: 9264
  synthetic

SEQ ID NO: 31779 - DNA, 203 bp, Artificial sequence; identical to SEQ ID NO: 9269
  synthetic

SEQ ID NO: 31780 - DNA, 203 bp, Artificial sequence; identical to SEQ ID NO: 9271
  synthetic

SEQ ID NO: 31781 - DNA, 203 bp, Artificial sequence; identical to SEQ ID NO: 9273
  synthetic

SEQ ID NO: 31782 - DNA, 203 bp, Artificial sequence; identical to SEQ ID NO: 9276
  synthetic

SEQ ID NO: 31783 - DNA, 203 bp, Artificial sequence; identical to SEQ ID NO: 9279
  synthetic

SEQ ID NO: 31784 - DNA, 203 bp, Artificial sequence; identical to SEQ ID NO: 9286
  synthetic

SEQ ID NO: 31785 - DNA, 203 bp, Artificial sequence; identical to SEQ ID NO: 9292
  synthetic

SEQ ID NO: 31786 - DNA, 203 bp, Artificial sequence; identical to SEQ ID NO: 9293
  synthetic

SEQ ID NO: 31787 - DNA, 203 bp, Artificial sequence; identical to SEQ ID NO: 9294
  synthetic

SEQ ID NO: 31788 - DNA, 203 bp, Artificial sequence; identical to SEQ ID NO: 9305
  synthetic

SEQ ID NO: 31789 - DNA, 203 bp, Artificial sequence; identical to SEQ ID NO: 9311
  synthetic

SEQ ID NO: 31790 - DNA, 203 bp, Artificial sequence; identical to SEQ ID NO: 9313
  synthetic

SEQ ID NO: 31791 - DNA, 203 bp, Artificial sequence; identical to SEQ ID NO: 9314
  synthetic

SEQ ID NO: 31792 - DNA, 203 bp, Artificial sequence; identical to SEQ ID NO: 9315
  synthetic

SEQ ID NO: 31793 - DNA, 203 bp, Artificial sequence; identical to SEQ ID NO: 9318
  synthetic

SEQ ID NO: 31794 - DNA, 203 bp, Artificial sequence; identical to SEQ ID NO: 9319
  synthetic

SEQ ID NO: 31795 - DNA, 203 bp, Artificial sequence; identical to SEQ ID NO: 9322
  synthetic

SEQ ID NO: 31796 - DNA, 203 bp, Artificial sequence; identical to SEQ ID NO: 9323
  synthetic

SEQ ID NO: 31797 - DNA, 203 bp, Artificial sequence; identical to SEQ ID NO: 9325
  synthetic

SEQ ID NO: 31798 - DNA, 203 bp, Artificial sequence; identical to SEQ ID NO: 9327
  synthetic

SEQ ID NO: 31799 - DNA, 203 bp, Artificial sequence; identical to SEQ ID NO: 9328
  synthetic

SEQ ID NO: 31800 - DNA, 203 bp, Artificial sequence; identical to SEQ ID NO: 9332
  synthetic

SEQ ID NO: 31801 - DNA, 203 bp, Artificial sequence; identical to SEQ ID NO: 9335
  synthetic

SEQ ID NO: 31802 - DNA, 203 bp, Artificial sequence; identical to SEQ ID NO: 9348
  synthetic

SEQ ID NO: 31803 - DNA, 203 bp, Artificial sequence; identical to SEQ ID NO: 9358
  synthetic

SEQ ID NO: 31804 - DNA, 203 bp, Artificial sequence; identical to SEQ ID NO: 9362
  synthetic

SEQ ID NO: 31805 - DNA, 203 bp, Artificial sequence; identical to SEQ ID NO: 9366
  synthetic

SEQ ID NO: 31806 - DNA, 203 bp, Artificial sequence; identical to SEQ ID NO: 9369
  synthetic

SEQ ID NO: 31807 - DNA, 203 bp, Artificial sequence; identical to SEQ ID NO: 9372
  synthetic

SEQ ID NO: 31808 - DNA, 203 bp, Artificial sequence; identical to SEQ ID NO: 9379
  synthetic

SEQ ID NO: 31809 - DNA, 203 bp, Artificial sequence; identical to SEQ ID NO: 9381
  synthetic

SEQ ID NO: 31810 - DNA, 203 bp, Artificial sequence; identical to SEQ ID NO: 9383
  synthetic

SEQ ID NO: 31811 - DNA, 203 bp, Artificial sequence; identical to SEQ ID NO: 9389
  synthetic

SEQ ID NO: 31812 - DNA, 203 bp, Artificial sequence; identical to SEQ ID NO: 9391
  synthetic

SEQ ID NO: 31813 - DNA, 203 bp, Artificial sequence; identical to SEQ ID NO: 9392
  synthetic

SEQ ID NO: 31814 - DNA, 203 bp, Artificial sequence; identical to SEQ ID NO: 9394
  synthetic

SEQ ID NO: 31815 - DNA, 203 bp, Artificial sequence; identical to SEQ ID NO: 9396
  synthetic

SEQ ID NO: 31816 - DNA, 203 bp, Artificial sequence; identical to SEQ ID NO: 9399
  synthetic

SEQ ID NO: 31817 - DNA, 203 bp, Artificial sequence; identical to SEQ ID NO: 9401
  synthetic

SEQ ID NO: 31818 - DNA, 203 bp, Artificial sequence; identical to SEQ ID NO: 9402
  synthetic

SEQ ID NO: 31819 - DNA, 203 bp, Artificial sequence; identical to SEQ ID NO: 9403
  synthetic

SEQ ID NO: 31820 - DNA, 203 bp, Artificial sequence; identical to SEQ ID NO: 9408
  synthetic

SEQ ID NO: 31821 - DNA, 203 bp, Artificial sequence; identical to SEQ ID NO: 9409
  synthetic

SEQ ID NO: 31822 - DNA, 203 bp, Artificial sequence; identical to SEQ ID NO: 9411
  synthetic

SEQ ID NO: 31823 - DNA, 203 bp, Artificial sequence; identical to SEQ ID NO: 9413
  synthetic

SEQ ID NO: 31824 - DNA, 203 bp, Artificial sequence; identical to SEQ ID NO: 9420
  synthetic

SEQ ID NO: 31825 - DNA, 203 bp, Artificial sequence; identical to SEQ ID NO: 9421
  synthetic

SEQ ID NO: 31826 - DNA, 203 bp, Artificial sequence; identical to SEQ ID NO: 9425
  synthetic

SEQ ID NO: 31827 - DNA, 203 bp, Artificial sequence; identical to SEQ ID NO: 9426
  synthetic

SEQ ID NO: 31828 - DNA, 203 bp, Artificial sequence; identical to SEQ ID NO: 9428
  synthetic

SEQ ID NO: 31829 - DNA, 203 bp, Artificial sequence; identical to SEQ ID NO: 9431
  synthetic

SEQ ID NO: 31830 - DNA, 203 bp, Artificial sequence; identical to SEQ ID NO: 9433
  synthetic

SEQ ID NO: 31831 - DNA, 203 bp, Artificial sequence; identical to SEQ ID NO: 9435
  synthetic

SEQ ID NO: 31832 - DNA, 203 bp, Artificial sequence; identical to SEQ ID NO: 9437
  synthetic

SEQ ID NO: 31833 - DNA, 203 bp, Artificial sequence; identical to SEQ ID NO: 9439
  synthetic

SEQ ID NO: 31834 - DNA, 203 bp, Artificial sequence; identical to SEQ ID NO: 9443
  synthetic

SEQ ID NO: 31835 - DNA, 203 bp, Artificial sequence; identical to SEQ ID NO: 9445
  synthetic

SEQ ID NO: 31836 - DNA, 203 bp, Artificial sequence; identical to SEQ ID NO: 9446
  synthetic

SEQ ID NO: 31837 - DNA, 203 bp, Artificial sequence; identical to SEQ ID NO: 9450
  synthetic

SEQ ID NO: 31838 - DNA, 203 bp, Artificial sequence; identical to SEQ ID NO: 9456
  synthetic

SEQ ID NO: 31839 - DNA, 203 bp, Artificial sequence; identical to SEQ ID NO: 9457
  synthetic

SEQ ID NO: 31840 - DNA, 203 bp, Artificial sequence; identical to SEQ ID NO: 9459
  synthetic

SEQ ID NO: 31841 - DNA, 203 bp, Artificial sequence; identical to SEQ ID NO: 9461
  synthetic

SEQ ID NO: 31842 - DNA, 203 bp, Artificial sequence; identical to SEQ ID NO: 9472
  synthetic

SEQ ID NO: 31843 - DNA, 203 bp, Artificial sequence; identical to SEQ ID NO: 9480
  synthetic

SEQ ID NO: 31844 - DNA, 203 bp, Artificial sequence; identical to SEQ ID NO: 9484
  synthetic

SEQ ID NO: 31845 - DNA, 203 bp, Artificial sequence; identical to SEQ ID NO: 9485
  synthetic

SEQ ID NO: 31846 - DNA, 203 bp, Artificial sequence; identical to SEQ ID NO: 9490
  synthetic

SEQ ID NO: 31847 - DNA, 203 bp, Artificial sequence; identical to SEQ ID NO: 9491
  synthetic

SEQ ID NO: 31848 - DNA, 203 bp, Artificial sequence; identical to SEQ ID NO: 9495
  synthetic

SEQ ID NO: 31849 - DNA, 203 bp, Artificial sequence; identical to SEQ ID NO: 9510
  synthetic

SEQ ID NO: 31850 - DNA, 203 bp, Artificial sequence; identical to SEQ ID NO: 9514
  synthetic

SEQ ID NO: 31851 - DNA, 203 bp, Artificial sequence; identical to SEQ ID NO: 9515
  synthetic

SEQ ID NO: 31852 - DNA, 203 bp, Artificial sequence; identical to SEQ ID NO: 9516
  synthetic

SEQ ID NO: 31853 - DNA, 203 bp, Artificial sequence; identical to SEQ ID NO: 9517
  synthetic

SEQ ID NO: 31854 - DNA, 203 bp, Artificial sequence; identical to SEQ ID NO: 9518
  synthetic

SEQ ID NO: 31855 - DNA, 203 bp, Artificial sequence; identical to SEQ ID NO: 9521
  synthetic

SEQ ID NO: 31856 - DNA, 203 bp, Artificial sequence; identical to SEQ ID NO: 9528
  synthetic

SEQ ID NO: 31857 - DNA, 203 bp, Artificial sequence; identical to SEQ ID NO: 9529
  synthetic

SEQ ID NO: 31858 - DNA, 203 bp, Artificial sequence; identical to SEQ ID NO: 9534
  synthetic

SEQ ID NO: 31859 - DNA, 203 bp, Artificial sequence; identical to SEQ ID NO: 9535
  synthetic

SEQ ID NO: 31860 - DNA, 203 bp, Artificial sequence; identical to SEQ ID NO: 9537
  synthetic

SEQ ID NO: 31861 - DNA, 203 bp, Artificial sequence; identical to SEQ ID NO: 9541
  synthetic

SEQ ID NO: 31862 - DNA, 203 bp, Artificial sequence; identical to SEQ ID NO: 9543
  synthetic

SEQ ID NO: 31863 - DNA, 203 bp, Artificial sequence; identical to SEQ ID NO: 9553
  synthetic

SEQ ID NO: 31864 - DNA, 203 bp, Artificial sequence; identical to SEQ ID NO: 9560
  synthetic

SEQ ID NO: 31865 - DNA, 203 bp, Artificial sequence; identical to SEQ ID NO: 9562
  synthetic

SEQ ID NO: 31866 - DNA, 203 bp, Artificial sequence; identical to SEQ ID NO: 9579
  synthetic

SEQ ID NO: 31867 - DNA, 203 bp, Artificial sequence; identical to SEQ ID NO: 9581
  synthetic

SEQ ID NO: 31868 - DNA, 203 bp, Artificial sequence; identical to SEQ ID NO: 9582
  synthetic

SEQ ID NO: 31869 - DNA, 203 bp, Artificial sequence; identical to SEQ ID NO: 9638
  synthetic

SEQ ID NO: 31870 - DNA, 203 bp, Artificial sequence; identical to SEQ ID NO: 9639
  synthetic

SEQ ID NO: 31871 - DNA, 203 bp, Artificial sequence; identical to SEQ ID NO: 9640
  synthetic

SEQ ID NO: 31872 - DNA, 203 bp, Artificial sequence; identical to SEQ ID NO: 9641
  synthetic

SEQ ID NO: 31873 - DNA, 203 bp, Artificial sequence; identical to SEQ ID NO: 9647
  synthetic

SEQ ID NO: 31874 - DNA, 203 bp, Artificial sequence; identical to SEQ ID NO: 9648
  synthetic

SEQ ID NO: 31875 - DNA, 203 bp, Artificial sequence; identical to SEQ ID NO: 9649
  synthetic

SEQ ID NO: 31876 - DNA, 203 bp, Artificial sequence; identical to SEQ ID NO: 9659
  synthetic

SEQ ID NO: 31877 - DNA, 203 bp, Artificial sequence; identical to SEQ ID NO: 9673
  synthetic

SEQ ID NO: 31878 - DNA, 203 bp, Artificial sequence; identical to SEQ ID NO: 9674
  synthetic

SEQ ID NO: 31879 - DNA, 203 bp, Artificial sequence; identical to SEQ ID NO: 9675
  synthetic

SEQ ID NO: 31880 - DNA, 203 bp, Artificial sequence; identical to SEQ ID NO: 9676
  synthetic

SEQ ID NO: 31881 - DNA, 203 bp, Artificial sequence; identical to SEQ ID NO: 9687
  synthetic

SEQ ID NO: 31882 - DNA, 203 bp, Artificial sequence; identical to SEQ ID NO: 9688
  synthetic

SEQ ID NO: 31883 - DNA, 203 bp, Artificial sequence; identical to SEQ ID NO: 9689
  synthetic

SEQ ID NO: 31884 - DNA, 203 bp, Artificial sequence; identical to SEQ ID NO: 9706
  synthetic

SEQ ID NO: 31885 - DNA, 203 bp, Artificial sequence; identical to SEQ ID NO: 9707
  synthetic

SEQ ID NO: 31886 - DNA, 203 bp, Artificial sequence; identical to SEQ ID NO: 9708
  synthetic

SEQ ID NO: 31887 - DNA, 203 bp, Artificial sequence; identical to SEQ ID NO: 9709
  synthetic

SEQ ID NO: 31888 - DNA, 203 bp, Artificial sequence; identical to SEQ ID NO: 9710
  synthetic

SEQ ID NO: 31889 - DNA, 203 bp, Artificial sequence; identical to SEQ ID NO: 9711
  synthetic

SEQ ID NO: 31890 - DNA, 203 bp, Artificial sequence; identical to SEQ ID NO: 9712
  synthetic

SEQ ID NO: 31891 - DNA, 203 bp, Artificial sequence; identical to SEQ ID NO: 9713
  synthetic

SEQ ID NO: 31892 - DNA, 203 bp, Artificial sequence; identical to SEQ ID NO: 9714
  synthetic

SEQ ID NO: 31893 - DNA, 203 bp, Artificial sequence; identical to SEQ ID NO: 9715
  synthetic

SEQ ID NO: 31894 - DNA, 203 bp, Artificial sequence; identical to SEQ ID NO: 9716
  synthetic

SEQ ID NO: 31895 - DNA, 203 bp, Artificial sequence; identical to SEQ ID NO: 9718
  synthetic

SEQ ID NO: 31896 - DNA, 203 bp, Artificial sequence; identical to SEQ ID NO: 9719
  synthetic

SEQ ID NO: 31897 - DNA, 203 bp, Artificial sequence; identical to SEQ ID NO: 9720
  synthetic

SEQ ID NO: 31898 - DNA, 203 bp, Artificial sequence; identical to SEQ ID NO: 9721
  synthetic

SEQ ID NO: 31899 - DNA, 203 bp, Artificial sequence; identical to SEQ ID NO: 9722
  synthetic

SEQ ID NO: 31900 - DNA, 203 bp, Artificial sequence; identical to SEQ ID NO: 9723
  synthetic

SEQ ID NO: 31901 - DNA, 203 bp, Artificial sequence; identical to SEQ ID NO: 9724
  synthetic

SEQ ID NO: 31902 - DNA, 203 bp, Artificial sequence; identical to SEQ ID NO: 9725
  synthetic

SEQ ID NO: 31903 - DNA, 203 bp, Artificial sequence; identical to SEQ ID NO: 9737
  synthetic

SEQ ID NO: 31904 - DNA, 203 bp, Artificial sequence; identical to SEQ ID NO: 9738
  synthetic

SEQ ID NO: 31905 - DNA, 203 bp, Artificial sequence; identical to SEQ ID NO: 9744
  synthetic

SEQ ID NO: 31906 - DNA, 203 bp, Artificial sequence; identical to SEQ ID NO: 9745
  synthetic

SEQ ID NO: 31907 - DNA, 203 bp, Artificial sequence; identical to SEQ ID NO: 9746
  synthetic

SEQ ID NO: 31908 - DNA, 203 bp, Artificial sequence; identical to SEQ ID NO: 9747
  synthetic

SEQ ID NO: 31909 - DNA, 203 bp, Artificial sequence; identical to SEQ ID NO: 9748
  synthetic

SEQ ID NO: 31910 - DNA, 203 bp, Artificial sequence; identical to SEQ ID NO: 9753
  synthetic

SEQ ID NO: 31911 - DNA, 203 bp, Artificial sequence; identical to SEQ ID NO: 9759
  synthetic

SEQ ID NO: 31912 - DNA, 203 bp, Artificial sequence; identical to SEQ ID NO: 9766
  synthetic

SEQ ID NO: 31913 - DNA, 203 bp, Artificial sequence; identical to SEQ ID NO: 9769
  synthetic

SEQ ID NO: 31914 - DNA, 203 bp, Artificial sequence; identical to SEQ ID NO: 9773
  synthetic

SEQ ID NO: 31915 - DNA, 203 bp, Artificial sequence; identical to SEQ ID NO: 9774
  synthetic

SEQ ID NO: 31916 - DNA, 203 bp, Artificial sequence; identical to SEQ ID NO: 9776
  synthetic

SEQ ID NO: 31917 - DNA, 203 bp, Artificial sequence; identical to SEQ ID NO: 9778
  synthetic

SEQ ID NO: 31918 - DNA, 203 bp, Artificial sequence; identical to SEQ ID NO: 9779
  synthetic

SEQ ID NO: 31919 - DNA, 203 bp, Artificial sequence; identical to SEQ ID NO: 9784
  synthetic

SEQ ID NO: 31920 - DNA, 203 bp, Artificial sequence; identical to SEQ ID NO: 9786
  synthetic

SEQ ID NO: 31921 - DNA, 203 bp, Artificial sequence; identical to SEQ ID NO: 9792
  synthetic

SEQ ID NO: 31922 - DNA, 203 bp, Artificial sequence; identical to SEQ ID NO: 9794
  synthetic

SEQ ID NO: 31923 - DNA, 203 bp, Artificial sequence; identical to SEQ ID NO: 9795
  synthetic

SEQ ID NO: 31924 - DNA, 203 bp, Artificial sequence; identical to SEQ ID NO: 9801
  synthetic

SEQ ID NO: 31925 - DNA, 203 bp, Artificial sequence; identical to SEQ ID NO: 9802
  synthetic

SEQ ID NO: 31926 - DNA, 203 bp, Artificial sequence; identical to SEQ ID NO: 9808
  synthetic

SEQ ID NO: 31927 - DNA, 203 bp, Artificial sequence; identical to SEQ ID NO: 9815
  synthetic

SEQ ID NO: 31928 - DNA, 203 bp, Artificial sequence; identical to SEQ ID NO: 9819
  synthetic

SEQ ID NO: 31929 - DNA, 203 bp, Artificial sequence; identical to SEQ ID NO: 9820
  synthetic

SEQ ID NO: 31930 - DNA, 203 bp, Artificial sequence; identical to SEQ ID NO: 9822
  synthetic

SEQ ID NO: 31931 - DNA, 203 bp, Artificial sequence; identical to SEQ ID NO: 9824
  synthetic

SEQ ID NO: 31932 - DNA, 203 bp, Artificial sequence; identical to SEQ ID NO: 9826
  synthetic

SEQ ID NO: 31933 - DNA, 203 bp, Artificial sequence; identical to SEQ ID NO: 9829
  synthetic

SEQ ID NO: 31934 - DNA, 203 bp, Artificial sequence; identical to SEQ ID NO: 9832
  synthetic

SEQ ID NO: 31935 - DNA, 203 bp, Artificial sequence; identical to SEQ ID NO: 9834
  synthetic

SEQ ID NO: 31936 - DNA, 203 bp, Artificial sequence; identical to SEQ ID NO: 9837
  synthetic

SEQ ID NO: 31937 - DNA, 203 bp, Artificial sequence; identical to SEQ ID NO: 9844
  synthetic

SEQ ID NO: 31938 - DNA, 203 bp, Artificial sequence; identical to SEQ ID NO: 9845
  synthetic

SEQ ID NO: 31939 - DNA, 203 bp, Artificial sequence; identical to SEQ ID NO: 9846
  synthetic

SEQ ID NO: 31940 - DNA, 203 bp, Artificial sequence; identical to SEQ ID NO: 9850
  synthetic

SEQ ID NO: 31941 - DNA, 203 bp, Artificial sequence; identical to SEQ ID NO: 9855
  synthetic

SEQ ID NO: 31942 - DNA, 203 bp, Artificial sequence; identical to SEQ ID NO: 9856
  synthetic

SEQ ID NO: 31943 - DNA, 203 bp, Artificial sequence; identical to SEQ ID NO: 9857
  synthetic

SEQ ID NO: 31944 - DNA, 203 bp, Artificial sequence; identical to SEQ ID NO: 9859
  synthetic

SEQ ID NO: 31945 - DNA, 203 bp, Artificial sequence; identical to SEQ ID NO: 9863
  synthetic

SEQ ID NO: 31946 - DNA, 203 bp, Artificial sequence; identical to SEQ ID NO: 9865
  synthetic

SEQ ID NO: 31947 - DNA, 203 bp, Artificial sequence; identical to SEQ ID NO: 9867
  synthetic

SEQ ID NO: 31948 - DNA, 203 bp, Artificial sequence; identical to SEQ ID NO: 9871
  synthetic

SEQ ID NO: 31949 - DNA, 203 bp, Artificial sequence; identical to SEQ ID NO: 9878
  synthetic

SEQ ID NO: 31950 - DNA, 203 bp, Artificial sequence; identical to SEQ ID NO: 9879
  synthetic

SEQ ID NO: 31951 - DNA, 203 bp, Artificial sequence; identical to SEQ ID NO: 9881
  synthetic

SEQ ID NO: 31952 - DNA, 203 bp, Artificial sequence; identical to SEQ ID NO: 9888
  synthetic

SEQ ID NO: 31953 - DNA, 203 bp, Artificial sequence; identical to SEQ ID NO: 9896
  synthetic

SEQ ID NO: 31954 - DNA, 203 bp, Artificial sequence; identical to SEQ ID NO: 9897
  synthetic

SEQ ID NO: 31955 - DNA, 203 bp, Artificial sequence; identical to SEQ ID NO: 9903
  synthetic

SEQ ID NO: 31956 - DNA, 203 bp, Artificial sequence; identical to SEQ ID NO: 9907
  synthetic

SEQ ID NO: 31957 - DNA, 203 bp, Artificial sequence; identical to SEQ ID NO: 9926
  synthetic

SEQ ID NO: 31958 - DNA, 203 bp, Artificial sequence; identical to SEQ ID NO: 9929
  synthetic

SEQ ID NO: 31959 - DNA, 203 bp, Artificial sequence; identical to SEQ ID NO: 9931
  synthetic

SEQ ID NO: 31960 - DNA, 203 bp, Artificial sequence; identical to SEQ ID NO: 9933
  synthetic

SEQ ID NO: 31961 - DNA, 203 bp, Artificial sequence; identical to SEQ ID NO: 9942
  synthetic

SEQ ID NO: 31962 - DNA, 203 bp, Artificial sequence; identical to SEQ ID NO: 9949
  synthetic

SEQ ID NO: 31963 - DNA, 203 bp, Artificial sequence; identical to SEQ ID NO: 9951
  synthetic

SEQ ID NO: 31964 - DNA, 203 bp, Artificial sequence; identical to SEQ ID NO: 9953
  synthetic

SEQ ID NO: 31965 - DNA, 203 bp, Artificial sequence; identical to SEQ ID NO: 9955
  synthetic

SEQ ID NO: 31966 - DNA, 203 bp, Artificial sequence; identical to SEQ ID NO: 9957
  synthetic

SEQ ID NO: 31967 - DNA, 203 bp, Artificial sequence; identical to SEQ ID NO: 9958
  synthetic

SEQ ID NO: 31968 - DNA, 203 bp, Artificial sequence; identical to SEQ ID NO: 9969
  synthetic

SEQ ID NO: 31969 - DNA, 203 bp, Artificial sequence; identical to SEQ ID NO: 9970
  synthetic

SEQ ID NO: 31970 - DNA, 203 bp, Artificial sequence; identical to SEQ ID NO: 9971
  synthetic

SEQ ID NO: 31971 - DNA, 203 bp, Artificial sequence; identical to SEQ ID NO: 9973
  synthetic

SEQ ID NO: 31972 - DNA, 203 bp, Artificial sequence; identical to SEQ ID NO: 9978
  synthetic

SEQ ID NO: 31973 - DNA, 203 bp, Artificial sequence; identical to SEQ ID NO: 9981
  synthetic

SEQ ID NO: 31974 - DNA, 203 bp, Artificial sequence; identical to SEQ ID NO: 9983
  synthetic

SEQ ID NO: 31975 - DNA, 203 bp, Artificial sequence; identical to SEQ ID NO: 9987
  synthetic

SEQ ID NO: 31976 - DNA, 203 bp, Artificial sequence; identical to SEQ ID NO: 9996
  synthetic

SEQ ID NO: 31977 - DNA, 203 bp, Artificial sequence; identical to SEQ ID NO: 9997
  synthetic

SEQ ID NO: 31978 - DNA, 203 bp, Artificial sequence; identical to SEQ ID NO: 9998
  synthetic

SEQ ID NO: 31979 - DNA, 203 bp, Artificial sequence; identical to SEQ ID NO: 10000
  synthetic

SEQ ID NO: 31980 - DNA, 203 bp, Artificial sequence; identical to SEQ ID NO: 10002
  synthetic

SEQ ID NO: 31981 - DNA, 203 bp, Artificial sequence; identical to SEQ ID NO: 10003
  synthetic

SEQ ID NO: 31982 - DNA, 203 bp, Artificial sequence; identical to SEQ ID NO: 10006
  synthetic

SEQ ID NO: 31983 - DNA, 203 bp, Artificial sequence; identical to SEQ ID NO: 10007
  synthetic

SEQ ID NO: 31984 - DNA, 203 bp, Artificial sequence; identical to SEQ ID NO: 10014
  synthetic

SEQ ID NO: 31985 - DNA, 203 bp, Artificial sequence; identical to SEQ ID NO: 10016
  synthetic

SEQ ID NO: 31986 - DNA, 203 bp, Artificial sequence; identical to SEQ ID NO: 10023
  synthetic

SEQ ID NO: 31987 - DNA, 203 bp, Artificial sequence; identical to SEQ ID NO: 10024
  synthetic

SEQ ID NO: 31988 - DNA, 203 bp, Artificial sequence; identical to SEQ ID NO: 10025
  synthetic

SEQ ID NO: 31989 - DNA, 203 bp, Artificial sequence; identical to SEQ ID NO: 10028
  synthetic

SEQ ID NO: 31990 - DNA, 203 bp, Artificial sequence; identical to SEQ ID NO: 10029
  synthetic

SEQ ID NO: 31991 - DNA, 203 bp, Artificial sequence; identical to SEQ ID NO: 10030
  synthetic

SEQ ID NO: 31992 - DNA, 203 bp, Artificial sequence; identical to SEQ ID NO: 10031
  synthetic

SEQ ID NO: 31993 - DNA, 203 bp, Artificial sequence; identical to SEQ ID NO: 10033
  synthetic

SEQ ID NO: 31994 - DNA, 203 bp, Artificial sequence; identical to SEQ ID NO: 10039
  synthetic

SEQ ID NO: 31995 - DNA, 203 bp, Artificial sequence; identical to SEQ ID NO: 10045
  synthetic

SEQ ID NO: 31996 - DNA, 203 bp, Artificial sequence; identical to SEQ ID NO: 10047
  synthetic

SEQ ID NO: 31997 - DNA, 203 bp, Artificial sequence; identical to SEQ ID NO: 10050
  synthetic

SEQ ID NO: 31998 - DNA, 203 bp, Artificial sequence; identical to SEQ ID NO: 10058
  synthetic

SEQ ID NO: 31999 - DNA, 203 bp, Artificial sequence; identical to SEQ ID NO: 10134
  synthetic

SEQ ID NO: 32000 - DNA, 203 bp, Artificial sequence; identical to SEQ ID NO: 10218
  synthetic

SEQ ID NO: 32001 - DNA, 203 bp, Artificial sequence; identical to SEQ ID NO: 10232
  synthetic

SEQ ID NO: 32002 - DNA, 203 bp, Artificial sequence; identical to SEQ ID NO: 10233
  synthetic

SEQ ID NO: 32003 - DNA, 203 bp, Artificial sequence; identical to SEQ ID NO: 10234
  synthetic

SEQ ID NO: 32004 - DNA, 203 bp, Artificial sequence; identical to SEQ ID NO: 10235
  synthetic

SEQ ID NO: 32005 - DNA, 203 bp, Artificial sequence; identical to SEQ ID NO: 10236
  synthetic

SEQ ID NO: 32006 - DNA, 203 bp, Artificial sequence; identical to SEQ ID NO: 10237
  synthetic

SEQ ID NO: 32007 - DNA, 203 bp, Artificial sequence; identical to SEQ ID NO: 10244
  synthetic

SEQ ID NO: 32008 - DNA, 203 bp, Artificial sequence; identical to SEQ ID NO: 10245
  synthetic

SEQ ID NO: 32009 - DNA, 203 bp, Artificial sequence; identical to SEQ ID NO: 10246
  synthetic

SEQ ID NO: 32010 - DNA, 203 bp, Artificial sequence; identical to SEQ ID NO: 10247
  synthetic

SEQ ID NO: 32011 - DNA, 203 bp, Artificial sequence; identical to SEQ ID NO: 10350
  synthetic

SEQ ID NO: 32012 - DNA, 203 bp, Artificial sequence; identical to SEQ ID NO: 10351
  synthetic

SEQ ID NO: 32013 - DNA, 203 bp, Artificial sequence; identical to SEQ ID NO: 10352
  synthetic

SEQ ID NO: 32014 - DNA, 203 bp, Artificial sequence; identical to SEQ ID NO: 10353
  synthetic

SEQ ID NO: 32015 - DNA, 203 bp, Artificial sequence; identical to SEQ ID NO: 10356
  synthetic

SEQ ID NO: 32016 - DNA, 203 bp, Artificial sequence; identical to SEQ ID NO: 10362
  synthetic

SEQ ID NO: 32017 - DNA, 203 bp, Artificial sequence; identical to SEQ ID NO: 10371
  synthetic

SEQ ID NO: 32018 - DNA, 203 bp, Artificial sequence; identical to SEQ ID NO: 10372
  synthetic

SEQ ID NO: 32019 - DNA, 203 bp, Artificial sequence; identical to SEQ ID NO: 10373
  synthetic

SEQ ID NO: 32020 - DNA, 203 bp, Artificial sequence; identical to SEQ ID NO: 10387
  synthetic

SEQ ID NO: 32021 - DNA, 203 bp, Artificial sequence; identical to SEQ ID NO: 10388
  synthetic

SEQ ID NO: 32022 - DNA, 203 bp, Artificial sequence; identical to SEQ ID NO: 10389
  synthetic

SEQ ID NO: 32023 - DNA, 203 bp, Artificial sequence; identical to SEQ ID NO: 10412
  synthetic

SEQ ID NO: 32024 - DNA, 203 bp, Artificial sequence; identical to SEQ ID NO: 10413
  synthetic

SEQ ID NO: 32025 - DNA, 203 bp, Artificial sequence; identical to SEQ ID NO: 10414
  synthetic

SEQ ID NO: 32026 - DNA, 203 bp, Artificial sequence; identical to SEQ ID NO: 10415
  synthetic

SEQ ID NO: 32027 - DNA, 203 bp, Artificial sequence; identical to SEQ ID NO: 10418
  synthetic

SEQ ID NO: 32028 - DNA, 203 bp, Artificial sequence; identical to SEQ ID NO: 10423
  synthetic

SEQ ID NO: 32029 - DNA, 203 bp, Artificial sequence; identical to SEQ ID NO: 10424
  synthetic

SEQ ID NO: 32030 - DNA, 203 bp, Artificial sequence; identical to SEQ ID NO: 10425
  synthetic

SEQ ID NO: 32031 - DNA, 203 bp, Artificial sequence; identical to SEQ ID NO: 10429
  synthetic

SEQ ID NO: 32032 - DNA, 203 bp, Artificial sequence; identical to SEQ ID NO: 10430
  synthetic

SEQ ID NO: 32033 - DNA, 203 bp, Artificial sequence; identical to SEQ ID NO: 10431
  synthetic

SEQ ID NO: 32034 - DNA, 203 bp, Artificial sequence; identical to SEQ ID NO: 10432
  synthetic

SEQ ID NO: 32035 - DNA, 203 bp, Artificial sequence; identical to SEQ ID NO: 10433
  synthetic

SEQ ID NO: 32036 - DNA, 203 bp, Artificial sequence; identical to SEQ ID NO: 10434
  synthetic

SEQ ID NO: 32037 - DNA, 203 bp, Artificial sequence; identical to SEQ ID NO: 10439
  synthetic

SEQ ID NO: 32038 - DNA, 203 bp, Artificial sequence; identical to SEQ ID NO: 10440
  synthetic

SEQ ID NO: 32039 - DNA, 203 bp, Artificial sequence; identical to SEQ ID NO: 10441
  synthetic

SEQ ID NO: 32040 - DNA, 203 bp, Artificial sequence; identical to SEQ ID NO: 10442
  synthetic

SEQ ID NO: 32041 - DNA, 203 bp, Artificial sequence; identical to SEQ ID NO: 10443
  synthetic

SEQ ID NO: 32042 - DNA, 203 bp, Artificial sequence; identical to SEQ ID NO: 10444
  synthetic

SEQ ID NO: 32043 - DNA, 203 bp, Artificial sequence; identical to SEQ ID NO: 10445
  synthetic

SEQ ID NO: 32044 - DNA, 203 bp, Artificial sequence; identical to SEQ ID NO: 10446
  synthetic

SEQ ID NO: 32045 - DNA, 203 bp, Artificial sequence; identical to SEQ ID NO: 10447
  synthetic

SEQ ID NO: 32046 - DNA, 203 bp, Artificial sequence; identical to SEQ ID NO: 10448
  synthetic

SEQ ID NO: 32047 - DNA, 203 bp, Artificial sequence; identical to SEQ ID NO: 10450
  synthetic

SEQ ID NO: 32048 - DNA, 203 bp, Artificial sequence; identical to SEQ ID NO: 10453
  synthetic

SEQ ID NO: 32049 - DNA, 203 bp, Artificial sequence; identical to SEQ ID NO: 10456
  synthetic

SEQ ID NO: 32050 - DNA, 203 bp, Artificial sequence; identical to SEQ ID NO: 10457
  synthetic

SEQ ID NO: 32051 - DNA, 203 bp, Artificial sequence; identical to SEQ ID NO: 10459
  synthetic

SEQ ID NO: 32052 - DNA, 203 bp, Artificial sequence; identical to SEQ ID NO: 10460
  synthetic

SEQ ID NO: 32053 - DNA, 203 bp, Artificial sequence; identical to SEQ ID NO: 10461
  synthetic

SEQ ID NO: 32054 - DNA, 203 bp, Artificial sequence; identical to SEQ ID NO: 10462
  synthetic

SEQ ID NO: 32055 - DNA, 203 bp, Artificial sequence; identical to SEQ ID NO: 10464
  synthetic

SEQ ID NO: 32056 - DNA, 203 bp, Artificial sequence; identical to SEQ ID NO: 10465
  synthetic

SEQ ID NO: 32057 - DNA, 203 bp, Artificial sequence; identical to SEQ ID NO: 10466
  synthetic

SEQ ID NO: 32058 - DNA, 203 bp, Artificial sequence; identical to SEQ ID NO: 10480
  synthetic

SEQ ID NO: 32059 - DNA, 203 bp, Artificial sequence; identical to SEQ ID NO: 10481
  synthetic

SEQ ID NO: 32060 - DNA, 203 bp, Artificial sequence; identical to SEQ ID NO: 10482
  synthetic

SEQ ID NO: 32061 - DNA, 203 bp, Artificial sequence; identical to SEQ ID NO: 10483
  synthetic

SEQ ID NO: 32062 - DNA, 203 bp, Artificial sequence; identical to SEQ ID NO: 10484
  synthetic

SEQ ID NO: 32063 - DNA, 203 bp, Artificial sequence; identical to SEQ ID NO: 10485
  synthetic

SEQ ID NO: 32064 - DNA, 203 bp, Artificial sequence; identical to SEQ ID NO: 10486
  synthetic

SEQ ID NO: 32065 - DNA, 203 bp, Artificial sequence; identical to SEQ ID NO: 10487
  synthetic

SEQ ID NO: 32066 - DNA, 203 bp, Artificial sequence; identical to SEQ ID NO: 10488
  synthetic

SEQ ID NO: 32067 - DNA, 203 bp, Artificial sequence; identical to SEQ ID NO: 10489
  synthetic

SEQ ID NO: 32068 - DNA, 203 bp, Artificial sequence; identical to SEQ ID NO: 10490
  synthetic

SEQ ID NO: 32069 - DNA, 203 bp, Artificial sequence; identical to SEQ ID NO: 10494
  synthetic

SEQ ID NO: 32070 - DNA, 203 bp, Artificial sequence; identical to SEQ ID NO: 10495
  synthetic

SEQ ID NO: 32071 - DNA, 203 bp, Artificial sequence; identical to SEQ ID NO: 10496
  synthetic

SEQ ID NO: 32072 - DNA, 203 bp, Artificial sequence; identical to SEQ ID NO: 10509
  synthetic

SEQ ID NO: 32073 - DNA, 203 bp, Artificial sequence; identical to SEQ ID NO: 10510
  synthetic

SEQ ID NO: 32074 - DNA, 203 bp, Artificial sequence; identical to SEQ ID NO: 10511
  synthetic

SEQ ID NO: 32075 - DNA, 203 bp, Artificial sequence; identical to SEQ ID NO: 10514
  synthetic

SEQ ID NO: 32076 - DNA, 203 bp, Artificial sequence; identical to SEQ ID NO: 10515
  synthetic

SEQ ID NO: 32077 - DNA, 203 bp, Artificial sequence; identical to SEQ ID NO: 10516
  synthetic

SEQ ID NO: 32078 - DNA, 203 bp, Artificial sequence; identical to SEQ ID NO: 10519
  synthetic

SEQ ID NO: 32079 - DNA, 203 bp, Artificial sequence; identical to SEQ ID NO: 10520
  synthetic

SEQ ID NO: 32080 - DNA, 203 bp, Artificial sequence; identical to SEQ ID NO: 10521
  synthetic

SEQ ID NO: 32081 - DNA, 203 bp, Artificial sequence; identical to SEQ ID NO: 10523
  synthetic

SEQ ID NO: 32082 - DNA, 203 bp, Artificial sequence; identical to SEQ ID NO: 10524
  synthetic

SEQ ID NO: 32083 - DNA, 203 bp, Artificial sequence; identical to SEQ ID NO: 10525
  synthetic

SEQ ID NO: 32084 - DNA, 203 bp, Artificial sequence; identical to SEQ ID NO: 10545
  synthetic

SEQ ID NO: 32085 - DNA, 203 bp, Artificial sequence; identical to SEQ ID NO: 10546
  synthetic

SEQ ID NO: 32086 - DNA, 203 bp, Artificial sequence; identical to SEQ ID NO: 10547
  synthetic

SEQ ID NO: 32087 - DNA, 203 bp, Artificial sequence; identical to SEQ ID NO: 10553
  synthetic

SEQ ID NO: 32088 - DNA, 203 bp, Artificial sequence; identical to SEQ ID NO: 10554
  synthetic

SEQ ID NO: 32089 - DNA, 203 bp, Artificial sequence; identical to SEQ ID NO: 10563
  synthetic

SEQ ID NO: 32090 - DNA, 203 bp, Artificial sequence; identical to SEQ ID NO: 10565
  synthetic

SEQ ID NO: 32091 - DNA, 203 bp, Artificial sequence; identical to SEQ ID NO: 10585
  synthetic

SEQ ID NO: 32092 - DNA, 203 bp, Artificial sequence; identical to SEQ ID NO: 10591
  synthetic

SEQ ID NO: 32093 - DNA, 203 bp, Artificial sequence; identical to SEQ ID NO: 10599
  synthetic

SEQ ID NO: 32094 - DNA, 203 bp, Artificial sequence; identical to SEQ ID NO: 10602
  synthetic

SEQ ID NO: 32095 - DNA, 203 bp, Artificial sequence; identical to SEQ ID NO: 10606
  synthetic

SEQ ID NO: 32096 - DNA, 203 bp, Artificial sequence; identical to SEQ ID NO: 10609
  synthetic

SEQ ID NO: 32097 - DNA, 203 bp, Artificial sequence; identical to SEQ ID NO: 10610
  synthetic

SEQ ID NO: 32098 - DNA, 203 bp, Artificial sequence; identical to SEQ ID NO: 10618
  synthetic

SEQ ID NO: 32099 - DNA, 203 bp, Artificial sequence; identical to SEQ ID NO: 10619
  synthetic

SEQ ID NO: 32100 - DNA, 203 bp, Artificial sequence; identical to SEQ ID NO: 10622
  synthetic

SEQ ID NO: 32101 - DNA, 203 bp, Artificial sequence; identical to SEQ ID NO: 10623
  synthetic

SEQ ID NO: 32102 - DNA, 203 bp, Artificial sequence; identical to SEQ ID NO: 10627
  synthetic

SEQ ID NO: 32103 - DNA, 203 bp, Artificial sequence; identical to SEQ ID NO: 10631
  synthetic

SEQ ID NO: 32104 - DNA, 203 bp, Artificial sequence; identical to SEQ ID NO: 10632
  synthetic

SEQ ID NO: 32105 - DNA, 203 bp, Artificial sequence; identical to SEQ ID NO: 10633
  synthetic

SEQ ID NO: 32106 - DNA, 203 bp, Artificial sequence; identical to SEQ ID NO: 10634
  synthetic

SEQ ID NO: 32107 - DNA, 203 bp, Artificial sequence; identical to SEQ ID NO: 10637
  synthetic

SEQ ID NO: 32108 - DNA, 203 bp, Artificial sequence; identical to SEQ ID NO: 10639
  synthetic

SEQ ID NO: 32109 - DNA, 203 bp, Artificial sequence; identical to SEQ ID NO: 10642
  synthetic

SEQ ID NO: 32110 - DNA, 203 bp, Artificial sequence; identical to SEQ ID NO: 10644
  synthetic

SEQ ID NO: 32111 - DNA, 203 bp, Artificial sequence; identical to SEQ ID NO: 10650
  synthetic

SEQ ID NO: 32112 - DNA, 203 bp, Artificial sequence; identical to SEQ ID NO: 10662
  synthetic

SEQ ID NO: 32113 - DNA, 203 bp, Artificial sequence; identical to SEQ ID NO: 10671
  synthetic

SEQ ID NO: 32114 - DNA, 203 bp, Artificial sequence; identical to SEQ ID NO: 10676
  synthetic

SEQ ID NO: 32115 - DNA, 203 bp, Artificial sequence; identical to SEQ ID NO: 10734
  synthetic

SEQ ID NO: 32116 - DNA, 203 bp, Artificial sequence; identical to SEQ ID NO: 10740
  synthetic

SEQ ID NO: 32117 - DNA, 203 bp, Artificial sequence; identical to SEQ ID NO: 10741
  synthetic

SEQ ID NO: 32118 - DNA, 203 bp, Artificial sequence; identical to SEQ ID NO: 10761
  synthetic

SEQ ID NO: 32119 - DNA, 203 bp, Artificial sequence; identical to SEQ ID NO: 10762
  synthetic

SEQ ID NO: 32120 - DNA, 203 bp, Artificial sequence; identical to SEQ ID NO: 10763
  synthetic

SEQ ID NO: 32121 - DNA, 203 bp, Artificial sequence; identical to SEQ ID NO: 10764
  synthetic

SEQ ID NO: 32122 - DNA, 203 bp, Artificial sequence; identical to SEQ ID NO: 10784
  synthetic

SEQ ID NO: 32123 - DNA, 203 bp, Artificial sequence; identical to SEQ ID NO: 10786
  synthetic

SEQ ID NO: 32124 - DNA, 203 bp, Artificial sequence; identical to SEQ ID NO: 10787
  synthetic

SEQ ID NO: 32125 - DNA, 203 bp, Artificial sequence; identical to SEQ ID NO: 10788
  synthetic

SEQ ID NO: 32126 - DNA, 203 bp, Artificial sequence; identical to SEQ ID NO: 10802
  synthetic

SEQ ID NO: 32127 - DNA, 203 bp, Artificial sequence; identical to SEQ ID NO: 10803
  synthetic

SEQ ID NO: 32128 - DNA, 203 bp, Artificial sequence; identical to SEQ ID NO: 10805
  synthetic

SEQ ID NO: 32129 - DNA, 203 bp, Artificial sequence; identical to SEQ ID NO: 10809
  synthetic

SEQ ID NO: 32130 - DNA, 203 bp, Artificial sequence; identical to SEQ ID NO: 10810
  synthetic

SEQ ID NO: 32131 - DNA, 203 bp, Artificial sequence; identical to SEQ ID NO: 10815
  synthetic

SEQ ID NO: 32132 - DNA, 203 bp, Artificial sequence; identical to SEQ ID NO: 10828
  synthetic

SEQ ID NO: 32133 - DNA, 203 bp, Artificial sequence; identical to SEQ ID NO: 10829
  synthetic

SEQ ID NO: 32134 - DNA, 203 bp, Artificial sequence; identical to SEQ ID NO: 10834
  synthetic

SEQ ID NO: 32135 - DNA, 203 bp, Artificial sequence; identical to SEQ ID NO: 10860
  synthetic

SEQ ID NO: 32136 - DNA, 203 bp, Artificial sequence; identical to SEQ ID NO: 10862
  synthetic

SEQ ID NO: 32137 - DNA, 203 bp, Artificial sequence; identical to SEQ ID NO: 10864
  synthetic

SEQ ID NO: 32138 - DNA, 203 bp, Artificial sequence; identical to SEQ ID NO: 10870
  synthetic

SEQ ID NO: 32139 - DNA, 203 bp, Artificial sequence; identical to SEQ ID NO: 10888
  synthetic

SEQ ID NO: 32140 - DNA, 203 bp, Artificial sequence; identical to SEQ ID NO: 10889
  synthetic

SEQ ID NO: 32141 - DNA, 203 bp, Artificial sequence; identical to SEQ ID NO: 10903
  synthetic

SEQ ID NO: 32142 - DNA, 203 bp, Artificial sequence; identical to SEQ ID NO: 10904
  synthetic

SEQ ID NO: 32143 - DNA, 203 bp, Artificial sequence; identical to SEQ ID NO: 10905
  synthetic

SEQ ID NO: 32144 - DNA, 203 bp, Artificial sequence; identical to SEQ ID NO: 10906
  synthetic

SEQ ID NO: 32145 - DNA, 203 bp, Artificial sequence; identical to SEQ ID NO: 10908
  synthetic

SEQ ID NO: 32146 - DNA, 203 bp, Artificial sequence; identical to SEQ ID NO: 10909
  synthetic

SEQ ID NO: 32147 - DNA, 203 bp, Artificial sequence; identical to SEQ ID NO: 10910
  synthetic

SEQ ID NO: 32148 - DNA, 203 bp, Artificial sequence; identical to SEQ ID NO: 10911
  synthetic

SEQ ID NO: 32149 - DNA, 203 bp, Artificial sequence; identical to SEQ ID NO: 10923
  synthetic

SEQ ID NO: 32150 - DNA, 203 bp, Artificial sequence; identical to SEQ ID NO: 10926
  synthetic

SEQ ID NO: 32151 - DNA, 203 bp, Artificial sequence; identical to SEQ ID NO: 10929
  synthetic

SEQ ID NO: 32152 - DNA, 203 bp, Artificial sequence; identical to SEQ ID NO: 10938
  synthetic

SEQ ID NO: 32153 - DNA, 203 bp, Artificial sequence; identical to SEQ ID NO: 10939
  synthetic

SEQ ID NO: 32154 - DNA, 203 bp, Artificial sequence; identical to SEQ ID NO: 10940
  synthetic

SEQ ID NO: 32155 - DNA, 203 bp, Artificial sequence; identical to SEQ ID NO: 10952
  synthetic

SEQ ID NO: 32156 - DNA, 203 bp, Artificial sequence; identical to SEQ ID NO: 10993
  synthetic

SEQ ID NO: 32157 - DNA, 203 bp, Artificial sequence; identical to SEQ ID NO: 10997
  synthetic

SEQ ID NO: 32158 - DNA, 203 bp, Artificial sequence; identical to SEQ ID NO: 10998
  synthetic

SEQ ID NO: 32159 - DNA, 203 bp, Artificial sequence; identical to SEQ ID NO: 11000
  synthetic

SEQ ID NO: 32160 - DNA, 203 bp, Artificial sequence; identical to SEQ ID NO: 11001
  synthetic

SEQ ID NO: 32161 - DNA, 203 bp, Artificial sequence; identical to SEQ ID NO: 11002
  synthetic

SEQ ID NO: 32162 - DNA, 203 bp, Artificial sequence; identical to SEQ ID NO: 11007
  synthetic

SEQ ID NO: 32163 - DNA, 203 bp, Artificial sequence; identical to SEQ ID NO: 11008
  synthetic

SEQ ID NO: 32164 - DNA, 203 bp, Artificial sequence; identical to SEQ ID NO: 11010
  synthetic

SEQ ID NO: 32165 - DNA, 203 bp, Artificial sequence; identical to SEQ ID NO: 11040
  synthetic

SEQ ID NO: 32166 - DNA, 203 bp, Artificial sequence; identical to SEQ ID NO: 11066
  synthetic

SEQ ID NO: 32167 - DNA, 203 bp, Artificial sequence; identical to SEQ ID NO: 11067
  synthetic

SEQ ID NO: 32168 - DNA, 203 bp, Artificial sequence; identical to SEQ ID NO: 11068
  synthetic

SEQ ID NO: 32169 - DNA, 203 bp, Artificial sequence; identical to SEQ ID NO: 11069
  synthetic

SEQ ID NO: 32170 - DNA, 203 bp, Artificial sequence; identical to SEQ ID NO: 11070
  synthetic

SEQ ID NO: 32171 - DNA, 203 bp, Artificial sequence; identical to SEQ ID NO: 11072
  synthetic

SEQ ID NO: 32172 - DNA, 203 bp, Artificial sequence; identical to SEQ ID NO: 11081
  synthetic

SEQ ID NO: 32173 - DNA, 203 bp, Artificial sequence; identical to SEQ ID NO: 11085
  synthetic

SEQ ID NO: 32174 - DNA, 203 bp, Artificial sequence; identical to SEQ ID NO: 11087
  synthetic

SEQ ID NO: 32175 - DNA, 203 bp, Artificial sequence; identical to SEQ ID NO: 11090
  synthetic

SEQ ID NO: 32176 - DNA, 203 bp, Artificial sequence; identical to SEQ ID NO: 11092
  synthetic

SEQ ID NO: 32177 - DNA, 203 bp, Artificial sequence; identical to SEQ ID NO: 11096
  synthetic

SEQ ID NO: 32178 - DNA, 203 bp, Artificial sequence; identical to SEQ ID NO: 11097
  synthetic

SEQ ID NO: 32179 - DNA, 203 bp, Artificial sequence; identical to SEQ ID NO: 11098
  synthetic

SEQ ID NO: 32180 - DNA, 203 bp, Artificial sequence; identical to SEQ ID NO: 11099
  synthetic

SEQ ID NO: 32181 - DNA, 203 bp, Artificial sequence; identical to SEQ ID NO: 11100
  synthetic

SEQ ID NO: 32182 - DNA, 203 bp, Artificial sequence; identical to SEQ ID NO: 11101
  synthetic

SEQ ID NO: 32183 - DNA, 203 bp, Artificial sequence; identical to SEQ ID NO: 11102
  synthetic

SEQ ID NO: 32184 - DNA, 203 bp, Artificial sequence; identical to SEQ ID NO: 11110
  synthetic

SEQ ID NO: 32185 - DNA, 203 bp, Artificial sequence; identical to SEQ ID NO: 11115
  synthetic

SEQ ID NO: 32186 - DNA, 203 bp, Artificial sequence; identical to SEQ ID NO: 11150
  synthetic

SEQ ID NO: 32187 - DNA, 203 bp, Artificial sequence; identical to SEQ ID NO: 11155
  synthetic

SEQ ID NO: 32188 - DNA, 203 bp, Artificial sequence; identical to SEQ ID NO: 11162
  synthetic

SEQ ID NO: 32189 - DNA, 203 bp, Artificial sequence; identical to SEQ ID NO: 11163
  synthetic

SEQ ID NO: 32190 - DNA, 203 bp, Artificial sequence; identical to SEQ ID NO: 11167
  synthetic

SEQ ID NO: 32191 - DNA, 203 bp, Artificial sequence; identical to SEQ ID NO: 11178
  synthetic

SEQ ID NO: 32192 - DNA, 203 bp, Artificial sequence; identical to SEQ ID NO: 11179
  synthetic

SEQ ID NO: 32193 - DNA, 203 bp, Artificial sequence; identical to SEQ ID NO: 11180
  synthetic

SEQ ID NO: 32194 - DNA, 203 bp, Artificial sequence; identical to SEQ ID NO: 11182
  synthetic

SEQ ID NO: 32195 - DNA, 203 bp, Artificial sequence; identical to SEQ ID NO: 11184
  synthetic

SEQ ID NO: 32196 - DNA, 203 bp, Artificial sequence; identical to SEQ ID NO: 11204
  synthetic

SEQ ID NO: 32197 - DNA, 203 bp, Artificial sequence; identical to SEQ ID NO: 11205
  synthetic

SEQ ID NO: 32198 - DNA, 203 bp, Artificial sequence; identical to SEQ ID NO: 11206
  synthetic

SEQ ID NO: 32199 - DNA, 203 bp, Artificial sequence; identical to SEQ ID NO: 11218
  synthetic

SEQ ID NO: 32200 - DNA, 203 bp, Artificial sequence; identical to SEQ ID NO: 11219
  synthetic

SEQ ID NO: 32201 - DNA, 203 bp, Artificial sequence; identical to SEQ ID NO: 11221
  synthetic

SEQ ID NO: 32202 - DNA, 203 bp, Artificial sequence; identical to SEQ ID NO: 11222
  synthetic

SEQ ID NO: 32203 - DNA, 203 bp, Artificial sequence; identical to SEQ ID NO: 11241
  synthetic

SEQ ID NO: 32204 - DNA, 203 bp, Artificial sequence; identical to SEQ ID NO: 11242
  synthetic

SEQ ID NO: 32205 - DNA, 203 bp, Artificial sequence; identical to SEQ ID NO: 11243
  synthetic

SEQ ID NO: 32206 - DNA, 203 bp, Artificial sequence; identical to SEQ ID NO: 11249
  synthetic

SEQ ID NO: 32207 - DNA, 203 bp, Artificial sequence; identical to SEQ ID NO: 11257
  synthetic

SEQ ID NO: 32208 - DNA, 203 bp, Artificial sequence; identical to SEQ ID NO: 11258
  synthetic

SEQ ID NO: 32209 - DNA, 203 bp, Artificial sequence; identical to SEQ ID NO: 11259
  synthetic

SEQ ID NO: 32210 - DNA, 203 bp, Artificial sequence; identical to SEQ ID NO: 11260
  synthetic

SEQ ID NO: 32211 - DNA, 203 bp, Artificial sequence; identical to SEQ ID NO: 11262
  synthetic

SEQ ID NO: 32212 - DNA, 203 bp, Artificial sequence; identical to SEQ ID NO: 11271
  synthetic

SEQ ID NO: 32213 - DNA, 203 bp, Artificial sequence; identical to SEQ ID NO: 11315
  synthetic

SEQ ID NO: 32214 - DNA, 203 bp, Artificial sequence; identical to SEQ ID NO: 11316
  synthetic

SEQ ID NO: 32215 - DNA, 203 bp, Artificial sequence; identical to SEQ ID NO: 11318
  synthetic

SEQ ID NO: 32216 - DNA, 203 bp, Artificial sequence; identical to SEQ ID NO: 11337
  synthetic

SEQ ID NO: 32217 - DNA, 203 bp, Artificial sequence; identical to SEQ ID NO: 11349
  synthetic

SEQ ID NO: 32218 - DNA, 203 bp, Artificial sequence; identical to SEQ ID NO: 11381
  synthetic

SEQ ID NO: 32219 - DNA, 203 bp, Artificial sequence; identical to SEQ ID NO: 11419
  synthetic

SEQ ID NO: 32220 - DNA, 203 bp, Artificial sequence; identical to SEQ ID NO: 11420
  synthetic

SEQ ID NO: 32221 - DNA, 203 bp, Artificial sequence; identical to SEQ ID NO: 11429
  synthetic

SEQ ID NO: 32222 - DNA, 203 bp, Artificial sequence; identical to SEQ ID NO: 11430
  synthetic

SEQ ID NO: 32223 - DNA, 203 bp, Artificial sequence; identical to SEQ ID NO: 11450
  synthetic

SEQ ID NO: 32224 - DNA, 203 bp, Artificial sequence; identical to SEQ ID NO: 11451
  synthetic

SEQ ID NO: 32225 - DNA, 203 bp, Artificial sequence; identical to SEQ ID NO: 11454
  synthetic

SEQ ID NO: 32226 - DNA, 203 bp, Artificial sequence; identical to SEQ ID NO: 11455
  synthetic

SEQ ID NO: 32227 - DNA, 203 bp, Artificial sequence; identical to SEQ ID NO: 11479
  synthetic

SEQ ID NO: 32228 - DNA, 203 bp, Artificial sequence; identical to SEQ ID NO: 11480
  synthetic

SEQ ID NO: 32229 - DNA, 203 bp, Artificial sequence; identical to SEQ ID NO: 11481
  synthetic

SEQ ID NO: 32230 - DNA, 203 bp, Artificial sequence; identical to SEQ ID NO: 11482
  synthetic

SEQ ID NO: 32231 - DNA, 203 bp, Artificial sequence; identical to SEQ ID NO: 11483
  synthetic

SEQ ID NO: 32232 - DNA, 203 bp, Artificial sequence; identical to SEQ ID NO: 11484
  synthetic

SEQ ID NO: 32233 - DNA, 203 bp, Artificial sequence; identical to SEQ ID NO: 11485
  synthetic

SEQ ID NO: 32234 - DNA, 203 bp, Artificial sequence; identical to SEQ ID NO: 11486
  synthetic

SEQ ID NO: 32235 - DNA, 203 bp, Artificial sequence; identical to SEQ ID NO: 11487
  synthetic

SEQ ID NO: 32236 - DNA, 203 bp, Artificial sequence; identical to SEQ ID NO: 11488
  synthetic

SEQ ID NO: 32237 - DNA, 203 bp, Artificial sequence; identical to SEQ ID NO: 11489
  synthetic

SEQ ID NO: 32238 - DNA, 203 bp, Artificial sequence; identical to SEQ ID NO: 11490
  synthetic

SEQ ID NO: 32239 - DNA, 203 bp, Artificial sequence; identical to SEQ ID NO: 11491
  synthetic

SEQ ID NO: 32240 - DNA, 203 bp, Artificial sequence; identical to SEQ ID NO: 11492
  synthetic

SEQ ID NO: 32241 - DNA, 203 bp, Artificial sequence; identical to SEQ ID NO: 11494
  synthetic

SEQ ID NO: 32242 - DNA, 203 bp, Artificial sequence; identical to SEQ ID NO: 11496
  synthetic

SEQ ID NO: 32243 - DNA, 203 bp, Artificial sequence; identical to SEQ ID NO: 11497
  synthetic

SEQ ID NO: 32244 - DNA, 203 bp, Artificial sequence; identical to SEQ ID NO: 11498
  synthetic

SEQ ID NO: 32245 - DNA, 203 bp, Artificial sequence; identical to SEQ ID NO: 11500
  synthetic

SEQ ID NO: 32246 - DNA, 203 bp, Artificial sequence; identical to SEQ ID NO: 11501
  synthetic

SEQ ID NO: 32247 - DNA, 203 bp, Artificial sequence; identical to SEQ ID NO: 11502
  synthetic

SEQ ID NO: 32248 - DNA, 203 bp, Artificial sequence; identical to SEQ ID NO: 11504
  synthetic

SEQ ID NO: 32249 - DNA, 203 bp, Artificial sequence; identical to SEQ ID NO: 11505
  synthetic

SEQ ID NO: 32250 - DNA, 203 bp, Artificial sequence; identical to SEQ ID NO: 11506
  synthetic

SEQ ID NO: 32251 - DNA, 203 bp, Artificial sequence; identical to SEQ ID NO: 11507
  synthetic

SEQ ID NO: 32252 - DNA, 203 bp, Artificial sequence; identical to SEQ ID NO: 11522
  synthetic

SEQ ID NO: 32253 - DNA, 203 bp, Artificial sequence; identical to SEQ ID NO: 11523
  synthetic

SEQ ID NO: 32254 - DNA, 203 bp, Artificial sequence; identical to SEQ ID NO: 11524
  synthetic

SEQ ID NO: 32255 - DNA, 203 bp, Artificial sequence; identical to SEQ ID NO: 11525
  synthetic

SEQ ID NO: 32256 - DNA, 203 bp, Artificial sequence; identical to SEQ ID NO: 11526
  synthetic

SEQ ID NO: 32257 - DNA, 203 bp, Artificial sequence; identical to SEQ ID NO: 11532
  synthetic

SEQ ID NO: 32258 - DNA, 203 bp, Artificial sequence; identical to SEQ ID NO: 11533
  synthetic

SEQ ID NO: 32259 - DNA, 203 bp, Artificial sequence; identical to SEQ ID NO: 11534
  synthetic

SEQ ID NO: 32260 - DNA, 203 bp, Artificial sequence; identical to SEQ ID NO: 11535
  synthetic

SEQ ID NO: 32261 - DNA, 203 bp, Artificial sequence; identical to SEQ ID NO: 11541
  synthetic

SEQ ID NO: 32262 - DNA, 203 bp, Artificial sequence; identical to SEQ ID NO: 11542
  synthetic

SEQ ID NO: 32263 - DNA, 203 bp, Artificial sequence; identical to SEQ ID NO: 11548
  synthetic

SEQ ID NO: 32264 - DNA, 203 bp, Artificial sequence; identical to SEQ ID NO: 11549
  synthetic

SEQ ID NO: 32265 - DNA, 203 bp, Artificial sequence; identical to SEQ ID NO: 11550
  synthetic

SEQ ID NO: 32266 - DNA, 203 bp, Artificial sequence; identical to SEQ ID NO: 11576
  synthetic

SEQ ID NO: 32267 - DNA, 203 bp, Artificial sequence; identical to SEQ ID NO: 11588
  synthetic

SEQ ID NO: 32268 - DNA, 203 bp, Artificial sequence; identical to SEQ ID NO: 11598
  synthetic

SEQ ID NO: 32269 - DNA, 203 bp, Artificial sequence; identical to SEQ ID NO: 11599
  synthetic

SEQ ID NO: 32270 - DNA, 203 bp, Artificial sequence; identical to SEQ ID NO: 11603
  synthetic

SEQ ID NO: 32271 - DNA, 203 bp, Artificial sequence; identical to SEQ ID NO: 11618
  synthetic

SEQ ID NO: 32272 - DNA, 203 bp, Artificial sequence; identical to SEQ ID NO: 11620
  synthetic

SEQ ID NO: 32273 - DNA, 203 bp, Artificial sequence; identical to SEQ ID NO: 11641
  synthetic

SEQ ID NO: 32274 - DNA, 203 bp, Artificial sequence; identical to SEQ ID NO: 11642
  synthetic

SEQ ID NO: 32275 - DNA, 203 bp, Artificial sequence; identical to SEQ ID NO: 11654
  synthetic

SEQ ID NO: 32276 - DNA, 203 bp, Artificial sequence; identical to SEQ ID NO: 11655
  synthetic

SEQ ID NO: 32277 - DNA, 203 bp, Artificial sequence; identical to SEQ ID NO: 11656
  synthetic

SEQ ID NO: 32278 - DNA, 203 bp, Artificial sequence; identical to SEQ ID NO: 11658
  synthetic

SEQ ID NO: 32279 - DNA, 203 bp, Artificial sequence; identical to SEQ ID NO: 11659
  synthetic

SEQ ID NO: 32280 - DNA, 203 bp, Artificial sequence; identical to SEQ ID NO: 11660
  synthetic

SEQ ID NO: 32281 - DNA, 203 bp, Artificial sequence; identical to SEQ ID NO: 11682
  synthetic

SEQ ID NO: 32282 - DNA, 203 bp, Artificial sequence; identical to SEQ ID NO: 11683
  synthetic

SEQ ID NO: 32283 - DNA, 203 bp, Artificial sequence; identical to SEQ ID NO: 11684
  synthetic

SEQ ID NO: 32284 - DNA, 203 bp, Artificial sequence; identical to SEQ ID NO: 11685
  synthetic

SEQ ID NO: 32285 - DNA, 203 bp, Artificial sequence; identical to SEQ ID NO: 11696
  synthetic

SEQ ID NO: 32286 - DNA, 203 bp, Artificial sequence; identical to SEQ ID NO: 11702
  synthetic

SEQ ID NO: 32287 - DNA, 203 bp, Artificial sequence; identical to SEQ ID NO: 11703
  synthetic

SEQ ID NO: 32288 - DNA, 203 bp, Artificial sequence; identical to SEQ ID NO: 11706
  synthetic

SEQ ID NO: 32289 - DNA, 203 bp, Artificial sequence; identical to SEQ ID NO: 11707
  synthetic

SEQ ID NO: 32290 - DNA, 203 bp, Artificial sequence; identical to SEQ ID NO: 11708
  synthetic

SEQ ID NO: 32291 - DNA, 203 bp, Artificial sequence; identical to SEQ ID NO: 11709
  synthetic

SEQ ID NO: 32292 - DNA, 203 bp, Artificial sequence; identical to SEQ ID NO: 11718
  synthetic

SEQ ID NO: 32293 - DNA, 203 bp, Artificial sequence; identical to SEQ ID NO: 11719
  synthetic

SEQ ID NO: 32294 - DNA, 203 bp, Artificial sequence; identical to SEQ ID NO: 11731
  synthetic

SEQ ID NO: 32295 - DNA, 203 bp, Artificial sequence; identical to SEQ ID NO: 11733
  synthetic

SEQ ID NO: 32296 - DNA, 203 bp, Artificial sequence; identical to SEQ ID NO: 11734
  synthetic

SEQ ID NO: 32297 - DNA, 203 bp, Artificial sequence; identical to SEQ ID NO: 11738
  synthetic

SEQ ID NO: 32298 - DNA, 203 bp, Artificial sequence; identical to SEQ ID NO: 11739
  synthetic

SEQ ID NO: 32299 - DNA, 203 bp, Artificial sequence; identical to SEQ ID NO: 11740
  synthetic

SEQ ID NO: 32300 - DNA, 203 bp, Artificial sequence; identical to SEQ ID NO: 11741
  synthetic

SEQ ID NO: 32301 - DNA, 203 bp, Artificial sequence; identical to SEQ ID NO: 11742
  synthetic

SEQ ID NO: 32302 - DNA, 203 bp, Artificial sequence; identical to SEQ ID NO: 11743
  synthetic

SEQ ID NO: 32303 - DNA, 203 bp, Artificial sequence; identical to SEQ ID NO: 11746
  synthetic

SEQ ID NO: 32304 - DNA, 203 bp, Artificial sequence; identical to SEQ ID NO: 11767
  synthetic

SEQ ID NO: 32305 - DNA, 203 bp, Artificial sequence; identical to SEQ ID NO: 11793
  synthetic

SEQ ID NO: 32306 - DNA, 203 bp, Artificial sequence; identical to SEQ ID NO: 11798
  synthetic

SEQ ID NO: 32307 - DNA, 203 bp, Artificial sequence; identical to SEQ ID NO: 11799
  synthetic

SEQ ID NO: 32308 - DNA, 203 bp, Artificial sequence; identical to SEQ ID NO: 11800
  synthetic

SEQ ID NO: 32309 - DNA, 203 bp, Artificial sequence; identical to SEQ ID NO: 11833
  synthetic

SEQ ID NO: 32310 - DNA, 203 bp, Artificial sequence; identical to SEQ ID NO: 11843
  synthetic

SEQ ID NO: 32311 - DNA, 203 bp, Artificial sequence; identical to SEQ ID NO: 11844
  synthetic

SEQ ID NO: 32312 - DNA, 203 bp, Artificial sequence; identical to SEQ ID NO: 11845
  synthetic

SEQ ID NO: 32313 - DNA, 203 bp, Artificial sequence; identical to SEQ ID NO: 11846
  synthetic

SEQ ID NO: 32314 - DNA, 203 bp, Artificial sequence; identical to SEQ ID NO: 11848
  synthetic

SEQ ID NO: 32315 - DNA, 203 bp, Artificial sequence; identical to SEQ ID NO: 11849
  synthetic

SEQ ID NO: 32316 - DNA, 203 bp, Artificial sequence; identical to SEQ ID NO: 11856
  synthetic

SEQ ID NO: 32317 - DNA, 203 bp, Artificial sequence; identical to SEQ ID NO: 11864
  synthetic

SEQ ID NO: 32318 - DNA, 203 bp, Artificial sequence; identical to SEQ ID NO: 11868
  synthetic

SEQ ID NO: 32319 - DNA, 203 bp, Artificial sequence; identical to SEQ ID NO: 11888
  synthetic

SEQ ID NO: 32320 - DNA, 203 bp, Artificial sequence; identical to SEQ ID NO: 11902
  synthetic

SEQ ID NO: 32321 - DNA, 203 bp, Artificial sequence; identical to SEQ ID NO: 11904
  synthetic

SEQ ID NO: 32322 - DNA, 203 bp, Artificial sequence; identical to SEQ ID NO: 11905
  synthetic

SEQ ID NO: 32323 - DNA, 203 bp, Artificial sequence; identical to SEQ ID NO: 11906
  synthetic

SEQ ID NO: 32324 - DNA, 203 bp, Artificial sequence; identical to SEQ ID NO: 11909
  synthetic

SEQ ID NO: 32325 - DNA, 203 bp, Artificial sequence; identical to SEQ ID NO: 11910
  synthetic

SEQ ID NO: 32326 - DNA, 203 bp, Artificial sequence; identical to SEQ ID NO: 11911
  synthetic

SEQ ID NO: 32327 - DNA, 203 bp, Artificial sequence; identical to SEQ ID NO: 11919
  synthetic

SEQ ID NO: 32328 - DNA, 203 bp, Artificial sequence; identical to SEQ ID NO: 11928
  synthetic

SEQ ID NO: 32329 - DNA, 203 bp, Artificial sequence; identical to SEQ ID NO: 11949
  synthetic

SEQ ID NO: 32330 - DNA, 203 bp, Artificial sequence; identical to SEQ ID NO: 11950
  synthetic

SEQ ID NO: 32331 - DNA, 203 bp, Artificial sequence; identical to SEQ ID NO: 11951
  synthetic

SEQ ID NO: 32332 - DNA, 203 bp, Artificial sequence; identical to SEQ ID NO: 11952
  synthetic

SEQ ID NO: 32333 - DNA, 203 bp, Artificial sequence; identical to SEQ ID NO: 11953
  synthetic

SEQ ID NO: 32334 - DNA, 203 bp, Artificial sequence; identical to SEQ ID NO: 11954
  synthetic

SEQ ID NO: 32335 - DNA, 203 bp, Artificial sequence; identical to SEQ ID NO: 11968
  synthetic

SEQ ID NO: 32336 - DNA, 203 bp, Artificial sequence; identical to SEQ ID NO: 11975
  synthetic

SEQ ID NO: 32337 - DNA, 203 bp, Artificial sequence; identical to SEQ ID NO: 11976
  synthetic

SEQ ID NO: 32338 - DNA, 203 bp, Artificial sequence; identical to SEQ ID NO: 11978
  synthetic

SEQ ID NO: 32339 - DNA, 203 bp, Artificial sequence; identical to SEQ ID NO: 11979
  synthetic

SEQ ID NO: 32340 - DNA, 203 bp, Artificial sequence; identical to SEQ ID NO: 12000
  synthetic

SEQ ID NO: 32341 - DNA, 203 bp, Artificial sequence; identical to SEQ ID NO: 12003
  synthetic

SEQ ID NO: 32342 - DNA, 203 bp, Artificial sequence; identical to SEQ ID NO: 12004
  synthetic

SEQ ID NO: 32343 - DNA, 203 bp, Artificial sequence; identical to SEQ ID NO: 12005
  synthetic

SEQ ID NO: 32344 - DNA, 203 bp, Artificial sequence; identical to SEQ ID NO: 12006
  synthetic

SEQ ID NO: 32345 - DNA, 203 bp, Artificial sequence; identical to SEQ ID NO: 12007
  synthetic

SEQ ID NO: 32346 - DNA, 203 bp, Artificial sequence; identical to SEQ ID NO: 12008
  synthetic

SEQ ID NO: 32347 - DNA, 203 bp, Artificial sequence; identical to SEQ ID NO: 12022
  synthetic

SEQ ID NO: 32348 - DNA, 203 bp, Artificial sequence; identical to SEQ ID NO: 12023
  synthetic

SEQ ID NO: 32349 - DNA, 203 bp, Artificial sequence; identical to SEQ ID NO: 12024
  synthetic

SEQ ID NO: 32350 - DNA, 203 bp, Artificial sequence; identical to SEQ ID NO: 12026
  synthetic

SEQ ID NO: 32351 - DNA, 203 bp, Artificial sequence; identical to SEQ ID NO: 12028
  synthetic

SEQ ID NO: 32352 - DNA, 203 bp, Artificial sequence; identical to SEQ ID NO: 12039
  synthetic

SEQ ID NO: 32353 - DNA, 203 bp, Artificial sequence; identical to SEQ ID NO: 12041
  synthetic

SEQ ID NO: 32354 - DNA, 203 bp, Artificial sequence; identical to SEQ ID NO: 12042
  synthetic

SEQ ID NO: 32355 - DNA, 203 bp, Artificial sequence; identical to SEQ ID NO: 12043
  synthetic

SEQ ID NO: 32356 - DNA, 203 bp, Artificial sequence; identical to SEQ ID NO: 12044
  synthetic

SEQ ID NO: 32357 - DNA, 203 bp, Artificial sequence; identical to SEQ ID NO: 12046
  synthetic

SEQ ID NO: 32358 - DNA, 203 bp, Artificial sequence; identical to SEQ ID NO: 12047
  synthetic

SEQ ID NO: 32359 - DNA, 203 bp, Artificial sequence; identical to SEQ ID NO: 12048
  synthetic

SEQ ID NO: 32360 - DNA, 203 bp, Artificial sequence; identical to SEQ ID NO: 12049
  synthetic

SEQ ID NO: 32361 - DNA, 203 bp, Artificial sequence; identical to SEQ ID NO: 12051
  synthetic

SEQ ID NO: 32362 - DNA, 203 bp, Artificial sequence; identical to SEQ ID NO: 12058
  synthetic

SEQ ID NO: 32363 - DNA, 203 bp, Artificial sequence; identical to SEQ ID NO: 12059
  synthetic

SEQ ID NO: 32364 - DNA, 203 bp, Artificial sequence; identical to SEQ ID NO: 12060
  synthetic

SEQ ID NO: 32365 - DNA, 203 bp, Artificial sequence; identical to SEQ ID NO: 12062
  synthetic

SEQ ID NO: 32366 - DNA, 203 bp, Artificial sequence; identical to SEQ ID NO: 12063
  synthetic

SEQ ID NO: 32367 - DNA, 203 bp, Artificial sequence; identical to SEQ ID NO: 12064
  synthetic

SEQ ID NO: 32368 - DNA, 203 bp, Artificial sequence; identical to SEQ ID NO: 12093
  synthetic

SEQ ID NO: 32369 - DNA, 203 bp, Artificial sequence; identical to SEQ ID NO: 12094
  synthetic

SEQ ID NO: 32370 - DNA, 203 bp, Artificial sequence; identical to SEQ ID NO: 12095
  synthetic

SEQ ID NO: 32371 - DNA, 203 bp, Artificial sequence; identical to SEQ ID NO: 12101
  synthetic

SEQ ID NO: 32372 - DNA, 203 bp, Artificial sequence; identical to SEQ ID NO: 12129
  synthetic

SEQ ID NO: 32373 - DNA, 203 bp, Artificial sequence; identical to SEQ ID NO: 12131
  synthetic

SEQ ID NO: 32374 - DNA, 203 bp, Artificial sequence; identical to SEQ ID NO: 12132
  synthetic

SEQ ID NO: 32375 - DNA, 203 bp, Artificial sequence; identical to SEQ ID NO: 12133
  synthetic

SEQ ID NO: 32376 - DNA, 203 bp, Artificial sequence; identical to SEQ ID NO: 12134
  synthetic

SEQ ID NO: 32377 - DNA, 203 bp, Artificial sequence; identical to SEQ ID NO: 12135
  synthetic

SEQ ID NO: 32378 - DNA, 203 bp, Artificial sequence; identical to SEQ ID NO: 12137
  synthetic

SEQ ID NO: 32379 - DNA, 203 bp, Artificial sequence; identical to SEQ ID NO: 12138
  synthetic

SEQ ID NO: 32380 - DNA, 203 bp, Artificial sequence; identical to SEQ ID NO: 12149
  synthetic

SEQ ID NO: 32381 - DNA, 203 bp, Artificial sequence; identical to SEQ ID NO: 12155
  synthetic

SEQ ID NO: 32382 - DNA, 203 bp, Artificial sequence; identical to SEQ ID NO: 12158
  synthetic

SEQ ID NO: 32383 - DNA, 203 bp, Artificial sequence; identical to SEQ ID NO: 12159
  synthetic

SEQ ID NO: 32384 - DNA, 203 bp, Artificial sequence; identical to SEQ ID NO: 12160
  synthetic

SEQ ID NO: 32385 - DNA, 203 bp, Artificial sequence; identical to SEQ ID NO: 12161
  synthetic

SEQ ID NO: 32386 - DNA, 203 bp, Artificial sequence; identical to SEQ ID NO: 12162
  synthetic

SEQ ID NO: 32387 - DNA, 203 bp, Artificial sequence; identical to SEQ ID NO: 12181
  synthetic

SEQ ID NO: 32388 - DNA, 203 bp, Artificial sequence; identical to SEQ ID NO: 12204
  synthetic

SEQ ID NO: 32389 - DNA, 203 bp, Artificial sequence; identical to SEQ ID NO: 12206
  synthetic

SEQ ID NO: 32390 - DNA, 203 bp, Artificial sequence; identical to SEQ ID NO: 12207
  synthetic

SEQ ID NO: 32391 - DNA, 203 bp, Artificial sequence; identical to SEQ ID NO: 12208
  synthetic

SEQ ID NO: 32392 - DNA, 203 bp, Artificial sequence; identical to SEQ ID NO: 12215
  synthetic

SEQ ID NO: 32393 - DNA, 203 bp, Artificial sequence; identical to SEQ ID NO: 12216
  synthetic

SEQ ID NO: 32394 - DNA, 203 bp, Artificial sequence; identical to SEQ ID NO: 12218
  synthetic

SEQ ID NO: 32395 - DNA, 203 bp, Artificial sequence; identical to SEQ ID NO: 12219
  synthetic

SEQ ID NO: 32396 - DNA, 203 bp, Artificial sequence; identical to SEQ ID NO: 12225
  synthetic

SEQ ID NO: 32397 - DNA, 203 bp, Artificial sequence; identical to SEQ ID NO: 12226
  synthetic

SEQ ID NO: 32398 - DNA, 203 bp, Artificial sequence; identical to SEQ ID NO: 12228
  synthetic

SEQ ID NO: 32399 - DNA, 203 bp, Artificial sequence; identical to SEQ ID NO: 12234
  synthetic

SEQ ID NO: 32400 - DNA, 203 bp, Artificial sequence; identical to SEQ ID NO: 12236
  synthetic

SEQ ID NO: 32401 - DNA, 203 bp, Artificial sequence; identical to SEQ ID NO: 12291
  synthetic

SEQ ID NO: 32402 - DNA, 203 bp, Artificial sequence; identical to SEQ ID NO: 12318
  synthetic

SEQ ID NO: 32403 - DNA, 203 bp, Artificial sequence; identical to SEQ ID NO: 12320
  synthetic

SEQ ID NO: 32404 - DNA, 203 bp, Artificial sequence; identical to SEQ ID NO: 12321
  synthetic

SEQ ID NO: 32405 - DNA, 203 bp, Artificial sequence; identical to SEQ ID NO: 12322
  synthetic

SEQ ID NO: 32406 - DNA, 203 bp, Artificial sequence; identical to SEQ ID NO: 12323
  synthetic

SEQ ID NO: 32407 - DNA, 203 bp, Artificial sequence; identical to SEQ ID NO: 12333
  synthetic

SEQ ID NO: 32408 - DNA, 203 bp, Artificial sequence; identical to SEQ ID NO: 12334
  synthetic

SEQ ID NO: 32409 - DNA, 203 bp, Artificial sequence; identical to SEQ ID NO: 12344
  synthetic

SEQ ID NO: 32410 - DNA, 203 bp, Artificial sequence; identical to SEQ ID NO: 12347
  synthetic

SEQ ID NO: 32411 - DNA, 203 bp, Artificial sequence; identical to SEQ ID NO: 12348
  synthetic

SEQ ID NO: 32412 - DNA, 203 bp, Artificial sequence; identical to SEQ ID NO: 12349
  synthetic

SEQ ID NO: 32413 - DNA, 203 bp, Artificial sequence; identical to SEQ ID NO: 12350
  synthetic

SEQ ID NO: 32414 - DNA, 203 bp, Artificial sequence; identical to SEQ ID NO: 12352
  synthetic

SEQ ID NO: 32415 - DNA, 203 bp, Artificial sequence; identical to SEQ ID NO: 12354
  synthetic

SEQ ID NO: 32416 - DNA, 203 bp, Artificial sequence; identical to SEQ ID NO: 12357
  synthetic

SEQ ID NO: 32417 - DNA, 203 bp, Artificial sequence; identical to SEQ ID NO: 12358
  synthetic

SEQ ID NO: 32418 - DNA, 203 bp, Artificial sequence; identical to SEQ ID NO: 12359
  synthetic

SEQ ID NO: 32419 - DNA, 203 bp, Artificial sequence; identical to SEQ ID NO: 12361
  synthetic

SEQ ID NO: 32420 - DNA, 203 bp, Artificial sequence; identical to SEQ ID NO: 12362
  synthetic

SEQ ID NO: 32421 - DNA, 203 bp, Artificial sequence; identical to SEQ ID NO: 12363
  synthetic

SEQ ID NO: 32422 - DNA, 203 bp, Artificial sequence; identical to SEQ ID NO: 12364
  synthetic

SEQ ID NO: 32423 - DNA, 203 bp, Artificial sequence; identical to SEQ ID NO: 12369
  synthetic

SEQ ID NO: 32424 - DNA, 203 bp, Artificial sequence; identical to SEQ ID NO: 12370
  synthetic

SEQ ID NO: 32425 - DNA, 203 bp, Artificial sequence; identical to SEQ ID NO: 12372
  synthetic

SEQ ID NO: 32426 - DNA, 203 bp, Artificial sequence; identical to SEQ ID NO: 12373
  synthetic

SEQ ID NO: 32427 - DNA, 203 bp, Artificial sequence; identical to SEQ ID NO: 12410
  synthetic

SEQ ID NO: 32428 - DNA, 203 bp, Artificial sequence; identical to SEQ ID NO: 12417
  synthetic

SEQ ID NO: 32429 - DNA, 203 bp, Artificial sequence; identical to SEQ ID NO: 12418
  synthetic

SEQ ID NO: 32430 - DNA, 203 bp, Artificial sequence; identical to SEQ ID NO: 12419
  synthetic

SEQ ID NO: 32431 - DNA, 203 bp, Artificial sequence; identical to SEQ ID NO: 12420
  synthetic

SEQ ID NO: 32432 - DNA, 203 bp, Artificial sequence; identical to SEQ ID NO: 12431
  synthetic

SEQ ID NO: 32433 - DNA, 203 bp, Artificial sequence; identical to SEQ ID NO: 12432
  synthetic

SEQ ID NO: 32434 - DNA, 203 bp, Artificial sequence; identical to SEQ ID NO: 12443
  synthetic

SEQ ID NO: 32435 - DNA, 203 bp, Artificial sequence; identical to SEQ ID NO: 12444
  synthetic

SEQ ID NO: 32436 - DNA, 203 bp, Artificial sequence; identical to SEQ ID NO: 12446
  synthetic

SEQ ID NO: 32437 - DNA, 203 bp, Artificial sequence; identical to SEQ ID NO: 12447
  synthetic

SEQ ID NO: 32438 - DNA, 203 bp, Artificial sequence; identical to SEQ ID NO: 12449
  synthetic

SEQ ID NO: 32439 - DNA, 203 bp, Artificial sequence; identical to SEQ ID NO: 12468
  synthetic

SEQ ID NO: 32440 - DNA, 203 bp, Artificial sequence; identical to SEQ ID NO: 12470
  synthetic

SEQ ID NO: 32441 - DNA, 203 bp, Artificial sequence; identical to SEQ ID NO: 12482
  synthetic

SEQ ID NO: 32442 - DNA, 203 bp, Artificial sequence; identical to SEQ ID NO: 12483
  synthetic

SEQ ID NO: 32443 - DNA, 203 bp, Artificial sequence; identical to SEQ ID NO: 12490
  synthetic

SEQ ID NO: 32444 - DNA, 203 bp, Artificial sequence; identical to SEQ ID NO: 12491
  synthetic

SEQ ID NO: 32445 - DNA, 203 bp, Artificial sequence; identical to SEQ ID NO: 12503
  synthetic

SEQ ID NO: 32446 - DNA, 203 bp, Artificial sequence; identical to SEQ ID NO: 12508
  synthetic

SEQ ID NO: 32447 - DNA, 203 bp, Artificial sequence; identical to SEQ ID NO: 12519
  synthetic

SEQ ID NO: 32448 - DNA, 203 bp, Artificial sequence; identical to SEQ ID NO: 12527
  synthetic

SEQ ID NO: 32449 - DNA, 203 bp, Artificial sequence; identical to SEQ ID NO: 12532
  synthetic

SEQ ID NO: 32450 - DNA, 203 bp, Artificial sequence; identical to SEQ ID NO: 12535
  synthetic

SEQ ID NO: 32451 - DNA, 203 bp, Artificial sequence; identical to SEQ ID NO: 12541
  synthetic

SEQ ID NO: 32452 - DNA, 203 bp, Artificial sequence; identical to SEQ ID NO: 12543
  synthetic

SEQ ID NO: 32453 - DNA, 203 bp, Artificial sequence; identical to SEQ ID NO: 12546
  synthetic

SEQ ID NO: 32454 - DNA, 203 bp, Artificial sequence; identical to SEQ ID NO: 12547
  synthetic

SEQ ID NO: 32455 - DNA, 203 bp, Artificial sequence; identical to SEQ ID NO: 12548
  synthetic

SEQ ID NO: 32456 - DNA, 203 bp, Artificial sequence; identical to SEQ ID NO: 12558
  synthetic

SEQ ID NO: 32457 - DNA, 203 bp, Artificial sequence; identical to SEQ ID NO: 12559
  synthetic

SEQ ID NO: 32458 - DNA, 203 bp, Artificial sequence; identical to SEQ ID NO: 12560
  synthetic

SEQ ID NO: 32459 - DNA, 203 bp, Artificial sequence; identical to SEQ ID NO: 12562
  synthetic

SEQ ID NO: 32460 - DNA, 203 bp, Artificial sequence; identical to SEQ ID NO: 12563
  synthetic

SEQ ID NO: 32461 - DNA, 203 bp, Artificial sequence; identical to SEQ ID NO: 12564
  synthetic

SEQ ID NO: 32462 - DNA, 203 bp, Artificial sequence; identical to SEQ ID NO: 12565
  synthetic

SEQ ID NO: 32463 - DNA, 203 bp, Artificial sequence; identical to SEQ ID NO: 12590
  synthetic

SEQ ID NO: 32464 - DNA, 203 bp, Artificial sequence; identical to SEQ ID NO: 12591
  synthetic

SEQ ID NO: 32465 - DNA, 203 bp, Artificial sequence; identical to SEQ ID NO: 12603
  synthetic

SEQ ID NO: 32466 - DNA, 203 bp, Artificial sequence; identical to SEQ ID NO: 12604
  synthetic

SEQ ID NO: 32467 - DNA, 203 bp, Artificial sequence; identical to SEQ ID NO: 12605
  synthetic

SEQ ID NO: 32468 - DNA, 203 bp, Artificial sequence; identical to SEQ ID NO: 12606
  synthetic

SEQ ID NO: 32469 - DNA, 203 bp, Artificial sequence; identical to SEQ ID NO: 12607
  synthetic

SEQ ID NO: 32470 - DNA, 203 bp, Artificial sequence; identical to SEQ ID NO: 12610
  synthetic

SEQ ID NO: 32471 - DNA, 203 bp, Artificial sequence; identical to SEQ ID NO: 12611
  synthetic

SEQ ID NO: 32472 - DNA, 203 bp, Artificial sequence; identical to SEQ ID NO: 12623
  synthetic

SEQ ID NO: 32473 - DNA, 203 bp, Artificial sequence; identical to SEQ ID NO: 12633
  synthetic

SEQ ID NO: 32474 - DNA, 203 bp, Artificial sequence; identical to SEQ ID NO: 12634
  synthetic

SEQ ID NO: 32475 - DNA, 203 bp, Artificial sequence; identical to SEQ ID NO: 12636
  synthetic

SEQ ID NO: 32476 - DNA, 203 bp, Artificial sequence; identical to SEQ ID NO: 12637
  synthetic

SEQ ID NO: 32477 - DNA, 203 bp, Artificial sequence; identical to SEQ ID NO: 12655
  synthetic

SEQ ID NO: 32478 - DNA, 203 bp, Artificial sequence; identical to SEQ ID NO: 12656
  synthetic

SEQ ID NO: 32479 - DNA, 203 bp, Artificial sequence; identical to SEQ ID NO: 12657
  synthetic

SEQ ID NO: 32480 - DNA, 203 bp, Artificial sequence; identical to SEQ ID NO: 12658
  synthetic

SEQ ID NO: 32481 - DNA, 203 bp, Artificial sequence; identical to SEQ ID NO: 12660
  synthetic

SEQ ID NO: 32482 - DNA, 203 bp, Artificial sequence; identical to SEQ ID NO: 12661
  synthetic

SEQ ID NO: 32483 - DNA, 203 bp, Artificial sequence; identical to SEQ ID NO: 12662
  synthetic

SEQ ID NO: 32484 - DNA, 203 bp, Artificial sequence; identical to SEQ ID NO: 12683
  synthetic

SEQ ID NO: 32485 - DNA, 203 bp, Artificial sequence; identical to SEQ ID NO: 12685
  synthetic

SEQ ID NO: 32486 - DNA, 203 bp, Artificial sequence; identical to SEQ ID NO: 12686
  synthetic

SEQ ID NO: 32487 - DNA, 203 bp, Artificial sequence; identical to SEQ ID NO: 12687
  synthetic

SEQ ID NO: 32488 - DNA, 203 bp, Artificial sequence; identical to SEQ ID NO: 12688
  synthetic

SEQ ID NO: 32489 - DNA, 203 bp, Artificial sequence; identical to SEQ ID NO: 12730
  synthetic

SEQ ID NO: 32490 - DNA, 203 bp, Artificial sequence; identical to SEQ ID NO: 12731
  synthetic

SEQ ID NO: 32491 - DNA, 203 bp, Artificial sequence; identical to SEQ ID NO: 12738
  synthetic

SEQ ID NO: 32492 - DNA, 203 bp, Artificial sequence; identical to SEQ ID NO: 12761
  synthetic

SEQ ID NO: 32493 - DNA, 203 bp, Artificial sequence; identical to SEQ ID NO: 12763
  synthetic

SEQ ID NO: 32494 - DNA, 203 bp, Artificial sequence; identical to SEQ ID NO: 12764
  synthetic

SEQ ID NO: 32495 - DNA, 203 bp, Artificial sequence; identical to SEQ ID NO: 12765
  synthetic

SEQ ID NO: 32496 - DNA, 203 bp, Artificial sequence; identical to SEQ ID NO: 12767
  synthetic

SEQ ID NO: 32497 - DNA, 203 bp, Artificial sequence; identical to SEQ ID NO: 12768
  synthetic

SEQ ID NO: 32498 - DNA, 203 bp, Artificial sequence; identical to SEQ ID NO: 12769
  synthetic

SEQ ID NO: 32499 - DNA, 203 bp, Artificial sequence; identical to SEQ ID NO: 12771
  synthetic

SEQ ID NO: 32500 - DNA, 203 bp, Artificial sequence; identical to SEQ ID NO: 12772
  synthetic

SEQ ID NO: 32501 - DNA, 203 bp, Artificial sequence; identical to SEQ ID NO: 12774
  synthetic

SEQ ID NO: 32502 - DNA, 203 bp, Artificial sequence; identical to SEQ ID NO: 12775
  synthetic

SEQ ID NO: 32503 - DNA, 203 bp, Artificial sequence; identical to SEQ ID NO: 12777
  synthetic

SEQ ID NO: 32504 - DNA, 203 bp, Artificial sequence; identical to SEQ ID NO: 12778
  synthetic

SEQ ID NO: 32505 - DNA, 203 bp, Artificial sequence; identical to SEQ ID NO: 12780
  synthetic

SEQ ID NO: 32506 - DNA, 203 bp, Artificial sequence; identical to SEQ ID NO: 12781
  synthetic

SEQ ID NO: 32507 - DNA, 203 bp, Artificial sequence; identical to SEQ ID NO: 12782
  synthetic

SEQ ID NO: 32508 - DNA, 203 bp, Artificial sequence; identical to SEQ ID NO: 12783
  synthetic

SEQ ID NO: 32509 - DNA, 203 bp, Artificial sequence; identical to SEQ ID NO: 12812
  synthetic

SEQ ID NO: 32510 - DNA, 203 bp, Artificial sequence; identical to SEQ ID NO: 12814
  synthetic

SEQ ID NO: 32511 - DNA, 203 bp, Artificial sequence; identical to SEQ ID NO: 12815
  synthetic

SEQ ID NO: 32512 - DNA, 203 bp, Artificial sequence; identical to SEQ ID NO: 12816
  synthetic

SEQ ID NO: 32513 - DNA, 203 bp, Artificial sequence; identical to SEQ ID NO: 12826
  synthetic

SEQ ID NO: 32514 - DNA, 203 bp, Artificial sequence; identical to SEQ ID NO: 12827
  synthetic

SEQ ID NO: 32515 - DNA, 203 bp, Artificial sequence; identical to SEQ ID NO: 12828
  synthetic

SEQ ID NO: 32516 - DNA, 203 bp, Artificial sequence; identical to SEQ ID NO: 12839
  synthetic

SEQ ID NO: 32517 - DNA, 203 bp, Artificial sequence; identical to SEQ ID NO: 12840
  synthetic

SEQ ID NO: 32518 - DNA, 203 bp, Artificial sequence; identical to SEQ ID NO: 12842
  synthetic

SEQ ID NO: 32519 - DNA, 203 bp, Artificial sequence; identical to SEQ ID NO: 12844
  synthetic

SEQ ID NO: 32520 - DNA, 203 bp, Artificial sequence; identical to SEQ ID NO: 12845
  synthetic

SEQ ID NO: 32521 - DNA, 203 bp, Artificial sequence; identical to SEQ ID NO: 12846
  synthetic

SEQ ID NO: 32522 - DNA, 203 bp, Artificial sequence; identical to SEQ ID NO: 12862
  synthetic

SEQ ID NO: 32523 - DNA, 203 bp, Artificial sequence; identical to SEQ ID NO: 12863
  synthetic

SEQ ID NO: 32524 - DNA, 203 bp, Artificial sequence; identical to SEQ ID NO: 12864
  synthetic

SEQ ID NO: 32525 - DNA, 203 bp, Artificial sequence; identical to SEQ ID NO: 12874
  synthetic

SEQ ID NO: 32526 - DNA, 203 bp, Artificial sequence; identical to SEQ ID NO: 12876
  synthetic

SEQ ID NO: 32527 - DNA, 203 bp, Artificial sequence; identical to SEQ ID NO: 12877
  synthetic

SEQ ID NO: 32528 - DNA, 203 bp, Artificial sequence; identical to SEQ ID NO: 12878
  synthetic

SEQ ID NO: 32529 - DNA, 203 bp, Artificial sequence; identical to SEQ ID NO: 12881
  synthetic

SEQ ID NO: 32530 - DNA, 203 bp, Artificial sequence; identical to SEQ ID NO: 12895
  synthetic

SEQ ID NO: 32531 - DNA, 203 bp, Artificial sequence; identical to SEQ ID NO: 12896
  synthetic

SEQ ID NO: 32532 - DNA, 203 bp, Artificial sequence; identical to SEQ ID NO: 12899
  synthetic

SEQ ID NO: 32533 - DNA, 203 bp, Artificial sequence; identical to SEQ ID NO: 12918
  synthetic

SEQ ID NO: 32534 - DNA, 203 bp, Artificial sequence; identical to SEQ ID NO: 12919
  synthetic

SEQ ID NO: 32535 - DNA, 203 bp, Artificial sequence; identical to SEQ ID NO: 12920
  synthetic

SEQ ID NO: 32536 - DNA, 203 bp, Artificial sequence; identical to SEQ ID NO: 12922
  synthetic

SEQ ID NO: 32537 - DNA, 203 bp, Artificial sequence; identical to SEQ ID NO: 12939
  synthetic

SEQ ID NO: 32538 - DNA, 203 bp, Artificial sequence; identical to SEQ ID NO: 12940
  synthetic

SEQ ID NO: 32539 - DNA, 203 bp, Artificial sequence; identical to SEQ ID NO: 12941
  synthetic

SEQ ID NO: 32540 - DNA, 203 bp, Artificial sequence; identical to SEQ ID NO: 12943
  synthetic

SEQ ID NO: 32541 - DNA, 203 bp, Artificial sequence; identical to SEQ ID NO: 12954
  synthetic

SEQ ID NO: 32542 - DNA, 203 bp, Artificial sequence; identical to SEQ ID NO: 12955
  synthetic

SEQ ID NO: 32543 - DNA, 203 bp, Artificial sequence; identical to SEQ ID NO: 12962
  synthetic

SEQ ID NO: 32544 - DNA, 203 bp, Artificial sequence; identical to SEQ ID NO: 12984
  synthetic

SEQ ID NO: 32545 - DNA, 203 bp, Artificial sequence; identical to SEQ ID NO: 12987
  synthetic

SEQ ID NO: 32546 - DNA, 203 bp, Artificial sequence; identical to SEQ ID NO: 12988
  synthetic

SEQ ID NO: 32547 - DNA, 203 bp, Artificial sequence; identical to SEQ ID NO: 12994
  synthetic

SEQ ID NO: 32548 - DNA, 203 bp, Artificial sequence; identical to SEQ ID NO: 12995
  synthetic

SEQ ID NO: 32549 - DNA, 203 bp, Artificial sequence; identical to SEQ ID NO: 12996
  synthetic

SEQ ID NO: 32550 - DNA, 203 bp, Artificial sequence; identical to SEQ ID NO: 12997
  synthetic

SEQ ID NO: 32551 - DNA, 203 bp, Artificial sequence; identical to SEQ ID NO: 12999
  synthetic

SEQ ID NO: 32552 - DNA, 203 bp, Artificial sequence; identical to SEQ ID NO: 13000
  synthetic

SEQ ID NO: 32553 - DNA, 203 bp, Artificial sequence; identical to SEQ ID NO: 13001
  synthetic

SEQ ID NO: 32554 - DNA, 203 bp, Artificial sequence; identical to SEQ ID NO: 13009
  synthetic

SEQ ID NO: 32555 - DNA, 203 bp, Artificial sequence; identical to SEQ ID NO: 13024
  synthetic

SEQ ID NO: 32556 - DNA, 203 bp, Artificial sequence; identical to SEQ ID NO: 13031
  synthetic

SEQ ID NO: 32557 - DNA, 203 bp, Artificial sequence; identical to SEQ ID NO: 13038
  synthetic

SEQ ID NO: 32558 - DNA, 203 bp, Artificial sequence; identical to SEQ ID NO: 13043
  synthetic

SEQ ID NO: 32559 - DNA, 203 bp, Artificial sequence; identical to SEQ ID NO: 13056
  synthetic

SEQ ID NO: 32560 - DNA, 203 bp, Artificial sequence; identical to SEQ ID NO: 13077
  synthetic

SEQ ID NO: 32561 - DNA, 203 bp, Artificial sequence; identical to SEQ ID NO: 13078
  synthetic

SEQ ID NO: 32562 - DNA, 203 bp, Artificial sequence; identical to SEQ ID NO: 13085
  synthetic

SEQ ID NO: 32563 - DNA, 203 bp, Artificial sequence; identical to SEQ ID NO: 13087
  synthetic

SEQ ID NO: 32564 - DNA, 203 bp, Artificial sequence; identical to SEQ ID NO: 13088
  synthetic

SEQ ID NO: 32565 - DNA, 203 bp, Artificial sequence; identical to SEQ ID NO: 13089
  synthetic

SEQ ID NO: 32566 - DNA, 203 bp, Artificial sequence; identical to SEQ ID NO: 13090
  synthetic

SEQ ID NO: 32567 - DNA, 203 bp, Artificial sequence; identical to SEQ ID NO: 13091
  synthetic

SEQ ID NO: 32568 - DNA, 203 bp, Artificial sequence; identical to SEQ ID NO: 13092
  synthetic

SEQ ID NO: 32569 - DNA, 203 bp, Artificial sequence; identical to SEQ ID NO: 13093
  synthetic

SEQ ID NO: 32570 - DNA, 203 bp, Artificial sequence; identical to SEQ ID NO: 13094
  synthetic

SEQ ID NO: 32571 - DNA, 203 bp, Artificial sequence; identical to SEQ ID NO: 13095
  synthetic

SEQ ID NO: 32572 - DNA, 203 bp, Artificial sequence; identical to SEQ ID NO: 13096
  synthetic

SEQ ID NO: 32573 - DNA, 203 bp, Artificial sequence; identical to SEQ ID NO: 13098
  synthetic

SEQ ID NO: 32574 - DNA, 203 bp, Artificial sequence; identical to SEQ ID NO: 13101
  synthetic

SEQ ID NO: 32575 - DNA, 203 bp, Artificial sequence; identical to SEQ ID NO: 13102
  synthetic

SEQ ID NO: 32576 - DNA, 203 bp, Artificial sequence; identical to SEQ ID NO: 13105
  synthetic

SEQ ID NO: 32577 - DNA, 203 bp, Artificial sequence; identical to SEQ ID NO: 13109
  synthetic

SEQ ID NO: 32578 - DNA, 203 bp, Artificial sequence; identical to SEQ ID NO: 13130
  synthetic

SEQ ID NO: 32579 - DNA, 203 bp, Artificial sequence; identical to SEQ ID NO: 13132
  synthetic

SEQ ID NO: 32580 - DNA, 203 bp, Artificial sequence; identical to SEQ ID NO: 13133
  synthetic

SEQ ID NO: 32581 - DNA, 203 bp, Artificial sequence; identical to SEQ ID NO: 13134
  synthetic

SEQ ID NO: 32582 - DNA, 203 bp, Artificial sequence; identical to SEQ ID NO: 13142
  synthetic

SEQ ID NO: 32583 - DNA, 203 bp, Artificial sequence; identical to SEQ ID NO: 13146
  synthetic

SEQ ID NO: 32584 - DNA, 203 bp, Artificial sequence; identical to SEQ ID NO: 13147
  synthetic

SEQ ID NO: 32585 - DNA, 203 bp, Artificial sequence; identical to SEQ ID NO: 13148
  synthetic

SEQ ID NO: 32586 - DNA, 203 bp, Artificial sequence; identical to SEQ ID NO: 13162
  synthetic

SEQ ID NO: 32587 - DNA, 203 bp, Artificial sequence; identical to SEQ ID NO: 13165
  synthetic

SEQ ID NO: 32588 - DNA, 203 bp, Artificial sequence; identical to SEQ ID NO: 13166
  synthetic

SEQ ID NO: 32589 - DNA, 203 bp, Artificial sequence; identical to SEQ ID NO: 13170
  synthetic

SEQ ID NO: 32590 - DNA, 203 bp, Artificial sequence; identical to SEQ ID NO: 13171
  synthetic

SEQ ID NO: 32591 - DNA, 203 bp, Artificial sequence; identical to SEQ ID NO: 13172
  synthetic

SEQ ID NO: 32592 - DNA, 203 bp, Artificial sequence; identical to SEQ ID NO: 13173
  synthetic

SEQ ID NO: 32593 - DNA, 203 bp, Artificial sequence; identical to SEQ ID NO: 13193
  synthetic

SEQ ID NO: 32594 - DNA, 203 bp, Artificial sequence; identical to SEQ ID NO: 13214
  synthetic

SEQ ID NO: 32595 - DNA, 203 bp, Artificial sequence; identical to SEQ ID NO: 13215
  synthetic

SEQ ID NO: 32596 - DNA, 203 bp, Artificial sequence; identical to SEQ ID NO: 13220
  synthetic

SEQ ID NO: 32597 - DNA, 203 bp, Artificial sequence; identical to SEQ ID NO: 13227
  synthetic

SEQ ID NO: 32598 - DNA, 203 bp, Artificial sequence; identical to SEQ ID NO: 13289
  synthetic

SEQ ID NO: 32599 - DNA, 203 bp, Artificial sequence; identical to SEQ ID NO: 13297
  synthetic

SEQ ID NO: 32600 - DNA, 203 bp, Artificial sequence; identical to SEQ ID NO: 13310
  synthetic

SEQ ID NO: 32601 - DNA, 203 bp, Artificial sequence; identical to SEQ ID NO: 13312
  synthetic

SEQ ID NO: 32602 - DNA, 203 bp, Artificial sequence; identical to SEQ ID NO: 13313
  synthetic

SEQ ID NO: 32603 - DNA, 203 bp, Artificial sequence; identical to SEQ ID NO: 13314
  synthetic

SEQ ID NO: 32604 - DNA, 203 bp, Artificial sequence; identical to SEQ ID NO: 13315
  synthetic

SEQ ID NO: 32605 - DNA, 203 bp, Artificial sequence; identical to SEQ ID NO: 13316
  synthetic

SEQ ID NO: 32606 - DNA, 203 bp, Artificial sequence; identical to SEQ ID NO: 13317
  synthetic

SEQ ID NO: 32607 - DNA, 203 bp, Artificial sequence; identical to SEQ ID NO: 13319
  synthetic

SEQ ID NO: 32608 - DNA, 203 bp, Artificial sequence; identical to SEQ ID NO: 13320
  synthetic

SEQ ID NO: 32609 - DNA, 203 bp, Artificial sequence; identical to SEQ ID NO: 13321
  synthetic

SEQ ID NO: 32610 - DNA, 203 bp, Artificial sequence; identical to SEQ ID NO: 13323
  synthetic

SEQ ID NO: 32611 - DNA, 203 bp, Artificial sequence; identical to SEQ ID NO: 13324
  synthetic

SEQ ID NO: 32612 - DNA, 203 bp, Artificial sequence; identical to SEQ ID NO: 13325
  synthetic

SEQ ID NO: 32613 - DNA, 203 bp, Artificial sequence; identical to SEQ ID NO: 13326
  synthetic

SEQ ID NO: 32614 - DNA, 203 bp, Artificial sequence; identical to SEQ ID NO: 13327
  synthetic

SEQ ID NO: 32615 - DNA, 203 bp, Artificial sequence; identical to SEQ ID NO: 13329
  synthetic

SEQ ID NO: 32616 - DNA, 203 bp, Artificial sequence; identical to SEQ ID NO: 13344
  synthetic

SEQ ID NO: 32617 - DNA, 203 bp, Artificial sequence; identical to SEQ ID NO: 13345
  synthetic

SEQ ID NO: 32618 - DNA, 203 bp, Artificial sequence; identical to SEQ ID NO: 13346
  synthetic

SEQ ID NO: 32619 - DNA, 203 bp, Artificial sequence; identical to SEQ ID NO: 13357
  synthetic

SEQ ID NO: 32620 - DNA, 203 bp, Artificial sequence; identical to SEQ ID NO: 13359
  synthetic

SEQ ID NO: 32621 - DNA, 203 bp, Artificial sequence; identical to SEQ ID NO: 13360
  synthetic

SEQ ID NO: 32622 - DNA, 203 bp, Artificial sequence; identical to SEQ ID NO: 13370
  synthetic

SEQ ID NO: 32623 - DNA, 203 bp, Artificial sequence; identical to SEQ ID NO: 13376
  synthetic

SEQ ID NO: 32624 - DNA, 203 bp, Artificial sequence; identical to SEQ ID NO: 13378
  synthetic

SEQ ID NO: 32625 - DNA, 203 bp, Artificial sequence; identical to SEQ ID NO: 13379
  synthetic

SEQ ID NO: 32626 - DNA, 203 bp, Artificial sequence; identical to SEQ ID NO: 13380
  synthetic

SEQ ID NO: 32627 - DNA, 203 bp, Artificial sequence; identical to SEQ ID NO: 13381
  synthetic

SEQ ID NO: 32628 - DNA, 203 bp, Artificial sequence; identical to SEQ ID NO: 13383
  synthetic

SEQ ID NO: 32629 - DNA, 203 bp, Artificial sequence; identical to SEQ ID NO: 13384
  synthetic

SEQ ID NO: 32630 - DNA, 203 bp, Artificial sequence; identical to SEQ ID NO: 13385
  synthetic

SEQ ID NO: 32631 - DNA, 203 bp, Artificial sequence; identical to SEQ ID NO: 13387
  synthetic

SEQ ID NO: 32632 - DNA, 203 bp, Artificial sequence; identical to SEQ ID NO: 13389
  synthetic

SEQ ID NO: 32633 - DNA, 203 bp, Artificial sequence; identical to SEQ ID NO: 13391
  synthetic

SEQ ID NO: 32634 - DNA, 203 bp, Artificial sequence; identical to SEQ ID NO: 13393
  synthetic

SEQ ID NO: 32635 - DNA, 203 bp, Artificial sequence; identical to SEQ ID NO: 13394
  synthetic

SEQ ID NO: 32636 - DNA, 203 bp, Artificial sequence; identical to SEQ ID NO: 13398
  synthetic

SEQ ID NO: 32637 - DNA, 203 bp, Artificial sequence; identical to SEQ ID NO: 13399
  synthetic

SEQ ID NO: 32638 - DNA, 203 bp, Artificial sequence; identical to SEQ ID NO: 13400
  synthetic

SEQ ID NO: 32639 - DNA, 203 bp, Artificial sequence; identical to SEQ ID NO: 13402
  synthetic

SEQ ID NO: 32640 - DNA, 203 bp, Artificial sequence; identical to SEQ ID NO: 13406
  synthetic

SEQ ID NO: 32641 - DNA, 203 bp, Artificial sequence; identical to SEQ ID NO: 13407
  synthetic

SEQ ID NO: 32642 - DNA, 203 bp, Artificial sequence; identical to SEQ ID NO: 13408
  synthetic

SEQ ID NO: 32643 - DNA, 203 bp, Artificial sequence; identical to SEQ ID NO: 13451
  synthetic

SEQ ID NO: 32644 - DNA, 203 bp, Artificial sequence; identical to SEQ ID NO: 13460
  synthetic

SEQ ID NO: 32645 - DNA, 203 bp, Artificial sequence; identical to SEQ ID NO: 13461
  synthetic

SEQ ID NO: 32646 - DNA, 203 bp, Artificial sequence; identical to SEQ ID NO: 13539
  synthetic

SEQ ID NO: 32647 - DNA, 203 bp, Artificial sequence; identical to SEQ ID NO: 13540
  synthetic

SEQ ID NO: 32648 - DNA, 203 bp, Artificial sequence; identical to SEQ ID NO: 13541
  synthetic

SEQ ID NO: 32649 - DNA, 203 bp, Artificial sequence; identical to SEQ ID NO: 13552
  synthetic

SEQ ID NO: 32650 - DNA, 203 bp, Artificial sequence; identical to SEQ ID NO: 13557
  synthetic

SEQ ID NO: 32651 - DNA, 203 bp, Artificial sequence; identical to SEQ ID NO: 13559
  synthetic

SEQ ID NO: 32652 - DNA, 203 bp, Artificial sequence; identical to SEQ ID NO: 13566
  synthetic

SEQ ID NO: 32653 - DNA, 203 bp, Artificial sequence; identical to SEQ ID NO: 13567
  synthetic

SEQ ID NO: 32654 - DNA, 203 bp, Artificial sequence; identical to SEQ ID NO: 13571
  synthetic

SEQ ID NO: 32655 - DNA, 203 bp, Artificial sequence; identical to SEQ ID NO: 13572
  synthetic

SEQ ID NO: 32656 - DNA, 203 bp, Artificial sequence; identical to SEQ ID NO: 13587
  synthetic

SEQ ID NO: 32657 - DNA, 203 bp, Artificial sequence; identical to SEQ ID NO: 13600
  synthetic

SEQ ID NO: 32658 - DNA, 203 bp, Artificial sequence; identical to SEQ ID NO: 13601
  synthetic

SEQ ID NO: 32659 - DNA, 203 bp, Artificial sequence; identical to SEQ ID NO: 13602
  synthetic

SEQ ID NO: 32660 - DNA, 203 bp, Artificial sequence; identical to SEQ ID NO: 13607
  synthetic

SEQ ID NO: 32661 - DNA, 203 bp, Artificial sequence; identical to SEQ ID NO: 13609
  synthetic

SEQ ID NO: 32662 - DNA, 203 bp, Artificial sequence; identical to SEQ ID NO: 13610
  synthetic

SEQ ID NO: 32663 - DNA, 203 bp, Artificial sequence; identical to SEQ ID NO: 13619
  synthetic

SEQ ID NO: 32664 - DNA, 203 bp, Artificial sequence; identical to SEQ ID NO: 13620
  synthetic

SEQ ID NO: 32665 - DNA, 203 bp, Artificial sequence; identical to SEQ ID NO: 13621
  synthetic

SEQ ID NO: 32666 - DNA, 203 bp, Artificial sequence; identical to SEQ ID NO: 13622
  synthetic

SEQ ID NO: 32667 - DNA, 203 bp, Artificial sequence; identical to SEQ ID NO: 13623
  synthetic

SEQ ID NO: 32668 - DNA, 203 bp, Artificial sequence; identical to SEQ ID NO: 13624
  synthetic

SEQ ID NO: 32669 - DNA, 203 bp, Artificial sequence; identical to SEQ ID NO: 13625
  synthetic

SEQ ID NO: 32670 - DNA, 203 bp, Artificial sequence; identical to SEQ ID NO: 13627
  synthetic

SEQ ID NO: 32671 - DNA, 203 bp, Artificial sequence; identical to SEQ ID NO: 13628
  synthetic

SEQ ID NO: 32672 - DNA, 203 bp, Artificial sequence; identical to SEQ ID NO: 13631
  synthetic

SEQ ID NO: 32673 - DNA, 203 bp, Artificial sequence; identical to SEQ ID NO: 13633
  synthetic

SEQ ID NO: 32674 - DNA, 203 bp, Artificial sequence; identical to SEQ ID NO: 13644
  synthetic

SEQ ID NO: 32675 - DNA, 203 bp, Artificial sequence; identical to SEQ ID NO: 13645
  synthetic

SEQ ID NO: 32676 - DNA, 203 bp, Artificial sequence; identical to SEQ ID NO: 13656
  synthetic

SEQ ID NO: 32677 - DNA, 203 bp, Artificial sequence; identical to SEQ ID NO: 13657
  synthetic

SEQ ID NO: 32678 - DNA, 203 bp, Artificial sequence; identical to SEQ ID NO: 13658
  synthetic

SEQ ID NO: 32679 - DNA, 203 bp, Artificial sequence; identical to SEQ ID NO: 13668
  synthetic

SEQ ID NO: 32680 - DNA, 203 bp, Artificial sequence; identical to SEQ ID NO: 13669
  synthetic

SEQ ID NO: 32681 - DNA, 203 bp, Artificial sequence; identical to SEQ ID NO: 13670
  synthetic

SEQ ID NO: 32682 - DNA, 203 bp, Artificial sequence; identical to SEQ ID NO: 13685
  synthetic

SEQ ID NO: 32683 - DNA, 203 bp, Artificial sequence; identical to SEQ ID NO: 13720
  synthetic

SEQ ID NO: 32684 - DNA, 203 bp, Artificial sequence; identical to SEQ ID NO: 13737
  synthetic

SEQ ID NO: 32685 - DNA, 203 bp, Artificial sequence; identical to SEQ ID NO: 13759
  synthetic

SEQ ID NO: 32686 - DNA, 203 bp, Artificial sequence; identical to SEQ ID NO: 13761
  synthetic

SEQ ID NO: 32687 - DNA, 203 bp, Artificial sequence; identical to SEQ ID NO: 13763
  synthetic

SEQ ID NO: 32688 - DNA, 203 bp, Artificial sequence; identical to SEQ ID NO: 13764
  synthetic

SEQ ID NO: 32689 - DNA, 203 bp, Artificial sequence; identical to SEQ ID NO: 13765
  synthetic

SEQ ID NO: 32690 - DNA, 203 bp, Artificial sequence; identical to SEQ ID NO: 13767
  synthetic

SEQ ID NO: 32691 - DNA, 203 bp, Artificial sequence; identical to SEQ ID NO: 13768
  synthetic

SEQ ID NO: 32692 - DNA, 203 bp, Artificial sequence; identical to SEQ ID NO: 13786
  synthetic

SEQ ID NO: 32693 - DNA, 203 bp, Artificial sequence; identical to SEQ ID NO: 13790
  synthetic

SEQ ID NO: 32694 - DNA, 203 bp, Artificial sequence; identical to SEQ ID NO: 13791
  synthetic

SEQ ID NO: 32695 - DNA, 203 bp, Artificial sequence; identical to SEQ ID NO: 13805
  synthetic

SEQ ID NO: 32696 - DNA, 203 bp, Artificial sequence; identical to SEQ ID NO: 13809
  synthetic

SEQ ID NO: 32697 - DNA, 203 bp, Artificial sequence; identical to SEQ ID NO: 13810
  synthetic

SEQ ID NO: 32698 - DNA, 203 bp, Artificial sequence; identical to SEQ ID NO: 13811
  synthetic

SEQ ID NO: 32699 - DNA, 203 bp, Artificial sequence; identical to SEQ ID NO: 13814
  synthetic

SEQ ID NO: 32700 - DNA, 203 bp, Artificial sequence; identical to SEQ ID NO: 13815
  synthetic

SEQ ID NO: 32701 - DNA, 203 bp, Artificial sequence; identical to SEQ ID NO: 13816
  synthetic

SEQ ID NO: 32702 - DNA, 203 bp, Artificial sequence; identical to SEQ ID NO: 13823
  synthetic

SEQ ID NO: 32703 - DNA, 203 bp, Artificial sequence; identical to SEQ ID NO: 13824
  synthetic

SEQ ID NO: 32704 - DNA, 203 bp, Artificial sequence; identical to SEQ ID NO: 13826
  synthetic

SEQ ID NO: 32705 - DNA, 203 bp, Artificial sequence; identical to SEQ ID NO: 13827
  synthetic

SEQ ID NO: 32706 - DNA, 203 bp, Artificial sequence; identical to SEQ ID NO: 13829
  synthetic

SEQ ID NO: 32707 - DNA, 203 bp, Artificial sequence; identical to SEQ ID NO: 13837
  synthetic

SEQ ID NO: 32708 - DNA, 203 bp, Artificial sequence; identical to SEQ ID NO: 13843
  synthetic

SEQ ID NO: 32709 - DNA, 203 bp, Artificial sequence; identical to SEQ ID NO: 13846
  synthetic

SEQ ID NO: 32710 - DNA, 203 bp, Artificial sequence; identical to SEQ ID NO: 13852
  synthetic

SEQ ID NO: 32711 - DNA, 203 bp, Artificial sequence; identical to SEQ ID NO: 13853
  synthetic

SEQ ID NO: 32712 - DNA, 203 bp, Artificial sequence; identical to SEQ ID NO: 13854
  synthetic

SEQ ID NO: 32713 - DNA, 203 bp, Artificial sequence; identical to SEQ ID NO: 13855
  synthetic

SEQ ID NO: 32714 - DNA, 203 bp, Artificial sequence; identical to SEQ ID NO: 13856
  synthetic

SEQ ID NO: 32715 - DNA, 203 bp, Artificial sequence; identical to SEQ ID NO: 13857
  synthetic

SEQ ID NO: 32716 - DNA, 203 bp, Artificial sequence; identical to SEQ ID NO: 13858
  synthetic

SEQ ID NO: 32717 - DNA, 203 bp, Artificial sequence; identical to SEQ ID NO: 13859
  synthetic

SEQ ID NO: 32718 - DNA, 203 bp, Artificial sequence; identical to SEQ ID NO: 13860
  synthetic

SEQ ID NO: 32719 - DNA, 203 bp, Artificial sequence; identical to SEQ ID NO: 13861
  synthetic

SEQ ID NO: 32720 - DNA, 203 bp, Artificial sequence; identical to SEQ ID NO: 13890
  synthetic

SEQ ID NO: 32721 - DNA, 203 bp, Artificial sequence; identical to SEQ ID NO: 13891
  synthetic

SEQ ID NO: 32722 - DNA, 203 bp, Artificial sequence; identical to SEQ ID NO: 13893
  synthetic

SEQ ID NO: 32723 - DNA, 203 bp, Artificial sequence; identical to SEQ ID NO: 13895
  synthetic

SEQ ID NO: 32724 - DNA, 203 bp, Artificial sequence; identical to SEQ ID NO: 13896
  synthetic

SEQ ID NO: 32725 - DNA, 203 bp, Artificial sequence; identical to SEQ ID NO: 13897
  synthetic

SEQ ID NO: 32726 - DNA, 203 bp, Artificial sequence; identical to SEQ ID NO: 13898
  synthetic

SEQ ID NO: 32727 - DNA, 203 bp, Artificial sequence; identical to SEQ ID NO: 13899
  synthetic

SEQ ID NO: 32728 - DNA, 203 bp, Artificial sequence; identical to SEQ ID NO: 13900
  synthetic

SEQ ID NO: 32729 - DNA, 203 bp, Artificial sequence; identical to SEQ ID NO: 13901
  synthetic

SEQ ID NO: 32730 - DNA, 203 bp, Artificial sequence; identical to SEQ ID NO: 13917
  synthetic

SEQ ID NO: 32731 - DNA, 203 bp, Artificial sequence; identical to SEQ ID NO: 13918
  synthetic

SEQ ID NO: 32732 - DNA, 203 bp, Artificial sequence; identical to SEQ ID NO: 13927
  synthetic

SEQ ID NO: 32733 - DNA, 203 bp, Artificial sequence; identical to SEQ ID NO: 13929
  synthetic

SEQ ID NO: 32734 - DNA, 203 bp, Artificial sequence; identical to SEQ ID NO: 13930
  synthetic

SEQ ID NO: 32735 - DNA, 203 bp, Artificial sequence; identical to SEQ ID NO: 13931
  synthetic

SEQ ID NO: 32736 - DNA, 203 bp, Artificial sequence; identical to SEQ ID NO: 13932
  synthetic

SEQ ID NO: 32737 - DNA, 203 bp, Artificial sequence; identical to SEQ ID NO: 13935
  synthetic

SEQ ID NO: 32738 - DNA, 203 bp, Artificial sequence; identical to SEQ ID NO: 13936
  synthetic

SEQ ID NO: 32739 - DNA, 203 bp, Artificial sequence; identical to SEQ ID NO: 13937
  synthetic

SEQ ID NO: 32740 - DNA, 203 bp, Artificial sequence; identical to SEQ ID NO: 13947
  synthetic

SEQ ID NO: 32741 - DNA, 203 bp, Artificial sequence; identical to SEQ ID NO: 13948
  synthetic

SEQ ID NO: 32742 - DNA, 203 bp, Artificial sequence; identical to SEQ ID NO: 13950
  synthetic

SEQ ID NO: 32743 - DNA, 203 bp, Artificial sequence; identical to SEQ ID NO: 13951
  synthetic

SEQ ID NO: 32744 - DNA, 203 bp, Artificial sequence; identical to SEQ ID NO: 13952
  synthetic

SEQ ID NO: 32745 - DNA, 203 bp, Artificial sequence; identical to SEQ ID NO: 13953
  synthetic

SEQ ID NO: 32746 - DNA, 203 bp, Artificial sequence; identical to SEQ ID NO: 13956
  synthetic

SEQ ID NO: 32747 - DNA, 203 bp, Artificial sequence; identical to SEQ ID NO: 13960
  synthetic

SEQ ID NO: 32748 - DNA, 203 bp, Artificial sequence; identical to SEQ ID NO: 13961
  synthetic

SEQ ID NO: 32749 - DNA, 203 bp, Artificial sequence; identical to SEQ ID NO: 13964
  synthetic

SEQ ID NO: 32750 - DNA, 203 bp, Artificial sequence; identical to SEQ ID NO: 13965
  synthetic

SEQ ID NO: 32751 - DNA, 203 bp, Artificial sequence; identical to SEQ ID NO: 13966
  synthetic

SEQ ID NO: 32752 - DNA, 203 bp, Artificial sequence; identical to SEQ ID NO: 13967
  synthetic

SEQ ID NO: 32753 - DNA, 203 bp, Artificial sequence; identical to SEQ ID NO: 13968
  synthetic

SEQ ID NO: 32754 - DNA, 203 bp, Artificial sequence; identical to SEQ ID NO: 13969
  synthetic

SEQ ID NO: 32755 - DNA, 203 bp, Artificial sequence; identical to SEQ ID NO: 13970
  synthetic

SEQ ID NO: 32756 - DNA, 203 bp, Artificial sequence; identical to SEQ ID NO: 13971
  synthetic

SEQ ID NO: 32757 - DNA, 203 bp, Artificial sequence; identical to SEQ ID NO: 13973
  synthetic

SEQ ID NO: 32758 - DNA, 203 bp, Artificial sequence; identical to SEQ ID NO: 13974
  synthetic

SEQ ID NO: 32759 - DNA, 203 bp, Artificial sequence; identical to SEQ ID NO: 13978
  synthetic

SEQ ID NO: 32760 - DNA, 203 bp, Artificial sequence; identical to SEQ ID NO: 13980
  synthetic

SEQ ID NO: 32761 - DNA, 203 bp, Artificial sequence; identical to SEQ ID NO: 13981
  synthetic

SEQ ID NO: 32762 - DNA, 203 bp, Artificial sequence; identical to SEQ ID NO: 13998
  synthetic

SEQ ID NO: 32763 - DNA, 203 bp, Artificial sequence; identical to SEQ ID NO: 14002
  synthetic

SEQ ID NO: 32764 - DNA, 203 bp, Artificial sequence; identical to SEQ ID NO: 14005
  synthetic

SEQ ID NO: 32765 - DNA, 203 bp, Artificial sequence; identical to SEQ ID NO: 14008
  synthetic

SEQ ID NO: 32766 - DNA, 203 bp, Artificial sequence; identical to SEQ ID NO: 14009
  synthetic

SEQ ID NO: 32767 - DNA, 203 bp, Artificial sequence; identical to SEQ ID NO: 14016
  synthetic

SEQ ID NO: 32768 - DNA, 203 bp, Artificial sequence; identical to SEQ ID NO: 14019
  synthetic

SEQ ID NO: 32769 - DNA, 203 bp, Artificial sequence; identical to SEQ ID NO: 14057
  synthetic

SEQ ID NO: 32770 - DNA, 203 bp, Artificial sequence; identical to SEQ ID NO: 14059
  synthetic

SEQ ID NO: 32771 - DNA, 203 bp, Artificial sequence; identical to SEQ ID NO: 14066
  synthetic

SEQ ID NO: 32772 - DNA, 203 bp, Artificial sequence; identical to SEQ ID NO: 14082
  synthetic

SEQ ID NO: 32773 - DNA, 203 bp, Artificial sequence; identical to SEQ ID NO: 14091
  synthetic

SEQ ID NO: 32774 - DNA, 203 bp, Artificial sequence; identical to SEQ ID NO: 14100
  synthetic

SEQ ID NO: 32775 - DNA, 203 bp, Artificial sequence; identical to SEQ ID NO: 14101
  synthetic

SEQ ID NO: 32776 - DNA, 203 bp, Artificial sequence; identical to SEQ ID NO: 14102
  synthetic

SEQ ID NO: 32777 - DNA, 203 bp, Artificial sequence; identical to SEQ ID NO: 14131
  synthetic

SEQ ID NO: 32778 - DNA, 203 bp, Artificial sequence; identical to SEQ ID NO: 14141
  synthetic

SEQ ID NO: 32779 - DNA, 203 bp, Artificial sequence; identical to SEQ ID NO: 14163
  synthetic

SEQ ID NO: 32780 - DNA, 203 bp, Artificial sequence; identical to SEQ ID NO: 14164
  synthetic

SEQ ID NO: 32781 - DNA, 203 bp, Artificial sequence; identical to SEQ ID NO: 14166
  synthetic

SEQ ID NO: 32782 - DNA, 203 bp, Artificial sequence; identical to SEQ ID NO: 14169
  synthetic

SEQ ID NO: 32783 - DNA, 203 bp, Artificial sequence; identical to SEQ ID NO: 14170
  synthetic

SEQ ID NO: 32784 - DNA, 203 bp, Artificial sequence; identical to SEQ ID NO: 14171
  synthetic

SEQ ID NO: 32785 - DNA, 203 bp, Artificial sequence; identical to SEQ ID NO: 14173
  synthetic

SEQ ID NO: 32786 - DNA, 203 bp, Artificial sequence; identical to SEQ ID NO: 14174
  synthetic

SEQ ID NO: 32787 - DNA, 203 bp, Artificial sequence; identical to SEQ ID NO: 14175
  synthetic

SEQ ID NO: 32788 - DNA, 203 bp, Artificial sequence; identical to SEQ ID NO: 14176
  synthetic

SEQ ID NO: 32789 - DNA, 203 bp, Artificial sequence; identical to SEQ ID NO: 14179
  synthetic

SEQ ID NO: 32790 - DNA, 203 bp, Artificial sequence; identical to SEQ ID NO: 14180
  synthetic

SEQ ID NO: 32791 - DNA, 203 bp, Artificial sequence; identical to SEQ ID NO: 14192
  synthetic

SEQ ID NO: 32792 - DNA, 203 bp, Artificial sequence; identical to SEQ ID NO: 14195
  synthetic

SEQ ID NO: 32793 - DNA, 203 bp, Artificial sequence; identical to SEQ ID NO: 14196
  synthetic

SEQ ID NO: 32794 - DNA, 203 bp, Artificial sequence; identical to SEQ ID NO: 14198
  synthetic

SEQ ID NO: 32795 - DNA, 203 bp, Artificial sequence; identical to SEQ ID NO: 14200
  synthetic

SEQ ID NO: 32796 - DNA, 203 bp, Artificial sequence; identical to SEQ ID NO: 14222
  synthetic

SEQ ID NO: 32797 - DNA, 203 bp, Artificial sequence; identical to SEQ ID NO: 14223
  synthetic

SEQ ID NO: 32798 - DNA, 203 bp, Artificial sequence; identical to SEQ ID NO: 14224
  synthetic

SEQ ID NO: 32799 - DNA, 203 bp, Artificial sequence; identical to SEQ ID NO: 14225
  synthetic

SEQ ID NO: 32800 - DNA, 203 bp, Artificial sequence; identical to SEQ ID NO: 14237
  synthetic

SEQ ID NO: 32801 - DNA, 203 bp, Artificial sequence; identical to SEQ ID NO: 14248
  synthetic

SEQ ID NO: 32802 - DNA, 203 bp, Artificial sequence; identical to SEQ ID NO: 14249
  synthetic

SEQ ID NO: 32803 - DNA, 203 bp, Artificial sequence; identical to SEQ ID NO: 14250
  synthetic

SEQ ID NO: 32804 - DNA, 203 bp, Artificial sequence; identical to SEQ ID NO: 14255
  synthetic

SEQ ID NO: 32805 - DNA, 203 bp, Artificial sequence; identical to SEQ ID NO: 14256
  synthetic

SEQ ID NO: 32806 - DNA, 203 bp, Artificial sequence; identical to SEQ ID NO: 14257
  synthetic

SEQ ID NO: 32807 - DNA, 203 bp, Artificial sequence; identical to SEQ ID NO: 14258
  synthetic

SEQ ID NO: 32808 - DNA, 203 bp, Artificial sequence; identical to SEQ ID NO: 14262
  synthetic

SEQ ID NO: 32809 - DNA, 203 bp, Artificial sequence; identical to SEQ ID NO: 14263
  synthetic

SEQ ID NO: 32810 - DNA, 203 bp, Artificial sequence; identical to SEQ ID NO: 14264
  synthetic

SEQ ID NO: 32811 - DNA, 203 bp, Artificial sequence; identical to SEQ ID NO: 14267
  synthetic

SEQ ID NO: 32812 - DNA, 203 bp, Artificial sequence; identical to SEQ ID NO: 14272
  synthetic

SEQ ID NO: 32813 - DNA, 203 bp, Artificial sequence; identical to SEQ ID NO: 14273
  synthetic

SEQ ID NO: 32814 - DNA, 203 bp, Artificial sequence; identical to SEQ ID NO: 14274
  synthetic

SEQ ID NO: 32815 - DNA, 203 bp, Artificial sequence; identical to SEQ ID NO: 14281
  synthetic

SEQ ID NO: 32816 - DNA, 203 bp, Artificial sequence; identical to SEQ ID NO: 14290
  synthetic

SEQ ID NO: 32817 - DNA, 203 bp, Artificial sequence; identical to SEQ ID NO: 14291
  synthetic

SEQ ID NO: 32818 - DNA, 203 bp, Artificial sequence; identical to SEQ ID NO: 14292
  synthetic

SEQ ID NO: 32819 - DNA, 203 bp, Artificial sequence; identical to SEQ ID NO: 14293
  synthetic

SEQ ID NO: 32820 - DNA, 203 bp, Artificial sequence; identical to SEQ ID NO: 14295
  synthetic

SEQ ID NO: 32821 - DNA, 203 bp, Artificial sequence; identical to SEQ ID NO: 14296
  synthetic

SEQ ID NO: 32822 - DNA, 203 bp, Artificial sequence; identical to SEQ ID NO: 14298
  synthetic

SEQ ID NO: 32823 - DNA, 203 bp, Artificial sequence; identical to SEQ ID NO: 14299
  synthetic

SEQ ID NO: 32824 - DNA, 203 bp, Artificial sequence; identical to SEQ ID NO: 14300
  synthetic

SEQ ID NO: 32825 - DNA, 203 bp, Artificial sequence; identical to SEQ ID NO: 14302
  synthetic

SEQ ID NO: 32826 - DNA, 203 bp, Artificial sequence; identical to SEQ ID NO: 14303
  synthetic

SEQ ID NO: 32827 - DNA, 203 bp, Artificial sequence; identical to SEQ ID NO: 14304
  synthetic

SEQ ID NO: 32828 - DNA, 203 bp, Artificial sequence; identical to SEQ ID NO: 14343
  synthetic

SEQ ID NO: 32829 - DNA, 203 bp, Artificial sequence; identical to SEQ ID NO: 14345
  synthetic

SEQ ID NO: 32830 - DNA, 203 bp, Artificial sequence; identical to SEQ ID NO: 14347
  synthetic

SEQ ID NO: 32831 - DNA, 203 bp, Artificial sequence; identical to SEQ ID NO: 14355
  synthetic

SEQ ID NO: 32832 - DNA, 203 bp, Artificial sequence; identical to SEQ ID NO: 14379
  synthetic

SEQ ID NO: 32833 - DNA, 203 bp, Artificial sequence; identical to SEQ ID NO: 14381
  synthetic

SEQ ID NO: 32834 - DNA, 203 bp, Artificial sequence; identical to SEQ ID NO: 14382
  synthetic

SEQ ID NO: 32835 - DNA, 203 bp, Artificial sequence; identical to SEQ ID NO: 14412
  synthetic

SEQ ID NO: 32836 - DNA, 203 bp, Artificial sequence; identical to SEQ ID NO: 14466
  synthetic

SEQ ID NO: 32837 - DNA, 203 bp, Artificial sequence; identical to SEQ ID NO: 14467
  synthetic

SEQ ID NO: 32838 - DNA, 203 bp, Artificial sequence; identical to SEQ ID NO: 14468
  synthetic

SEQ ID NO: 32839 - DNA, 203 bp, Artificial sequence; identical to SEQ ID NO: 14469
  synthetic

SEQ ID NO: 32840 - DNA, 203 bp, Artificial sequence; identical to SEQ ID NO: 14471
  synthetic

SEQ ID NO: 32841 - DNA, 203 bp, Artificial sequence; identical to SEQ ID NO: 14476
  synthetic

SEQ ID NO: 32842 - DNA, 203 bp, Artificial sequence; identical to SEQ ID NO: 14479
  synthetic

SEQ ID NO: 32843 - DNA, 203 bp, Artificial sequence; identical to SEQ ID NO: 14480
  synthetic

SEQ ID NO: 32844 - DNA, 203 bp, Artificial sequence; identical to SEQ ID NO: 14481
  synthetic

SEQ ID NO: 32845 - DNA, 203 bp, Artificial sequence; identical to SEQ ID NO: 14483
  synthetic

SEQ ID NO: 32846 - DNA, 203 bp, Artificial sequence; identical to SEQ ID NO: 14484
  synthetic

SEQ ID NO: 32847 - DNA, 203 bp, Artificial sequence; identical to SEQ ID NO: 14486
  synthetic

SEQ ID NO: 32848 - DNA, 203 bp, Artificial sequence; identical to SEQ ID NO: 14489
  synthetic

SEQ ID NO: 32849 - DNA, 203 bp, Artificial sequence; identical to SEQ ID NO: 14513
  synthetic

SEQ ID NO: 32850 - DNA, 203 bp, Artificial sequence; identical to SEQ ID NO: 14514
  synthetic

SEQ ID NO: 32851 - DNA, 203 bp, Artificial sequence; identical to SEQ ID NO: 14516
  synthetic

SEQ ID NO: 32852 - DNA, 203 bp, Artificial sequence; identical to SEQ ID NO: 14517
  synthetic

SEQ ID NO: 32853 - DNA, 203 bp, Artificial sequence; identical to SEQ ID NO: 14519
  synthetic

SEQ ID NO: 32854 - DNA, 203 bp, Artificial sequence; identical to SEQ ID NO: 14521
  synthetic

SEQ ID NO: 32855 - DNA, 203 bp, Artificial sequence; identical to SEQ ID NO: 14524
  synthetic

SEQ ID NO: 32856 - DNA, 203 bp, Artificial sequence; identical to SEQ ID NO: 14526
  synthetic

SEQ ID NO: 32857 - DNA, 203 bp, Artificial sequence; identical to SEQ ID NO: 14527
  synthetic

SEQ ID NO: 32858 - DNA, 203 bp, Artificial sequence; identical to SEQ ID NO: 14528
  synthetic

SEQ ID NO: 32859 - DNA, 203 bp, Artificial sequence; identical to SEQ ID NO: 14532
  synthetic

SEQ ID NO: 32860 - DNA, 203 bp, Artificial sequence; identical to SEQ ID NO: 14534
  synthetic

SEQ ID NO: 32861 - DNA, 203 bp, Artificial sequence; identical to SEQ ID NO: 14535
  synthetic

SEQ ID NO: 32862 - DNA, 203 bp, Artificial sequence; identical to SEQ ID NO: 14537
  synthetic

SEQ ID NO: 32863 - DNA, 203 bp, Artificial sequence; identical to SEQ ID NO: 14539
  synthetic

SEQ ID NO: 32864 - DNA, 203 bp, Artificial sequence; identical to SEQ ID NO: 14541
  synthetic

SEQ ID NO: 32865 - DNA, 203 bp, Artificial sequence; identical to SEQ ID NO: 14542
  synthetic

SEQ ID NO: 32866 - DNA, 203 bp, Artificial sequence; identical to SEQ ID NO: 14544
  synthetic

SEQ ID NO: 32867 - DNA, 203 bp, Artificial sequence; identical to SEQ ID NO: 14545
  synthetic

SEQ ID NO: 32868 - DNA, 203 bp, Artificial sequence; identical to SEQ ID NO: 14547
  synthetic

SEQ ID NO: 32869 - DNA, 203 bp, Artificial sequence; identical to SEQ ID NO: 14549
  synthetic

SEQ ID NO: 32870 - DNA, 203 bp, Artificial sequence; identical to SEQ ID NO: 14550
  synthetic

SEQ ID NO: 32871 - DNA, 203 bp, Artificial sequence; identical to SEQ ID NO: 14560
  synthetic

SEQ ID NO: 32872 - DNA, 203 bp, Artificial sequence; identical to SEQ ID NO: 14561
  synthetic

SEQ ID NO: 32873 - DNA, 203 bp, Artificial sequence; identical to SEQ ID NO: 14562
  synthetic

SEQ ID NO: 32874 - DNA, 203 bp, Artificial sequence; identical to SEQ ID NO: 14564
  synthetic

SEQ ID NO: 32875 - DNA, 203 bp, Artificial sequence; identical to SEQ ID NO: 14565
  synthetic

SEQ ID NO: 32876 - DNA, 203 bp, Artificial sequence; identical to SEQ ID NO: 14566
  synthetic

SEQ ID NO: 32877 - DNA, 203 bp, Artificial sequence; identical to SEQ ID NO: 14567
  synthetic

SEQ ID NO: 32878 - DNA, 203 bp, Artificial sequence; identical to SEQ ID NO: 14569
  synthetic

SEQ ID NO: 32879 - DNA, 203 bp, Artificial sequence; identical to SEQ ID NO: 14571
  synthetic

SEQ ID NO: 32880 - DNA, 203 bp, Artificial sequence; identical to SEQ ID NO: 14572
  synthetic

SEQ ID NO: 32881 - DNA, 203 bp, Artificial sequence; identical to SEQ ID NO: 14573
  synthetic

SEQ ID NO: 32882 - DNA, 203 bp, Artificial sequence; identical to SEQ ID NO: 14574
  synthetic

SEQ ID NO: 32883 - DNA, 203 bp, Artificial sequence; identical to SEQ ID NO: 14575
  synthetic

SEQ ID NO: 32884 - DNA, 203 bp, Artificial sequence; identical to SEQ ID NO: 14600
  synthetic

SEQ ID NO: 32885 - DNA, 203 bp, Artificial sequence; identical to SEQ ID NO: 14677
  synthetic

SEQ ID NO: 32886 - DNA, 203 bp, Artificial sequence; identical to SEQ ID NO: 14740
  synthetic

SEQ ID NO: 32887 - DNA, 203 bp, Artificial sequence; identical to SEQ ID NO: 14742
  synthetic

SEQ ID NO: 32888 - DNA, 203 bp, Artificial sequence; identical to SEQ ID NO: 14746
  synthetic

SEQ ID NO: 32889 - DNA, 203 bp, Artificial sequence; identical to SEQ ID NO: 14750
  synthetic

SEQ ID NO: 32890 - DNA, 203 bp, Artificial sequence; identical to SEQ ID NO: 14752
  synthetic

SEQ ID NO: 32891 - DNA, 203 bp, Artificial sequence; identical to SEQ ID NO: 14837
  synthetic

SEQ ID NO: 32892 - DNA, 203 bp, Artificial sequence; identical to SEQ ID NO: 14843
  synthetic

SEQ ID NO: 32893 - DNA, 203 bp, Artificial sequence; identical to SEQ ID NO: 15388
  synthetic

SEQ ID NO: 32894 - DNA, 203 bp, Artificial sequence; identical to SEQ ID NO: 15389
  synthetic

SEQ ID NO: 32895 - DNA, 203 bp, Artificial sequence; identical to SEQ ID NO: 15402
  synthetic

SEQ ID NO: 32896 - DNA, 203 bp, Artificial sequence; identical to SEQ ID NO: 15406
  synthetic

SEQ ID NO: 32897 - DNA, 203 bp, Artificial sequence; identical to SEQ ID NO: 15412
  synthetic

SEQ ID NO: 32898 - DNA, 203 bp, Artificial sequence; identical to SEQ ID NO: 15418
  synthetic

SEQ ID NO: 32899 - DNA, 203 bp, Artificial sequence; identical to SEQ ID NO: 15424
  synthetic

SEQ ID NO: 32900 - DNA, 203 bp, Artificial sequence; identical to SEQ ID NO: 15428
  synthetic

SEQ ID NO: 32901 - DNA, 203 bp, Artificial sequence; identical to SEQ ID NO: 15429
  synthetic

SEQ ID NO: 32902 - DNA, 203 bp, Artificial sequence; identical to SEQ ID NO: 15440
  synthetic

SEQ ID NO: 32903 - DNA, 203 bp, Artificial sequence; identical to SEQ ID NO: 15444
  synthetic

SEQ ID NO: 32904 - DNA, 203 bp, Artificial sequence; identical to SEQ ID NO: 15532
  synthetic

SEQ ID NO: 32905 - DNA, 203 bp, Artificial sequence; identical to SEQ ID NO: 15535
  synthetic

SEQ ID NO: 32906 - DNA, 203 bp, Artificial sequence; identical to SEQ ID NO: 15544
  synthetic

SEQ ID NO: 32907 - DNA, 203 bp, Artificial sequence; identical to SEQ ID NO: 15709
  synthetic

SEQ ID NO: 32908 - DNA, 203 bp, Artificial sequence; identical to SEQ ID NO: 15710
  synthetic

SEQ ID NO: 32909 - DNA, 203 bp, Artificial sequence; identical to SEQ ID NO: 15712
  synthetic

SEQ ID NO: 32910 - DNA, 203 bp, Artificial sequence; identical to SEQ ID NO: 15713
  synthetic

SEQ ID NO: 32911 - DNA, 203 bp, Artificial sequence; identical to SEQ ID NO: 15715
  synthetic

SEQ ID NO: 32912 - DNA, 203 bp, Artificial sequence; identical to SEQ ID NO: 15717
  synthetic

SEQ ID NO: 32913 - DNA, 203 bp, Artificial sequence; identical to SEQ ID NO: 15718
  synthetic

SEQ ID NO: 32914 - DNA, 203 bp, Artificial sequence; identical to SEQ ID NO: 15719
  synthetic

SEQ ID NO: 32915 - DNA, 203 bp, Artificial sequence; identical to SEQ ID NO: 15721
  synthetic

SEQ ID NO: 32916 - DNA, 203 bp, Artificial sequence; identical to SEQ ID NO: 15723
  synthetic

SEQ ID NO: 32917 - DNA, 203 bp, Artificial sequence; identical to SEQ ID NO: 15724
  synthetic

SEQ ID NO: 32918 - DNA, 203 bp, Artificial sequence; identical to SEQ ID NO: 15725
  synthetic

SEQ ID NO: 32919 - DNA, 203 bp, Artificial sequence; identical to SEQ ID NO: 15726
  synthetic

SEQ ID NO: 32920 - DNA, 203 bp, Artificial sequence; identical to SEQ ID NO: 15728
  synthetic

SEQ ID NO: 32921 - DNA, 203 bp, Artificial sequence; identical to SEQ ID NO: 15729
  synthetic

SEQ ID NO: 32922 - DNA, 203 bp, Artificial sequence; identical to SEQ ID NO: 15743
  synthetic

SEQ ID NO: 32923 - DNA, 203 bp, Artificial sequence; identical to SEQ ID NO: 15754
  synthetic

SEQ ID NO: 32924 - DNA, 203 bp, Artificial sequence; identical to SEQ ID NO: 15755
  synthetic

SEQ ID NO: 32925 - DNA, 203 bp, Artificial sequence; identical to SEQ ID NO: 15757
  synthetic

SEQ ID NO: 32926 - DNA, 203 bp, Artificial sequence; identical to SEQ ID NO: 15760
  synthetic

SEQ ID NO: 32927 - DNA, 203 bp, Artificial sequence; identical to SEQ ID NO: 15766
  synthetic

SEQ ID NO: 32928 - DNA, 203 bp, Artificial sequence; identical to SEQ ID NO: 15769
  synthetic

SEQ ID NO: 32929 - DNA, 203 bp, Artificial sequence; identical to SEQ ID NO: 15773
  synthetic

SEQ ID NO: 32930 - DNA, 203 bp, Artificial sequence; identical to SEQ ID NO: 15776
  synthetic

SEQ ID NO: 32931 - DNA, 203 bp, Artificial sequence; identical to SEQ ID NO: 15777
  synthetic

SEQ ID NO: 32932 - DNA, 203 bp, Artificial sequence; identical to SEQ ID NO: 15778
  synthetic

SEQ ID NO: 32933 - DNA, 203 bp, Artificial sequence; identical to SEQ ID NO: 15780
  synthetic

SEQ ID NO: 32934 - DNA, 203 bp, Artificial sequence; identical to SEQ ID NO: 15781
  synthetic

SEQ ID NO: 32935 - DNA, 203 bp, Artificial sequence; identical to SEQ ID NO: 15782
  synthetic

SEQ ID NO: 32936 - DNA, 203 bp, Artificial sequence; identical to SEQ ID NO: 15783
  synthetic

SEQ ID NO: 32937 - DNA, 203 bp, Artificial sequence; identical to SEQ ID NO: 15784
  synthetic

SEQ ID NO: 32938 - DNA, 203 bp, Artificial sequence; identical to SEQ ID NO: 15785
  synthetic

SEQ ID NO: 32939 - DNA, 203 bp, Artificial sequence; identical to SEQ ID NO: 15787
  synthetic

SEQ ID NO: 32940 - DNA, 203 bp, Artificial sequence; identical to SEQ ID NO: 15788
  synthetic

SEQ ID NO: 32941 - DNA, 203 bp, Artificial sequence; identical to SEQ ID NO: 15789
  synthetic

SEQ ID NO: 32942 - DNA, 203 bp, Artificial sequence; identical to SEQ ID NO: 15790
  synthetic

SEQ ID NO: 32943 - DNA, 203 bp, Artificial sequence; identical to SEQ ID NO: 15792
  synthetic

SEQ ID NO: 32944 - DNA, 203 bp, Artificial sequence; identical to SEQ ID NO: 15793
  synthetic

SEQ ID NO: 32945 - DNA, 203 bp, Artificial sequence; identical to SEQ ID NO: 15794
  synthetic

SEQ ID NO: 32946 - DNA, 203 bp, Artificial sequence; identical to SEQ ID NO: 15795
  synthetic

SEQ ID NO: 32947 - DNA, 203 bp, Artificial sequence; identical to SEQ ID NO: 15796
  synthetic

SEQ ID NO: 32948 - DNA, 203 bp, Artificial sequence; identical to SEQ ID NO: 15797
  synthetic

SEQ ID NO: 32949 - DNA, 203 bp, Artificial sequence; identical to SEQ ID NO: 15798
  synthetic

SEQ ID NO: 32950 - DNA, 203 bp, Artificial sequence; identical to SEQ ID NO: 15799
  synthetic

SEQ ID NO: 32951 - DNA, 203 bp, Artificial sequence; identical to SEQ ID NO: 15820
  synthetic

SEQ ID NO: 32952 - DNA, 203 bp, Artificial sequence; identical to SEQ ID NO: 15830
  synthetic

SEQ ID NO: 32953 - DNA, 203 bp, Artificial sequence; identical to SEQ ID NO: 15831
  synthetic

SEQ ID NO: 32954 - DNA, 203 bp, Artificial sequence; identical to SEQ ID NO: 15834
  synthetic

SEQ ID NO: 32955 - DNA, 203 bp, Artificial sequence; identical to SEQ ID NO: 15835
  synthetic

SEQ ID NO: 32956 - DNA, 203 bp, Artificial sequence; identical to SEQ ID NO: 15836
  synthetic

SEQ ID NO: 32957 - DNA, 203 bp, Artificial sequence; identical to SEQ ID NO: 15860
  synthetic

SEQ ID NO: 32958 - DNA, 203 bp, Artificial sequence; identical to SEQ ID NO: 15874
  synthetic

SEQ ID NO: 32959 - DNA, 203 bp, Artificial sequence; identical to SEQ ID NO: 15880
  synthetic

SEQ ID NO: 32960 - DNA, 203 bp, Artificial sequence; identical to SEQ ID NO: 15893
  synthetic

SEQ ID NO: 32961 - DNA, 203 bp, Artificial sequence; identical to SEQ ID NO: 15897
  synthetic

SEQ ID NO: 32962 - DNA, 203 bp, Artificial sequence; identical to SEQ ID NO: 15898
  synthetic

SEQ ID NO: 32963 - DNA, 203 bp, Artificial sequence; identical to SEQ ID NO: 15899
  synthetic

SEQ ID NO: 32964 - DNA, 203 bp, Artificial sequence; identical to SEQ ID NO: 15900
  synthetic

SEQ ID NO: 32965 - DNA, 203 bp, Artificial sequence; identical to SEQ ID NO: 15946
  synthetic

SEQ ID NO: 32966 - DNA, 203 bp, Artificial sequence; identical to SEQ ID NO: 15947
  synthetic

SEQ ID NO: 32967 - DNA, 203 bp, Artificial sequence; identical to SEQ ID NO: 15954
  synthetic

SEQ ID NO: 32968 - DNA, 203 bp, Artificial sequence; identical to SEQ ID NO: 15956
  synthetic

SEQ ID NO: 32969 - DNA, 203 bp, Artificial sequence; identical to SEQ ID NO: 15960
  synthetic

SEQ ID NO: 32970 - DNA, 203 bp, Artificial sequence; identical to SEQ ID NO: 15961
  synthetic

SEQ ID NO: 32971 - DNA, 203 bp, Artificial sequence; identical to SEQ ID NO: 15963
  synthetic

SEQ ID NO: 32972 - DNA, 203 bp, Artificial sequence; identical to SEQ ID NO: 15968
  synthetic

SEQ ID NO: 32973 - DNA, 203 bp, Artificial sequence; identical to SEQ ID NO: 15969
  synthetic

SEQ ID NO: 32974 - DNA, 203 bp, Artificial sequence; identical to SEQ ID NO: 15971
  synthetic

SEQ ID NO: 32975 - DNA, 203 bp, Artificial sequence; identical to SEQ ID NO: 15973
  synthetic

SEQ ID NO: 32976 - DNA, 203 bp, Artificial sequence; identical to SEQ ID NO: 15975
  synthetic

SEQ ID NO: 32977 - DNA, 203 bp, Artificial sequence; identical to SEQ ID NO: 15976
  synthetic

SEQ ID NO: 32978 - DNA, 203 bp, Artificial sequence; identical to SEQ ID NO: 15977
  synthetic

SEQ ID NO: 32979 - DNA, 203 bp, Artificial sequence; identical to SEQ ID NO: 15980
  synthetic

SEQ ID NO: 32980 - DNA, 203 bp, Artificial sequence; identical to SEQ ID NO: 15983
  synthetic

SEQ ID NO: 32981 - DNA, 203 bp, Artificial sequence; identical to SEQ ID NO: 15984
  synthetic

SEQ ID NO: 32982 - DNA, 203 bp, Artificial sequence; identical to SEQ ID NO: 15985
  synthetic

SEQ ID NO: 32983 - DNA, 203 bp, Artificial sequence; identical to SEQ ID NO: 15986
  synthetic

SEQ ID NO: 32984 - DNA, 203 bp, Artificial sequence; identical to SEQ ID NO: 15988
  synthetic

SEQ ID NO: 32985 - DNA, 203 bp, Artificial sequence; identical to SEQ ID NO: 15992
  synthetic

SEQ ID NO: 32986 - DNA, 203 bp, Artificial sequence; identical to SEQ ID NO: 15994
  synthetic

SEQ ID NO: 32987 - DNA, 203 bp, Artificial sequence; identical to SEQ ID NO: 15999
  synthetic

SEQ ID NO: 32988 - DNA, 203 bp, Artificial sequence; identical to SEQ ID NO: 16000
  synthetic

SEQ ID NO: 32989 - DNA, 203 bp, Artificial sequence; identical to SEQ ID NO: 16002
  synthetic

SEQ ID NO: 32990 - DNA, 203 bp, Artificial sequence; identical to SEQ ID NO: 16004
  synthetic

SEQ ID NO: 32991 - DNA, 203 bp, Artificial sequence; identical to SEQ ID NO: 16007
  synthetic

SEQ ID NO: 32992 - DNA, 203 bp, Artificial sequence; identical to SEQ ID NO: 16010
  synthetic

SEQ ID NO: 32993 - DNA, 203 bp, Artificial sequence; identical to SEQ ID NO: 16012
  synthetic

SEQ ID NO: 32994 - DNA, 203 bp, Artificial sequence; identical to SEQ ID NO: 16013
  synthetic

SEQ ID NO: 32995 - DNA, 203 bp, Artificial sequence; identical to SEQ ID NO: 16017
  synthetic

SEQ ID NO: 32996 - DNA, 203 bp, Artificial sequence; identical to SEQ ID NO: 16018
  synthetic

SEQ ID NO: 32997 - DNA, 203 bp, Artificial sequence; identical to SEQ ID NO: 16019
  synthetic

SEQ ID NO: 32998 - DNA, 203 bp, Artificial sequence; identical to SEQ ID NO: 16022
  synthetic

SEQ ID NO: 32999 - DNA, 203 bp, Artificial sequence; identical to SEQ ID NO: 16023
  synthetic

SEQ ID NO: 33000 - DNA, 203 bp, Artificial sequence; identical to SEQ ID NO: 16026
  synthetic

SEQ ID NO: 33001 - DNA, 203 bp, Artificial sequence; identical to SEQ ID NO: 16027
  synthetic

SEQ ID NO: 33002 - DNA, 203 bp, Artificial sequence; identical to SEQ ID NO: 16028
  synthetic

SEQ ID NO: 33003 - DNA, 203 bp, Artificial sequence; identical to SEQ ID NO: 16030
  synthetic

SEQ ID NO: 33004 - DNA, 203 bp, Artificial sequence; identical to SEQ ID NO: 16031
  synthetic

SEQ ID NO: 33005 - DNA, 203 bp, Artificial sequence; identical to SEQ ID NO: 16035
  synthetic

SEQ ID NO: 33006 - DNA, 203 bp, Artificial sequence; identical to SEQ ID NO: 16036
  synthetic

SEQ ID NO: 33007 - DNA, 203 bp, Artificial sequence; identical to SEQ ID NO: 16039
  synthetic

SEQ ID NO: 33008 - DNA, 203 bp, Artificial sequence; identical to SEQ ID NO: 16040
  synthetic

SEQ ID NO: 33009 - DNA, 203 bp, Artificial sequence; identical to SEQ ID NO: 16041
  synthetic

SEQ ID NO: 33010 - DNA, 203 bp, Artificial sequence; identical to SEQ ID NO: 16042
  synthetic

SEQ ID NO: 33011 - DNA, 203 bp, Artificial sequence; identical to SEQ ID NO: 16044
  synthetic

SEQ ID NO: 33012 - DNA, 203 bp, Artificial sequence; identical to SEQ ID NO: 16045
  synthetic

SEQ ID NO: 33013 - DNA, 203 bp, Artificial sequence; identical to SEQ ID NO: 16046
  synthetic

SEQ ID NO: 33014 - DNA, 203 bp, Artificial sequence; identical to SEQ ID NO: 16047
  synthetic

SEQ ID NO: 33015 - DNA, 203 bp, Artificial sequence; identical to SEQ ID NO: 16048
  synthetic

SEQ ID NO: 33016 - DNA, 203 bp, Artificial sequence; identical to SEQ ID NO: 16049
  synthetic

SEQ ID NO: 33017 - DNA, 203 bp, Artificial sequence; identical to SEQ ID NO: 16050
  synthetic

SEQ ID NO: 33018 - DNA, 203 bp, Artificial sequence; identical to SEQ ID NO: 16051
  synthetic

SEQ ID NO: 33019 - DNA, 203 bp, Artificial sequence; identical to SEQ ID NO: 16052
  synthetic

SEQ ID NO: 33020 - DNA, 203 bp, Artificial sequence; identical to SEQ ID NO: 16053
  synthetic

SEQ ID NO: 33021 - DNA, 203 bp, Artificial sequence; identical to SEQ ID NO: 16054
  synthetic

SEQ ID NO: 33022 - DNA, 203 bp, Artificial sequence; identical to SEQ ID NO: 16055
  synthetic

SEQ ID NO: 33023 - DNA, 203 bp, Artificial sequence; identical to SEQ ID NO: 16056
  synthetic

SEQ ID NO: 33024 - DNA, 203 bp, Artificial sequence; identical to SEQ ID NO: 16057
  synthetic

SEQ ID NO: 33025 - DNA, 203 bp, Artificial sequence; identical to SEQ ID NO: 16058
  synthetic

SEQ ID NO: 33026 - DNA, 203 bp, Artificial sequence; identical to SEQ ID NO: 16059
  synthetic

SEQ ID NO: 33027 - DNA, 203 bp, Artificial sequence; identical to SEQ ID NO: 16060
  synthetic

SEQ ID NO: 33028 - DNA, 203 bp, Artificial sequence; identical to SEQ ID NO: 16061
  synthetic

SEQ ID NO: 33029 - DNA, 203 bp, Artificial sequence; identical to SEQ ID NO: 16062
  synthetic

SEQ ID NO: 33030 - DNA, 203 bp, Artificial sequence; identical to SEQ ID NO: 16063
  synthetic

SEQ ID NO: 33031 - DNA, 203 bp, Artificial sequence; identical to SEQ ID NO: 16064
  synthetic

SEQ ID NO: 33032 - DNA, 203 bp, Artificial sequence; identical to SEQ ID NO: 16065
  synthetic

SEQ ID NO: 33033 - DNA, 203 bp, Artificial sequence; identical to SEQ ID NO: 16066
  synthetic

SEQ ID NO: 33034 - DNA, 203 bp, Artificial sequence; identical to SEQ ID NO: 16067
  synthetic

SEQ ID NO: 33035 - DNA, 203 bp, Artificial sequence; identical to SEQ ID NO: 16069
  synthetic

SEQ ID NO: 33036 - DNA, 203 bp, Artificial sequence; identical to SEQ ID NO: 16070
  synthetic

SEQ ID NO: 33037 - DNA, 203 bp, Artificial sequence; identical to SEQ ID NO: 16071
  synthetic

SEQ ID NO: 33038 - DNA, 203 bp, Artificial sequence; identical to SEQ ID NO: 16074
  synthetic

SEQ ID NO: 33039 - DNA, 203 bp, Artificial sequence; identical to SEQ ID NO: 16075
  synthetic

SEQ ID NO: 33040 - DNA, 203 bp, Artificial sequence; identical to SEQ ID NO: 16076
  synthetic

SEQ ID NO: 33041 - DNA, 203 bp, Artificial sequence; identical to SEQ ID NO: 16078
  synthetic

SEQ ID NO: 33042 - DNA, 203 bp, Artificial sequence; identical to SEQ ID NO: 16079
  synthetic

SEQ ID NO: 33043 - DNA, 203 bp, Artificial sequence; identical to SEQ ID NO: 16080
  synthetic

SEQ ID NO: 33044 - DNA, 203 bp, Artificial sequence; identical to SEQ ID NO: 16081
  synthetic

SEQ ID NO: 33045 - DNA, 203 bp, Artificial sequence; identical to SEQ ID NO: 16083
  synthetic

SEQ ID NO: 33046 - DNA, 203 bp, Artificial sequence; identical to SEQ ID NO: 16084
  synthetic

SEQ ID NO: 33047 - DNA, 203 bp, Artificial sequence; identical to SEQ ID NO: 16085
  synthetic

SEQ ID NO: 33048 - DNA, 203 bp, Artificial sequence; identical to SEQ ID NO: 16087
  synthetic

SEQ ID NO: 33049 - DNA, 203 bp, Artificial sequence; identical to SEQ ID NO: 16091
  synthetic

SEQ ID NO: 33050 - DNA, 203 bp, Artificial sequence; identical to SEQ ID NO: 16092
  synthetic

SEQ ID NO: 33051 - DNA, 203 bp, Artificial sequence; identical to SEQ ID NO: 16095
  synthetic

SEQ ID NO: 33052 - DNA, 203 bp, Artificial sequence; identical to SEQ ID NO: 16096
  synthetic

SEQ ID NO: 33053 - DNA, 203 bp, Artificial sequence; identical to SEQ ID NO: 16097
  synthetic

SEQ ID NO: 33054 - DNA, 203 bp, Artificial sequence; identical to SEQ ID NO: 16098
  synthetic

SEQ ID NO: 33055 - DNA, 203 bp, Artificial sequence; identical to SEQ ID NO: 16099
  synthetic

SEQ ID NO: 33056 - DNA, 203 bp, Artificial sequence; identical to SEQ ID NO: 16100
  synthetic

SEQ ID NO: 33057 - DNA, 203 bp, Artificial sequence; identical to SEQ ID NO: 16104
  synthetic

SEQ ID NO: 33058 - DNA, 203 bp, Artificial sequence; identical to SEQ ID NO: 16105
  synthetic

SEQ ID NO: 33059 - DNA, 203 bp, Artificial sequence; identical to SEQ ID NO: 16110
  synthetic

SEQ ID NO: 33060 - DNA, 203 bp, Artificial sequence; identical to SEQ ID NO: 16112
  synthetic

SEQ ID NO: 33061 - DNA, 203 bp, Artificial sequence; identical to SEQ ID NO: 16113
  synthetic

SEQ ID NO: 33062 - DNA, 203 bp, Artificial sequence; identical to SEQ ID NO: 16114
  synthetic

SEQ ID NO: 33063 - DNA, 203 bp, Artificial sequence; identical to SEQ ID NO: 16116
  synthetic

SEQ ID NO: 33064 - DNA, 203 bp, Artificial sequence; identical to SEQ ID NO: 16122
  synthetic

SEQ ID NO: 33065 - DNA, 203 bp, Artificial sequence; identical to SEQ ID NO: 16131
  synthetic

SEQ ID NO: 33066 - DNA, 203 bp, Artificial sequence; identical to SEQ ID NO: 16132
  synthetic

SEQ ID NO: 33067 - DNA, 203 bp, Artificial sequence; identical to SEQ ID NO: 16135
  synthetic

SEQ ID NO: 33068 - DNA, 203 bp, Artificial sequence; identical to SEQ ID NO: 16136
  synthetic

SEQ ID NO: 33069 - DNA, 203 bp, Artificial sequence; identical to SEQ ID NO: 16137
  synthetic

SEQ ID NO: 33070 - DNA, 203 bp, Artificial sequence; identical to SEQ ID NO: 16147
  synthetic

SEQ ID NO: 33071 - DNA, 203 bp, Artificial sequence; identical to SEQ ID NO: 16149
  synthetic

SEQ ID NO: 33072 - DNA, 203 bp, Artificial sequence; identical to SEQ ID NO: 16150
  synthetic

SEQ ID NO: 33073 - DNA, 203 bp, Artificial sequence; identical to SEQ ID NO: 17295
  synthetic

SEQ ID NO: 33074 - DNA, 203 bp, Artificial sequence; identical to SEQ ID NO: 17323
  synthetic

SEQ ID NO: 33075 - DNA, 203 bp, Artificial sequence; identical to SEQ ID NO: 17326
  synthetic

SEQ ID NO: 33076 - DNA, 203 bp, Artificial sequence; identical to SEQ ID NO: 17329
  synthetic

SEQ ID NO: 33077 - DNA, 203 bp, Artificial sequence; identical to SEQ ID NO: 17330
  synthetic

SEQ ID NO: 33078 - DNA, 203 bp, Artificial sequence; identical to SEQ ID NO: 17331
  synthetic

SEQ ID NO: 33079 - DNA, 203 bp, Artificial sequence; identical to SEQ ID NO: 17332
  synthetic

SEQ ID NO: 33080 - DNA, 203 bp, Artificial sequence; identical to SEQ ID NO: 17333
  synthetic

SEQ ID NO: 33081 - DNA, 203 bp, Artificial sequence; identical to SEQ ID NO: 17334
  synthetic

SEQ ID NO: 33082 - DNA, 203 bp, Artificial sequence; identical to SEQ ID NO: 17335
  synthetic

SEQ ID NO: 33083 - DNA, 203 bp, Artificial sequence; identical to SEQ ID NO: 17337
  synthetic

SEQ ID NO: 33084 - DNA, 240 bp, Artificial sequence
  synthetic
cacctacggaaaccttgttacgacttttacttcctctagatagtcaagttcgaccgtcttctcagcgctccgccagggccgtgggccgaccccggcggggccgatccgagggcctcactaaaccatccaatcggtagtagcgacgggcggtgtgtacaaagggcagggacttaatcaacgcaagcttatgacccgcacttactgggaattcctcgttcatggggaataattgcaatcccc

SEQ ID NO: 33085 - DNA, 116 bp, Artificial sequence
  synthetic
gggacgccgaccgctcgggggtcgcgtaactagttagcatgccagagtctcgttcgttatcggaattaaccagacaaatcgctccaccaactaagaacggccatgcaccaccaccc

SEQ ID NO: 33086 - DNA, 296 bp, Artificial sequence
  synthetic
gtttatggtcggaactacgacggtatctgatcgtcttcgaacctccgactttcgttcttgattaatgaaaacattcttggcaaatgctttcgctctggtccgtcttgcgccggtccaagaatttcacctctagcggcgcaatacgaatgcccccggccgtccctcttaatcatggcctcagttccgaaaaccaacaaaatagaaccgcggtcctattccattattcctagctgcggtatccaggcggctcgggcctgctttgaacactctaattttttcaaagtaaacgcttcggg

SEQ ID NO: 33087 - DNA, 80 bp, Artificial sequence
  synthetic
agagcatcgagggggcgccgagaggcaaggggcggggacgggcggtggctcgcctcgcggcggaccgcccgcccgctccc

SEQ ID NO: 33088 - DNA, 10 bp, Artificial sequence
  synthetic
tacgagcttt

SEQ ID NO: 33089 - DNA, 120 bp, Artificial sequence
  synthetic
atacgctattggagctggaattaccgcggctgctggcaccagacttgccctccaatggatcctcgttaaaggatttaaagtggactcattccaattacagggcctcgaaagagtcctgta

SEQ ID NO: 33090 - DNA, 80 bp, Artificial sequence
  synthetic
gggggcgtgcgatcggcccgaggttatctagagtcaccaaagccgccggcgcccgccccccggccggggccggagagggg

SEQ ID NO: 33091 - DNA, 174 bp, Artificial sequence
  synthetic
catcctcctgctgaagtgacaagccacgctgcttctggagccaaagctgaccaagaagaacaaatccaccccagatctagactcaggtcacctcctgaagccctcgttcagggtcgatatccccacatcaaggacggtgaggatcttaaagaccactcaacagaaagtaaaaaa

SEQ ID NO: 33092 - DNA, 174 bp, Artificial sequence
  synthetic
gcagaagggaaacgtgaagaaggtgaagatggcggtggccagggccggggtcttgggagtccagtggctgcaaagggcatcccggaacgtgatgccgctgggcgcacggacagcctcccacatgaccaaggacatgttcccggggccctatcctaggaccccagaagaacgggc

SEQ ID NO: 33093 - DNA, 174 bp, Artificial sequence
  synthetic
agactcgggaactgcctgaatgtggtttgggacacgagacctcatcatattgatgagcgaacaaacaagaacatttcctccctcccctcctttgaattgaaatggcacattaagacttgtcacggcttctcactgggactggagacctcgttccttcaccccgcgtgtcgccag

SEQ ID NO: 33094 - DNA, 174 bp, Artificial sequence
  synthetic
aggtgggcggtggcggtaggtgggtggccagcgactggcaacgcggtggcttagacgcgcgagatccggccagggtcagagtactgtaagattgatgttaaaggcatggtgttcaccccacttcatcagcgtacataagttatctcttcttttggacccttattttatgccata

SEQ ID NO: 33095 - DNA, 174 bp, Artificial sequence
  synthetic
ggaggcaggttgatgtgtttgtgcttccttctacagccaatatgaaaaggcctagtaagtggggtcgggaggcgggcgtggagggacccacgtctggaagttgctgcagccaccacgacgctcttctacggctacggctttgtctctgctgagttaaagaaagcaagtaaacgc

SEQ ID NO: 33096 - DNA, 174 bp, Artificial sequence
  synthetic
atttataagcaatagtagcttatttggctcacagttctggaggctgagaagatcgtgaggctgcatctggcaagggccttcttgctgcttcataacatggcagaagacatcatgcgggtgtgtgtctggggaagagacttacagaagtggagttgctgagtcaaagatctaacc

SEQ ID NO: 33097 - DNA, 174 bp, Artificial sequence
  synthetic
tcttttggtgcagaaggtgacgggaaacaggccgcagacctgaacttccaaccgtatgtaggcgagaagccggtgccgatactcccactatcccacaatgtcccactgggccccagagtggaagagggcggaggctaatccaagagaccttggggccagctgggatgtcagggg

SEQ ID NO: 33098 - DNA, 174 bp, Artificial sequence
  synthetic
atccaccatgaagcagaatctaaagaaaaaggtccaagcatgaaggaaccaaatccaatttctccaccaattttccatggtctggacaccctaaccgtgatgggcattgcgtttgcagcctttgtgatcggagcactcctgacgggggccttgtggtacatctattctcacaca

SEQ ID NO: 33099 - DNA, 174 bp, Artificial sequence
  synthetic
cagattagaggacgggcgctttggagccggccccaggcagcgtgtgtcggtcgcctagtctggagaactagtcctcgactcacgtgcaaggatgatgctgaaaggaataacaaggcttatctctaggatccataaggccaagcatggggatcagcacgagggtcagcactacaa

SEQ ID NO: 33100 - DNA, 174 bp, Artificial sequence
  synthetic
ctctcgggggccaggggtcatcggtttgacccctgacctataagccaagataccccataaacacactcagaaagcagagaaaaaggacaagagtctgtgtttgagagggggtctgccattcctgcttggggactggtggggaagagggccaggacatcttctgagccaggacgt

SEQ ID NO: 33101 - DNA, 174 bp, Artificial sequence
  synthetic
agtctggctgcggcggcagagctgaagtgagcggagccaccaggaggccatgtcgggtgaggacgctgaggtccgggcagtctctgaagatgtctccaatggaagcagtggctcgcccagccctggggacacactgccctggaaccttgggaaaacgcagcggagccggcgcag

SEQ ID NO: 33102 - DNA, 174 bp, Artificial sequence
  synthetic
atctgcctcagcctctttgtcactgcctggaccattgtccctgctgtttctcagacagcatagaggctgaggctggggccaggacccagacagagacacacggtcactgcagctgaagccgctgcccctgctacaggcaccaccaggaccagctgatcattccagcccacagca

SEQ ID NO: 33103 - DNA, 174 bp, Artificial sequence
  synthetic
ctcaggctgtggccccacctgcccccaagcccacccaggctggggaaggaacgctgtcagaggccctgctgcagctgcagtttgatgatgaagacctgggggccttgcttggcaacagcacagacccagctgtgttcacagacctggcatccgtcgacaactccgagtttcagc

SEQ ID NO: 33104 - DNA, 174 bp, Artificial sequence
  synthetic
ctcaaggttttgaagagacaggggacacgctctatgccccctattccacacattttcagctgcagaaccagcctccccaaaaggaattctccatcccacgggcccacgcttggccgagcccttacaaagactatgaagtaaagaaagagggcagctaactctgtcctgaagagt

SEQ ID NO: 33105 - DNA, 174 bp, Artificial sequence
  synthetic
gcttccgtagaggccagctggttgctacgcagcaacaggaaacattccgcgctaccgagtactttctactcccgaccaggcattgctctctctggagaccctcggcggtggttgctgtattttgacttggagtaaggatgacttttcgggccacagatagtgaatttgacctga

SEQ ID NO: 33106 - DNA, 174 bp, Artificial sequence
  synthetic
ctggagggccgcactcccgttccagccaggctgagccttctgtcccctgcctctggggcctgggaaccccccttcttctttctcctgaatggcacccccgccctagaatccagacaccgagtttcccactgtggctggttcaaggagctccctggtgacagtctgtggctgagc

SEQ ID NO: 33107 - DNA, 174 bp, Artificial sequence
  synthetic
tagagtggggggtggaagatgattctcgcctgttgctggggatttatgaacatggctatggaaactgggagttaattaaaacagacccagagcttaaattaactgacaaaattctgccggtggagacagataaaaagcctcaggggaagcagctacagacccgagcggattact

SEQ ID NO: 33108 - DNA, 174 bp, Artificial sequence
  synthetic
agcggctgcagcatccagccagcttggatgtctggcctgtgagcctggggaaactattattaataatatttactgttgataatattggggaaaacagcccttaactctgaggtttctgctgtgctcctttccaaaacagacttccaggactctgaagaaacagttacaagcagg

SEQ ID NO: 33109 - DNA, 174 bp, Artificial sequence
  synthetic
aagggaggaggcgccgagctgaccgggcgacgccgcgggaggttctggaaacgccgggagctgcgagtgtccagacacttccctctgtgaccatgaaactctgggtgtctgcattgctgatggcctggtttggtgtcctgagctgtgtgcaggccgaattcttcacctctattg

SEQ ID NO: 33110 - DNA, 174 bp, Artificial sequence
  synthetic
gcgaactgaaggtggcccaagggaaggctctgcaagagaatttggccctcctgacccagaccctagctgaaagagaagaggaggtggagactctgcggggacaaatccaggaactggagaagcaacgggaaatgcagaaggctgctttggaattgctgtctctggacctgaaga

SEQ ID NO: 33111 - DNA, 174 bp, Artificial sequence
  synthetic
aggaagccgaggaaggctgtgtttctgactcacacgggggagtcgggggagtcgtaaacaaccctgaagagaacagccaggcctggcgctctgggcttggtcctgggacacccgtttgacactgtaaaggtgaggctgcagacccagaccacctaccggggcatcgttgattgc

SEQ ID NO: 33112 - DNA, 174 bp, Artificial sequence
  synthetic
ctgcctcccccccgctcccgctcccctgagcccagccagaccccgcgccgcccgcgccccgctcgactccggaggctcccgcagccccggcgtccgccccgctgccccctcccccgggggccatgggggcgcccccgggctaccggccctcagcttgggtgcatctcctccacc

SEQ ID NO: 33113 - DNA, 174 bp, Artificial sequence
  synthetic
ctcagtgaagcaacgaggatgccggggagagggaaggggctgggctctgggcggtgccaagtctgtgagggggcgcggtcaccgcccagggttcccacgaacgccaaggcggccacgtcctgctccccctggtgaagaagctgccctgggcttgtcgtcctagggtctccagac

SEQ ID NO: 33114 - DNA, 174 bp, Artificial sequence
  synthetic
ctgatgtgagctagtttgtctggttgagttggatgtttaaatagaaggcagaacaacaacaggtactccacatcagcattctcaagactggagaagttaggcctcagacatcccaagccttctcctttcattggaaacttgacatttttccgccagggtttttgggaaagccaa

SEQ ID NO: 33115 - DNA, 174 bp, Artificial sequence
  synthetic
gccacattccacactaacgtgttggtgaattcttctgggcattgccagtacctgcctccaggcatattcaagagttcctgctacatcgatgtacgctggtttccctttgatgtgcagcactgcaaactgaagtttgggtcctggtcttacggaggctggtccttggatctgcag

SEQ ID NO: 33116 - DNA, 174 bp, Artificial sequence
  synthetic
tcctgcctcggcaaccccgggccctgagggcaggccccaaccgcggaggagcaggagagggcggaggccggcgggccatgccctggtcgtcccgcggcgccctccttcgggacctggtcctgggcgtgctgggcaccgccgccttcctgctcgacctgggcaccgacctgtggg

SEQ ID NO: 33117 - DNA, 174 bp, Artificial sequence
  synthetic
aagtttgaaactggtaacttcgggagttgagccacgagctgttgtgcatccagaggtggaattggggcccggcattccctcctcgtcccgggctggcccttgcccccaccctgcaactcctggttgagatgggctcagccaagagcgtcccagtcacaccagcgcggcctccgc

SEQ ID NO: 33118 - DNA, 174 bp, Artificial sequence
  synthetic
agccttcgctggatctccttcccgaactcacaaatcctgacgagctcctgtcttatctggacccccccgacctgccgagcaatagtaacgatgacctcctgtctctatttgagaacaactgagggccacccggtcggggccatccctccacactctgcatcctaccccacctac

SEQ ID NO: 33119 - DNA, 174 bp, Artificial sequence
  synthetic
tttttagaggttggttgttgtgttttaggattctgtccattttcttttaaagttataaacacgtacttgtgcgaattatttttttaaagtgatttgccatttttgaaagcgtatttaatgatagaatactatcgagccaacatgtactgacatggaaagatgtcaaagatatgt

SEQ ID NO: 33120 - DNA, 174 bp, Artificial sequence
  synthetic
agccagcggacgtccaggaaccgggatgcctccagcagtgaggcggtcagcctgcagcatgggatggctgtggatctttggggcagccctggggcagtgtctgggctacagttcacagcagcaaagggtgccatttcttcagcctcccggtcaaagtcaactgcaagcgagtta

SEQ ID NO: 33121 - DNA, 174 bp, Artificial sequence
  synthetic
gggaccaggaactggaggctctgcagcaagaacagcagcaggcccagggacaggaggagagggtgaaggaaaaggcagacgccctccagggagctctggagcaagcccatatgacactgaaggagcgtcatggagagcttcaggaccacaaggaacaggcacgaaggctggagg

SEQ ID NO: 33122 - DNA, 174 bp, Artificial sequence
  synthetic
ctactccggagcctgaggtgggaggatcgcttgagtctgggaggcagaggctgcattgagctatgatcatggcactgcattccagcctgggtgacagtgcaagaccttgtctcagaataaataaagtatgtgatgaagatgtgcatacattatatgcaaatactgttttttttt

SEQ ID NO: 33123 - DNA, 174 bp, Artificial sequence
  synthetic
caccaattcggctggcgtctccgagaccgcggactcccgtagggtccccgtggccccgagttgtagtcgggacaccccggccgcgggtgatcgtcgggtctccacgcgcccgggtcgctgacgcggatccggcctcggcgccttctcagggcgccctgcaaggccgcaggcagg

SEQ ID NO: 33124 - DNA, 174 bp, Artificial sequence
  synthetic
cctcctctctggctaatcaacagctgcccccagcctgtggtgccaggcaactcagcaagctgaaaaggttccttactaccctgcagcagtttggcaatgacatttcacccgagataggagaaagagttcgcaccctcgttctgggactagtgaactccactttgacaattgaag

SEQ ID NO: 33125 - DNA, 174 bp, Artificial sequence
  synthetic
tttagtgtcacaggagacacgagggcaaagtgctgaggaaactctagagcaacatcggaatgcatggtgaagcatcagatggtgaaggagaaggagacacagaagtgatgcagcaggagacagttccagttcctgtaccttcagagaaaaccaaacagcctaaagaatgttttt

SEQ ID NO: 33126 - DNA, 174 bp, Artificial sequence
  synthetic
gccacttctcttcccttcattcttcgccaggctctctgctgactcaagttcttcagttcacgatcttctagttgcagcgatgagtgcacgagtgagatcaagatccagaggaagaggagatggtcaggaggctcccgatgtggttgcattcgtggctcccggtgaatctcagca

SEQ ID NO: 33127 - DNA, 174 bp, Artificial sequence
  synthetic
cttcaacttggcaacagttgcctggggtagctctacacaactctgtccagcccacagcaatgattccagaggccatggggagtggacagcagctagctgactggaggaatgcccactctcatggcaaccagtacagcactatcatgcagcagccatccttgctgactaaccatg

SEQ ID NO: 33128 - DNA, 174 bp, Artificial sequence
  synthetic
caccctgacccaagccgagacaggttccaaacctcaacctgcagccggaagggggaagtgaaactcggctgggggtgggggctcagaagccgccccagaaagcactgaaagccacagcacgtacacccactccagggatctgccagcaccctgtggggcccagactacaggctg

SEQ ID NO: 33129 - DNA, 174 bp, Artificial sequence
  synthetic
gggacgccattgtgattggggcggggatccagggctgcttcactgcataccacctggccaaacacaggaagaggatcctcctgctggagcagttctttctaccacactcccgaggaagctcccatggacaaagccggataatccgaaaggcgtacctggaagacttttacaccc

SEQ ID NO: 33130 - DNA, 174 bp, Artificial sequence
  synthetic
caccgtagtgcttagaggccgaaaaagtacagccccttccgggctccgcggtacgggaagacagctttgggatgtcggaagatcctagaggtcccaaggtaccacgaaaggcagtggtagaaaagccagctcgggcagcagagcgagaggcccgggccctgctggagaagaacc

SEQ ID NO: 33131 - DNA, 174 bp, Artificial sequence
  synthetic
attggctgagcccggctgtcagtcctttcgcgcctcggcggcgcggcatagcccggctcggcctgtaaagcagtctcaagcctgccgcagggagaagatggcggtcgccgtgagaactttgcaggaacagctggaaaaggccaaagagagtcttaagaacgtggatgagaacat

SEQ ID NO: 33132 - DNA, 174 bp, Artificial sequence
  synthetic
acaaggagactgggaggtgtctcaagtgcctgtaccacacggaaggggaacactgtcagttctgccggtttggatactatggtgatgccctccagcaggactgtcgaaagtgtgtctgtaattacctgggcaccgtgcaagagcactgtaacggctctgactgccagtgcgaca

SEQ ID NO: 33133 - DNA, 174 bp, Artificial sequence
  synthetic
gaggaaggagagagtggaggaggagggctttgggttagggagagtgctttcgtttgttttaaatgggagaaactggagcatgttgccaagggcagagagccagcagagaggggtgaatggaagaaggagcgagaagggggttactgacgaagccttatcctggaggagagaagg

SEQ ID NO: 33134 - DNA, 174 bp, Artificial sequence
  synthetic
caagtggtcctgtcgaagtatttatcactgagactccgagtcagcccaactcccaccccatccagtggaatgcaccacagccatctcacatttccaagtacattctcaggtggagacctaaaaattctgtaggccgttggaaggaagctaccataccaggccacttaaactcct

SEQ ID NO: 33135 - DNA, 174 bp, Artificial sequence
  synthetic
ctagaccaaagggtgcggctgctgcagaggtggctgatgcaggtttccatccttggggaatgaccacgcaactgggcccagccctggtgctgggggtggccctgtgcctgggttgtggccagcccctaccacaggtccctgaacgccccttctctgtgctgtggaatgtaccct

SEQ ID NO: 33136 - DNA, 174 bp, Artificial sequence
  synthetic
atctccagccattgctcctccaacagagaccatggctcctccagtcagggatcctgttcctgggaaacccacggtcaccatccggactcgaggcgccattattcaaaccccaaccctaggccccatccagcctactcgggtgtcagaagctggcaccacagttcctggccagat

SEQ ID NO: 33137 - DNA, 174 bp, Artificial sequence
  synthetic
ggaggcaggcggtgccgcggcgccgggacccgactcatccggtgcttgcgtgtggtggtgagcgcagcgccgaggatgaggaggtgcaacagcggctccgggccgccgccgtcgctgctgctgctgctgctgtggctgctcgcggttcccggcgctaacgcggccccgcggtcg

SEQ ID NO: 33138 - DNA, 174 bp, Artificial sequence
  synthetic
cacccccaccgacctctcggagacaggaatccgctctgcccctgcatcctcctctgctcacccttctctcagtagtgtttgtcagacaccagtccggacctcagctctcgatctagttcccgagtaagatttagctcccgggaaagcgtgcctgaaacaagccggagtgagcct

SEQ ID NO: 33139 - DNA, 174 bp, Artificial sequence
  synthetic
cctgtaccataaccaggaggctgatggttgctcaggcctccctcaaactagccaatgagaagtgcacgggtcctggtcgcctaggaaaccgcgtgacaacaagatggcggcgctgcgggacggctagcggccctgcgtgggagttcctgacagctggattctagaagtagaact

SEQ ID NO: 33140 - DNA, 174 bp, Artificial sequence
  synthetic
ttccccggaagtgttggttaaagcccctccaatcagcggctcggtgcggcaagtttgaatttcgtggaggctcgggttgtgagggttcctgcttcggagtcggcggtggtcgtccagaccgagtgttctttactttttgtttggttgaggtttcacgctagaaggtggctcagg

SEQ ID NO: 33141 - DNA, 174 bp, Artificial sequence
  synthetic
ctgtccatacactctctcatcatcctgttccttggattggacttcactaagcaatttatcactcaccttcagacttacatgtgggagttttcacaacagtagttttggaatcattagaacttggattgatttcatcatttaacagaaacaaacagcccaaattactttatcacc

SEQ ID NO: 33142 - DNA, 174 bp, Artificial sequence
  synthetic
gagctccagcctccaggcacccgggatccagcgccgccgctcataacacccgcgaccccgcagctaagcgcagctcccgacgcaatggacccggcgctggcagcccagatgagcgaggctgtggccgagaagatgctccagtaccggcgggacacagcaggctggaagatttgc

SEQ ID NO: 33143 - DNA, 174 bp, Artificial sequence
  synthetic
tgttgactcatgcaaatgaggtatctgaactgcagcttcagtattagcagagccacaggccgcctctgtggcatcaccagggtttctctgaagaagagggtctgcattttcctaaacccagtgctgctctcccatctcccatcttcctctcgcagcttgatgagccccggtgtg

SEQ ID NO: 33144 - DNA, 174 bp, Artificial sequence
  synthetic
tgccccagccctcagggccgccagcaaggaagaaatttgtgatacccctcgacgaggatgaggtccctcctggagtggccaagcccttattccgatctacacagagccttcccactgtggacacctcggcccaggcggcccctcagacctacgccgaatatgccatctcacagc

SEQ ID NO: 33145 - DNA, 174 bp, Artificial sequence
  synthetic
gagaggccggcgtctctcccccagtttgccgttcacccggagcgctcgggacttgccgatagtggtgacggcggcaacatgtctgtggctttcgcggccccgaggcagcgaggcaagggggagatcactcccgctgcgattcagaagatgttggatgacaataaccatcttatt

SEQ ID NO: 33146 - DNA, 174 bp, Artificial sequence
  synthetic
aaccccaaccctaggccccatccagcctactcgggtgtcagaagctggcaccacagttcctggccagattcgcccaacgatgaccattcctggctatgtggagcctactgcagttgctacccctcccacaaccaccaccaagaagccacgagtatccacaccaaaaccagcaac

SEQ ID NO: 33147 - DNA, 174 bp, Artificial sequence
  synthetic
ctgcagcatcttctacgtcgggaccacagcctccgcctccacaaagcctgaacctcctttcgcaggctcagctgcaggcacagcctcttgcgccaggcggaactcaaatgaaaaagaaaagtggcttccagataactagcgttactcctgctcagatctccgctagtatcagct

SEQ ID NO: 33148 - DNA, 174 bp, Artificial sequence
  synthetic
ccaatacctgggatccattgcctctccttctgtgcacccagcaacgcccatttcacctggacgtgccagcggcatgacaaccctctctgcagaactttccagtcgactctcaacggcacccgacctgacagcgttcagcgacccgcgccagttccccgcgctgccctccatctc

SEQ ID NO: 33149 - DNA, 174 bp, Artificial sequence
  synthetic
tctcttgcttcaacagtgtttggacggaacagatccggggactctcttccagcctccgaccgccctccgatttcctctccgcttgcaacctccgggaccatcttctcggccatctcctgcttctgggacctgccagcaccgtttttgtggttagctccttcttgccaaccaacc

SEQ ID NO: 33150 - DNA, 174 bp, Artificial sequence
  synthetic
agttacctctcccctttcacgtagttttcatttgtggtgagattctctcccaggccacaagacatttcctgctcggaaccttgtttactaatttccactgcttttaaggccctgcactgaaaatgcaagctcaggcgccggtggtcgttgtgacccaacctggagtcggtcccg

SEQ ID NO: 33151 - DNA, 174 bp, Artificial sequence
  synthetic
atcagcccaaaggtaggctcaggctccgacggtggccggcgggggtcacgaggcttcgtagtggaggaacgggtttggcgtgtgggacgcagctgcctctgtactggggagtcacggagtggccgggctccagggacatggcggcggcctctgcggtgtcggtgctgctggtgg

SEQ ID NO: 33152 - DNA, 174 bp, Artificial sequence
  synthetic
atccggaggcagcctgcaggaagccgtagcgccggtacgtgcccctctcctgtctggaggcgggtgtagaagtccgaccgcggaagccagactgctgtccagtcggcgagcgcgtaccattcagcatcggctccgcccgagtcccaccttcctcaggctctgattggctgacac

SEQ ID NO: 33153 - DNA, 174 bp, Artificial sequence
  synthetic
caacagaagccaagaaggaagccgtctatcttgtggcgatcatgtataagctggcctcctgctgtttgcttttcataggattcttaaatcctctcttatctcttcctctccttgactccagggaaatatcctttcaactctcagcacctcatgaagacgcgcgcttaactccgg

SEQ ID NO: 33154 - DNA, 174 bp, Artificial sequence
  synthetic
tggctgacacattcctggagcacatgtgccgcctggacattgattcaccacccatcacagcccggaacactggcatcatctgtaccattggcccagcttcccgatcagtggagctgaagaagggagccactctcaaaatcacgctggataacgcctacatggaaaagtgtgacg

SEQ ID NO: 33155 - DNA, 174 bp, Artificial sequence
  synthetic
gacatttacatcctgcccagcgacaactctggacaagtcagtcccccagagtctccaactgtgaccacttcctggcagtctgagagcttacctgtgtcactgtcagctagccagagttggcacacagaaagcctgccagtgtcactaggccctgagtcctggcagcagattgca

SEQ ID NO: 33156 - DNA, 174 bp, Artificial sequence
  synthetic
cctctgacttgacccaatgaaagaagcatatggcacttgtgaagataaatgttactcctccctttttaattggaacttctgcttaggacctgtgtatgacgtttcacctgtgatctgttctttcggtagccactgactttgagttacaggaaggtctccgaagatttgtgtcaa

SEQ ID NO: 33157 - DNA, 174 bp, Artificial sequence
  synthetic
cttccctgaggaggacgaccccaccaactggctgcgttgctactactacgaagacaccatcagcaccatcaagtctgtggcctgggagggaggggcctgtccagccttcctgccatccctacgaccactgcccctcacatcaccttctcatgggtccctctcccactccaaagc

SEQ ID NO: 33158 - DNA, 174 bp, Artificial sequence
  synthetic
atttatgatttcaacatggatacatatttcagttctttctttttctcactatctgaaaatacatttccctccctctcttccccccaatatctccctttttttctctcttcctctatcttccaaaccccactttctccctcctccttttcctgtgttctcttaagcagatagcac

SEQ ID NO: 33159 - DNA, 174 bp, Artificial sequence
  synthetic
cccttccggctggccccgctcagtcacccgcagcaggcgtgcagtttcccggctctccgcgcggccggggaaggtcagcgccgtaatggcgttcttggcgtcgggaccctacctgacccatcagcaaaaggtgttgcggctttataagcgggcgctacgccacctcgagtcgtg

SEQ ID NO: 33160 - DNA, 174 bp, Artificial sequence
  synthetic
atacaaatttgcctttggcacaacagataccactaagttctacccagttctccgcacaatcattagctcaggcaattggaagccaaattgaagatgccaggcgtgcagcggagccctccttagttggcttacctcagactatcagtggtgacagtgggggaatgtcagcagttt

SEQ ID NO: 33161 - DNA, 174 bp, Artificial sequence
  synthetic
tccgtcctccaggatctggggagaaagagccccatcccttctctctctgccaccatttcggacaccccgcagggactcgttttgggattcgcactgacttcaaggaaggacgcgaacccttctctgaccccagctcgggcggccacctgtctttgccgcggtgacccttctctc

SEQ ID NO: 33162 - DNA, 174 bp, Artificial sequence
  synthetic
gtttacttcccctgccagcattggggtgctctctaagcaacagtaggcggagagtggtctggcgtattaaaaacaaaggatcgtcaagtgggccttcccaggcattgctttgacttagtacatgtagaggatgtggcagttctctccgtccctgccactgctggtttctttgtt

SEQ ID NO: 33163 - DNA, 174 bp, Artificial sequence
  synthetic
tattttaagcccagtcttccctgggccacctttagcagatcctcgtgcgcccccgccccctggccgtgaaactcagcctctatccagcagcgacgacaagtaaagtggcccgccggtttctgagccttctgccctgcggggacacggtctgcaccctgcccgcggccacggacc

SEQ ID NO: 33164 - DNA, 174 bp, Artificial sequence
  synthetic
ccagcggaagtaattctttcgactgccccggaacccaccggagcaggcagctgggggtgggggggcggccctgggataggggctgtggcagtacgcggggacccggctgcggtggctgcgggactgacgaatggagaggagaaaacctatggtggctgtgaaggacctgatgcc

SEQ ID NO: 33165 - DNA, 174 bp, Artificial sequence
  synthetic
atggggaaggtgaaggtcggagtcaacggatttggtcgtattgggcgcctggtcaccagggctgcttttaactctggtaaagtggatattgttgccatcaatgaccccttcattgacctcaactacatggtttacatgttccaatatgattccacccatggcaaattccatggc

SEQ ID NO: 33166 - DNA, 174 bp, Artificial sequence; identical to SEQ ID NO: 33112
  synthetic

SEQ ID NO: 33167 - DNA, 174 bp, Artificial sequence
  synthetic
atttctgggaagcagtcgatattatctgtacgcctagaacagtgccctctgcagctgaataacccttttaacgagtattccaaatttgatggcaagggtcatgtaggtacaacagcaaccaagaagatcgatgtctacctccctctgcactcgagccaggacagactgctgcca

SEQ ID NO: 33168 - DNA, 174 bp, Artificial sequence
  synthetic
ctctggtgatacagaagaaaagacagtctccattttcaaacagtccctcctgggagaacacagacaggcagaggattacaacacaaggcagcaagcactgggagacgaaagttttggcatctgttccctggctgtgccaagatgggcgattggagcttcctgggaaatttcctg

SEQ ID NO: 33169 - DNA, 174 bp, Artificial sequence
  synthetic
gtctactatgtctgaactgtggtttcttgtttatccttttttccttagttggactgtaatgtatggtctgtcaacctgtgaatctttaaagtatgattcaggtattgttgtattctttactgtgtaataaaaaagttgaaaaaaatctggatcctctgtctccctcgtccccgg

SEQ ID NO: 33170 - DNA, 174 bp, Artificial sequence
  synthetic
tttcgtgaccttgtccagtagaaggctatttaattttcacaactgcttgaattttgacatacaagatgaagcaagatgcctcaagaaatgctgcctacactgtggattgtgaagattatgtgcatgtggtagaatttaatccctttgagaatggggattcaggaaacctaattg

SEQ ID NO: 33171 - DNA, 174 bp, Artificial sequence
  synthetic
tgtctgcaccagccggcctccagcctggctggaccctgctgcctgtgtggcccggagccagaggcccccacactcccagctgctcttctacagatgccatcaacgagcaggactctgggtggctccactgtctaagggctctgcgagtgacccggcgggcgagctccgtgctgc

SEQ ID NO: 33172 - DNA, 174 bp, Artificial sequence
  synthetic
cttacgtagtaattacatttccttgaaaaaactatagtgaatagaaatccctagccatttcattttttatgtttttaatgaagatctttaaaataccataggtggtaatcgtggaaaatttgaaaaatctcatgtcagtgtattaagatggtggagaagtttttttctccatta

SEQ ID NO: 33173 - DNA, 174 bp, Artificial sequence
  synthetic
attcatgaaaatccactactccagacagacggctttggaatccaccagctacatccagctccctgaggcagagttgagaatggagagaatgttacctctcctggctctggggctcttggcggctgggttctgccctgctgtcctctgccaccctaacagcccacttgacgagga

SEQ ID NO: 33174 - DNA, 174 bp, Artificial sequence
  synthetic
gagcttccagggatatttgaggcaccatccctgccattgccgggcactcgcggcgctgctaacggcctggtcacatgctctccggagagctacgggagggcgctgggtaacctctatccgagccgcggccgcgaggaggagggaaaaggcgagcaaaaaggaagagtgggagga

SEQ ID NO: 33175 - DNA, 174 bp, Artificial sequence
  synthetic
gccccctcccctgactatcaaagcagcggccggctgttggggtccaccacgccttccacctgccccactgcttcttcgcttctctcttggaaagtccagtctctcctcggcttgcaatggaccccaactgctcctgcgccgctggtgtctcctgcacctgcgctggttcctgca

SEQ ID NO: 33176 - DNA, 174 bp, Artificial sequence
  synthetic
agtcgcatagtggtttttccgctcgcgtcgctgtgtgaaagttggctcgccgctctttgcacgccctccctggaggccgacccgagacgccaagctggagagaccgtgcctccccgaggccggccgccccgcgagcacagcctccgcccccgttgcactgccgggctgggcaat

SEQ ID NO: 33177 - DNA, 174 bp, Artificial sequence
  synthetic
ggtggcgggaagaggaggcgcgagaatggaggtggaggccgtctgtggtggcgcgggcgaggtggaggcccaggactctgaccctgcccctgccttcagcaaggcccccggcagcgccggccactacgaactgccgtgggttgaaaaatataggccagtaaagctgaatgaaat

SEQ ID NO: 33178 - DNA, 174 bp, Artificial sequence
  synthetic
tatttccctctactgagtaaaccctatctgtgattcccccaaacatctggcatggctcccttttgtccttcctgtgccctgcaaatattagcaaagaagcttcatgccaggttaggaaggcagcattccatgaccagaaacagggacaaagaaatccccccttcagaacagagg

SEQ ID NO: 33179 - DNA, 174 bp, Artificial sequence
  synthetic
tgttacttaagaatgctttccaggtggaaagttccttaagtttgaggcttcaaattccatacagcacattaaaatcccattcatgagtttgaaatactgctctgttgtcttggaaataccaatcagattgttggctgaagtgatgtggataaagaagggatcttagaaaaacta

SEQ ID NO: 33180 - DNA, 174 bp, Artificial sequence
  synthetic
acgaagttccggaaatggaattaccgagtcagatgagaaacacaagtcatcaatgaattaacaagcaacacattgtcacatccagctgttgaagagtggttaactcagcttgatctccgaagactcttctgcaccccaccccgcccccaactgctttccaaagagaaacagaaa

SEQ ID NO: 33181 - DNA, 60 bp, Artificial sequence
  synthetic
aaaaaaaaaaaaaaaaaaaaaaaaaaaggccagtgaattgtaatacgactcactataggg

SEQ ID NO: 33182 - DNA, 69 bp, Artificial sequence
  synthetic
tttttttttttttttttttttttttttttttttttttttttttttagaaggcacagttaacgcggccgc

SEQ ID NO: 33183 - DNA, 624 bp, Artificial sequence
  synthetic
ttaaaacagcggatgggtaccccaccatccgacccactgggtgtagtactctggtattttgtacctttgtacgcctgttgttcctaatgtacccaccctaaaacttccaacccaagtaacgttagaagtttgacattaaagtacaataggttgcactacatccagtggtgtttcgtacaagcacttctgtttccccggagcggggtatagacggtacccactgtcaaaagcccttaaccgttatccgccaatcaactacgtaatggctagtaacatcatgaaggtgagttgacgttcgatcaggtggtaacccccactagtttggtcgatgaggctaggaatcccccacgggtaaccgtgtcctagcctgcgtggcggccaacccagcgtttgctgggacgccaattcactgacatggtgcgaatacttgcatgtgcttgattgtgattcctccggcccctgaatgcggctaaccctaaccctggagccttgcaccacaatccagtggtgtctgggtcgtaatgagtaattctgggatgggaccgactactttgggtgtccgtgtttctcatttttcttattattgtcttatggtcacagcatatagtaatatatactgtgatc

SEQ ID NO: 33184 - DNA, 627 bp, Artificial sequence
  synthetic
ttaaaacagcggatgggtttcctaccatccgacccactgggtgtagtgctctggtatattgtacctttgcacgcctgtttcccctttgtacccatcctgaatttcctccctctgcaacgttagaagtttgtgaaattaaaagtacaataggaagcatcacatccagtggtgttcagtacaagcacttctgtttccccggagcgaggtataggctgtacccactgccgaaagcctttaaccgttatccgccagccaactacgtaacggctagtagcaccttggatttaagttggcgttcgatcaggtggtaaccccccactagtttggtcgatgaggctgagaactccccacgggtaaccgtgtctcagcctgcgtggcggccaacccagcgtttgctgggacgcccttttatagacatggtgtgaagactcgcatgtgcttggttgtgattcctccggcccctgaatgcggctaaccctaaccctggagccttgtgttacaaaccagtaatattaaggtcgtaatgagcaattccgggacgggaccgactactttgggtgtccgtgtttcctgtttttctttaaaatgtcttatggtcacagcatatatactgtatatactgtgatc

SEQ ID NO: 33185 - DNA, 624 bp, Artificial sequence
  synthetic
ttaaaacagcggatgggtatcccaccatccgacccactgggtgtagtactctggtattatgtacctttgtacgcctgttttccccaaatcccctaccctttatatctcctaccccgtaacgtaagaagttttcaaacagtacaataggaagcaccacatccagtggtgttatgtacaagcacttctgtttccccggagcgaggtataggtggtcaccaccgccaaaagcctttaaccgttacccgccaaccaactacgtaatggctagtaacatcattgatttagattggcgttcgatcaggtggtatccccccactagtttggtcgatgaggctaggaataccccacgggtgaccgtgtctcagcctgcgtggcggccaacccagcgtttgctgggacgccaattcactgacatggtgcgaatacttgcatgtgcttgattgtgattcctccggcccctgaatgcggctaaccttaaccccggagccttgcagcataaaccaatgttgtggaggtcgtaatgagcaattctgggatgggaccgactactttgggtgtccgtgtttctcatttttcttattattgtcttatggtcacagcatatttgttaaatatactgtgatc

SEQ ID NO: 33186 - DNA, 626 bp, Artificial sequence
  synthetic
ttaaaacagcggatgggtatcccaccatccgacccactgggtgtagtactctggtattatgtacctttgtacgcctgtttctccctccctaccaccccgccccacgtatcccgtaacttagaagaattgaacaatcgcacaataggagctattacaaccagtaatagttggtgcaagcacttctgtttccccggagcgaggtataggctgtacccactgccaaaagcctttaaccgttatccgccaaccaactacgtaacagctagtatcatcttgttcttcactggacgttcgatcaggtaggcttaccccacctactagtttggccgatgaggctgggagtccctcacaggtaactgtgtcccagcctgcgtggcggccaacccagctcttgctgggacgcccttttatagacatggtgcgaagactcgcatgtgcttggttgtgagtcctccggcccctgaatgcggctaaccctaaccctggagccttgagtcacaatccagtgatggcaaggtcgtaatgagcaattctgggatgggaccgactactttgggtgtccgtgtttccttttattctttatattgtcttatggtcacagcatatatagcatatatactgtgatc

SEQ ID NO: 33187 - DNA, 629 bp, Artificial sequence
  synthetic
ttaaaacagtggatgggtttcctaccatccgacccactgggtgtagtgctctggtattatgtacctttgtacgcctgttttcccattgtacccttccttaaattcctccccatgtaacgttagaagtttaagaacataaatgtacaataggaagcatcacatccagtggtgtatggtgcaagcacttctgtttccccggagcggagtatagacggccaccgctgtcaaaagctcttaaccgttacccgccagctaactacgtaacggctagtaacatcttgtcgtgcttagggtgttcgatcaggtgaagaaaaacccccttcactagtctggtcgatgaggctgagaagtccccacgggtaaccgtgtctcagcctgcgtggcggccagcccagcatatgctgggacgccttaagtatgacatggtgtgaagacccgcatgtgcttagctgtgagtcctccggcccctgaatgcggctaacctaaaccctggagccttggagcacaagccagtgcttgcaaggtcgtaatgagcaattccgggacgggaccgactactttgggtgtccgtgtttccttttatttcattattgttcttatggttacaatatatagagtatattgtaatc

SEQ ID NO: 33188 - DNA, 622 bp, Artificial sequence
  synthetic
ttaaaacagcgggtgggttccctaccatccgacccactgggtgtagtactctggtactctgtacctttgtacgcctgtttatccactacccttttcctaaattttccacccgtgtaaccttagaagcaaacaaattgtacaatagggtgcatcacaaccagtgatgtacagtacaagcacttctgtttccccggagcggggtatagacggtcaccactgtcaaaagcccttaaccgttacccgccaaccaactacgtaacggctagtaacaccatgaatttgtcttgacgttcgatcaggtggtaaccccccactagtttggtcgatgaggctaggaattccccacgggtgaccgtgtcctagcctgcgtggcggccaacccagcgtatgctgggacgcctttttatagacatggtgcgaagactcgcatgtgcttggttgtgagtcctccggcccctgaatgcggctaaccctaaccccggagccacgcggcataatccaatgtcgtatgggtcgtaatgagtaattctgggatgggaccgactactttgggtgtccgtgtttcctgtttttccaaattattcttatggtcacagcatataaatagatatatactgtgatc

SEQ ID NO: 33189 - DNA, 623 bp, Artificial sequence
  synthetic
ttaaaacagcggatgggtatcccaccatccgacccactgggtgtagtactctggtactttgtacctttgtacgcctgttttccccctcttgtacccgcccttcaagctccttgcccaagtaacgttagaagtttgaacattggtacaataggaagcatcacatccagtggtgtactgtacaaacacttctgttgccccggagcgaggtatagatggtccccaccgtcaaaagcctttaaccgttatccgccaaccaactacgagacagctagtaatgccctgttctcctgcaaggcgttcgatcagacagatttcccctctgttagtctggtcgatgaggctaggagctccccacgggcgaccgtgtcctagcctgcgtggcggccagcccagcttttgctgggacgccttttcaaagacatggtgtgaagacctgcatgtgcttggttgtgagtcctccggcccctgaatgcggctaaccttaaccctggagccttatgccacgaaccagtggttgtaaggtcgtaatgagtaattctgggatgggaccgactactttgggtgtccgtgtttcctttattcttatcatttgtgtttcatggttacaagcattgtttgtaatc

SEQ ID NO: 33190 - DNA, 629 bp, Artificial sequence
  synthetic
ttaaaacagtggatgggtttcctaccatccgacccactgggtgtagtgctctggtatattgtacctttgcacgcctgttttcccattgtacccttccttaaattcctccccatgtaacgttagaagtttaagaacataaatgtacaataggaagcatcacatccagtggtgtatggtacaagcacttctgtttatccggagcgaggtataagcggtacccactgctgaaagcctttaaccgttacccgccagccaactacgtaaaagctagtaacatcttgtttgtaacttggcgttcgatcaggtggattccccctccactagtttggtcgatgaggctaggaactccccacgggtgaccgtgtcctagcctgcgtggcggccaacccagctcttgctgggacgcccttttatagacatggtgtgaagactcgcatgtgcttggttgtgattcctccggcccctgaatgcggctaaccctaaccccggagccgttgcccataatccaatgggtttgcggtcgtaatgggcaactctgggatgggaccaactactttgggtgtccgtgtttcctgtttttctttaaaatgtcttatggtcacagcatatagtaattatatactgtgatc

SEQ ID NO: 33191 - DNA, 621 bp, Artificial sequence
  synthetic
ttaaaacagcggatgggttctcccaccatccgacccactgggtgtagtactctggtattctgtacctttgtacgcctgtttctccccacccccccgtcctaaataatcccagtaacttagaagatttgaactattgtacaataggcgctgtcacatccagtggcggctagtacaagcacttctgtttccccggagcggagtatagatggccaccgctgtcaaaagctcttaaccgttatccgccaattaactacgcaacggctagtaatatcatgtaacttttagggtgttcgatcaggtgagtgtacccctcactagtctggtcgatgaggctgagaattccccacgggcgaccgtgtctcagcctgcgtggcggccagcccagcttatgctgggacgccttaattgtgacatggtgtgaagactcgcgtgtgcttagctgtgagtcctccggcccctgaatgcggctaaccctaaccctggagccttgagtcacaatccagtgatggcaaggtcgtaatgggcaactctgggacgggaccgactactttgggtgtccgtgtttccttttatttttaagttgttcttatggtcacaatataagtaatatatattgtgatc
